United States Patent Application Publication US 2014/0230087 A1 - sequence listing, part 5

SEQ ID NO: 1995 - DNA, 1384 bp, Brachypodium distachyon
  Intron number 1 from transcript Bradi2g59580.1 (locus Brad i2g59580) derived from phytozome v7.0 (chr-ID Bd2; pos 572 45366 to 57246749 reverse strand)
tccctgctcgtgtcttctggtaagaataggttgataccgaatctctttctccatataaggattatgtgaggttatatcaaataaaaaaatctttctttcgtttctgtagatgtggttaaaaaaaatgcgatgatcacaacaccgtgatcccctgtggtaagtctagctggacttgttttgtgcagtgccgccgcgctgcgccggttatcaatatggctattgcaaggatgctacatgtgtgtgtgtgtgaactgcaggggccatgtgatgggttctacttgattagttcctttgtatcggatgatttagttggtgatcaatagttttgtgctcttaaaacaaacatcccataataaatcaagcattacttggatgattagtgaagtatgatgttgtatccgtgccaactaggattaaattctagatcctgaagtagaaataaaaataaattatagatttgacattgtggtgtcagattgatgcaaccattctttcagtgggatgtggcggttccgtcgtgagctcttttacggtatcacaaaataaatatgagccatcaaccgcacattgttgtgcaaacttttcgttacatgagtgaaattgagtagcaacgaaagagtatccaaaattaaaagcatatagtaaaattgtaaattcttctcttgtggagatagtttgacggaaaatacaatgcatgcatgtgtaaaaaatatgaaatggatgtgaacaaataaaatgatatgatgacatgatgtggcatggttgtatgtttgagagaaatcaatcaatggtgtataagatatagaacgaatacttagatatggaagatgagggagtatctatgaatacagaagagaggggttgcgaaggaaagaaaaggtaaaaaagacattgttgacagtgggatttgaacccacgccctttcggaccagaaccttaatctggcgccttagaccaactcggccatatcaacttgttgctcagactgaacaaagagtttttattcttagttattgatcagttgcggtgcggacagactggagtttctagtaccagtagaattggacaggctaattaacgagcgagaggatgatggatggaatgtgtacgacgcaaaccggttttctgttgctcacacatacagtgcctgcctagctgcctcctttgcttgcccgatcgagacagaactcatacatccctgatccctcccttgcctgacgctacaaatatccgcacgtatatacaaacccaacccaacacaagctcccctctccacaacggcacaaacaccacaactatacactcacactccctagcaaagcacatccattcgctcccacgcactgcagtggcaggcgttgtcaacgttaaagctgccgcggcg

SEQ ID NO: 1996 - DNA, 2786 bp, Brachypodium distachyon
  Intron number 3 from transcript Bradi2g06380.1 (locus Brad i2g06380) derived from phytozome v7.0 (chr-ID Bd2; pos 485 0171 to 4852956 reverse strand)
atcttgtggattcctggataactcctaagaaactagtatgctcacttcaaaattgctctgttgctttacttgttcaatgcgatgtatctctaccccttttgatgaagttgataataatggttgtatcgggggtttagcaagtattcaatcaagtattggatttggtagtgttgttaagagtaatggcagatgtaggcctttataaaccatctcacccacaagaacggttgaggtccttaattcgaaaaaagacaagaacaacaggcaaattttcagctgtacagaacatcattaattttcagaaccagtcctctgcagcagtgtatctgctcaacaccaggcaaattatcttcaaaaccaacaagactgtttcaaaatgattagaattaaacttcagagaatagagcagcagcacacacaagtatttggacttgcagcatacatagagcagcagagaaactgaacaatgagtagagcagcagcacacacaagtcttcagacttacatcatacatagatggttatcactaattggagtattgtttgtttgtatgttaaggcaaaacattttatacaaagcactgaagtgcagacttgtttactcataaaatggcacttatttcttagaatccagtacttatatggtgcacttcatttgctgagattttacattcagttctgcaggaatccagtaagatctttccatgttgaaaacaggagcctatgtacatattgtctcaaaacttgagtaagagtaccgaaatacttgtgtcttcagttagttgagtaatgagtataggtacttccagtatttgcatcataacaggctctaacaattcttatatggtgcacctcaacatatattcttagaacccaatacttatatgcaacataaattctaaatgttctgatatgttaaactgaacttcagaaatggaagtttagtttcagtaatttcagaaatgcacttcgctcctgtttaggctaggctatgttgattgtgcccctgctccaccccctctccccgtcactgtttctgaatttagtatcttcatcattcacctactccagtctgaaacagagccattgtgatggcatgtgctaatgccattgtgattttatactctagatagagaaataaattcatatgaaactatatcaaactgaagcactggacacctcccaatttttatacaaatagacctcatttgtataagtactggactctaaaaaaactaagtggatgttcagaaaactactttctatcttccatcgtcaccttcttctagtattatgttcattgagttattatctggttattttgcagcagaaagttaagtggatgtagtggtcaagttatacttttagtatttggggcgaggctccttatcataatgaaaatatgatgtattgatgtatcttttacatcactgtttatttttgtgaaggatacttgtgcaaagaacaaggtgagccgatcaatggtcaagtaccagcaagccactggttcacgcagttatgaggtgcaagtacaagaagtggtatgtcaattcacaacaaatcactaatagctttgttcataattaggccgtaatcaatatttttttgcaaaaacagtttctgagcgagaagtacaaagataagcctccagatgcagttgacttgttcaaggagacccactttagtacaaaaagaggatttagtgagaatgcgcaagctgcaattgtaagttctcattttttgcctttgccattgtctgaagagcccaatctacaatatatgataactttgggttttctttcaatgtgatggttatctgattgtgcttgacaaatagtttactgaaactgttgtaatctaaagaacactttgctgaaactgttgtcatatcaagctgccatgcaattacgttctgctatgtatgttgttgtttcaccggaacatatctgttgttttcaagtattttgtatgctgttttcaagtgctttccctgctgttttcgaaactggtactaatcagtacagaatttgaagatggaactaatatgaaacttgtagatgatgtcgatatctttccaatgatatattgtttgtgtaaatccgatgattggtctgaaatctagagcataaaaatcctactgttgtcggttccaagtgctatccctgttgttcaaactagtacttatctgtaaataatttgaagatgtaactaatatgaaacttgtagatgttgtcgttgactttccaacagtatattgtttgtctaattccgatgattggtctgaaatttagagcagaaaaactctactgctgttttttaagtgttatccttgttaatttttaaactggtacttatcagtacaaaatttgaatatgttactaatatgaaagttgtagatgctgttgatatctttccaacagtattttttgtgtaattctgatgaggtcgtttgtgtcaccaaacttgtagaaacttgtaaatgttgtttgtgtaactactatgaaacttgtaaatgttgtttgtgtaactaatatgaaacttgtaggctacaacaagtaacttcccgtaggtagtcgccacatttatttcccgttgtttctacgtaggagttagttactacagccttaacccccccccccccctcttctttattttcaaattatgccatgtgaatgattaatcttgtttgtgttgttgaatgaaaaatcatatttcctgcagcatcttgttgcctcatttttactttggttatgataaatctgctttggtgataatttcaaggattct

SEQ ID NO: 1997 - DNA, 1724 bp, Brachypodium distachyon
  Intron number 1 from transcript Bradi3g19690.3 (locus Brad i3g19690) derived from phytozome v7.0 (chr-ID Bd3; pos 185 72744 to 18574467 reverse strand)
tccctcaaggtaataattttcttaaaacaaatttgcccaatataatttgcatagaattttgtcaccaatttgttttcatgtgttagtaaaattctacctagttgacgctggttatggagccaagcctgggtttttgccaccttttcgtgccatgaggtaccatttgaatgagtgggacagcaatccagtacaaaatgaaaaggaattgttcaaccttaggcactcatctctacgagtgatggtcgaacgtgcctttggaactctcaagagacgatccaaaattcttgatgaggcaaccccattttttcctttcccggttcaagttgacatcgttgtagcttgttgcatccttcataattatgtgctctctcaagggattgaattcgcaccaaatccttcttcttcgtcccgttccctcccgtttggtaccatttattgtggttccagcgccgatttggtaccctcccgctgccgaggttggggagctcgaggtcgggctggacaagggggtcgaggggaggccaggtcgggccttgacgaggagcagacaagggggtcgaggtgaccgcgcggtgtttagggatttaacgagagagagggggtcgggggaaggtggtggggcagataattgagcgagagaggtagaggaattgggggaaggggaggggatttgaggaatcggggaagggaggctctgtcattttttcaggagtcggggacatcttgcttctgttgctgtgctgcgaattggcttgttgctgtttgttgaccattacaacaacacttgaacatgattttaggttgccttaatgatgcggatagtttcacaaactcgttgatccatggaaacagcggcatgtattggagcaagagtcggtttcgtagcccacctgaggagcgaccatcccctcaaaaatttgttggtagttacaagatagtaacaaaatacaggtgagttaaaagtaaggggcaagatttagggaatgatttggaacagagaaatagagaaggaatctttagtgtggttcattgtaaggaactaaggagaagtagataaccaagtttagggaaagggcctgagatgctcttagaatgtgcagatagtatgcgcattgtttgctttagaaaaacaaatgatgtgcatcacttgtgcattatcatttctagttgtcttgttgtaccccctgactgtttgatgccattgatagtcaaaaaggccctgagagagatctttcctatacacagtctgccctatatactactcccttacgttgggaattgggttagtagaaacaggagttaagacatagattgggatgacaaagtagtatagggggtatgttgttttttctttgctcgacaccttgagcaaaggatttcattgctggaccattgtgcatattagttcacaactggatcaccactgattagaaggagagtgacatgtggaattgggtcattacaaaaaggagttaagataatatatttggatgacaaagtaatagagggagtattccttttccttttctcgatgcctcgaccaaaggattacagtgctgaatcattatatagggtttatacttgcccttagacattctcccctagtactaaagcattaaattaaactccactttatacgtatctatcttgctaaagctttatatcctgacatacttttttggtgcccctttgacaattatgctaatattttgaatgaaccagca

SEQ ID NO: 1998 - DNA, 965 bp, Brachypodium distachyon
  Intron number 3 from transcript Bradi2g49050.1 (locus Brad i2g49050) derived from phytozome v7.0 (chr-ID Bd2; pos 492 15215 to 49216179)
tgcttcattacctagcacccaagaatctgtacgaggtatgtagaaatattgctatccatagtttttaatttattgcttggtgttgaattatggaacataaatgtgcagcggacagccctttgttggttgtcaaaattgtaaagatccttattagttgtagggtaaattttacagaaccacatattttgtggctagagtttcacgtaacgacagttgacgctaattttctcacagaaccaccaaacttgtgacatgtcttttcgaaaaatccaaatctaccgttttactgcattttgacaacaattctgacagatgggcccacatgtaagtgtcatgtcatctcttaatgggctttttactcaacccgttcttggtctcctctggttcggggattggatagggttaatgggtcaggtcactgaccgggtattttgcaacgtagacacatgtgggccacacatgtcaggaacactttcaaatccactaaactggaagttttgggttatttgagaatctctgcctcaagagttgtggttctgtgagaaaattagcgtcaactatggttctgcgaaaccctatgcacaaaatgggtgtttatgtgaaatttactattagttgtaacttacaatgagtagtttggggcatttagtatcttgataattgatcatgattgtagcatttagtatatggataatgtgcagagtacaacccttctgtttaaggtattctctctatttgctaatgtattctcaagtcgtgaagctccttttgggttgcaatcagtagttttgggcatttggtatcttgataattgatcatgatcatagcatttatcagctgaatatcatagaaagtcaatcatatgatttactgtatgtaatgaaaattaataaatcttcagctgatcctttatttttggcttcatatcagacgaacatattgagtactcagaagattcagccccc

SEQ ID NO: 1999 - DNA, 5525 bp, Brachypodium distachyon
  Intron number 1 from transcript Bradi2g26200.1 (locus Brad i2g26200) derived from phytozome v7.0 (chr-ID Bd2; pos 245 68719 to 24574243)
gcactaccactccaatttcgccgacacaggcaaaggtcagtcggtggcttgattcccctccatagttgcaattttgggtgttttaggcttaagtgtgtggctttgtgtttcttgtcgtgattctgtcataaatgactgatcttttggtgatggcgatggtgaggttgatgcgatggattccatggtagagagagagaagtccaaaacagatgctgggattgggttgctacacaagtccaatgagctgtccatgttcaatcacaacccactatcccattctcccagccggtaacatgccgatgcacgggatgttcttgtagcagctactaccaagctattggtaaaactatttgaactggtaaaggtggttttccgtacaatcattggtttacatgacatgattgtttattttgacaatcaaaattgttgcttatgtgggtccaataaacccatcggctgatattcttaactccacacgggaattaccatgcaaatgccattccaggatctaacctatgcattttaagatgttctatgtataaatgttactccctccgtcccaaaataagtgacgtgaaatccacatcacttatttccggacggagggagacatctttcatcagggttcattgtttatgatacccaaaactgcagacagtaacaaaacaaagtagatggtcaagtgaacaacgctagaagtcgagaacagagaagacagagagggaggctggggtctggagcttttcattgtccaatgctcaagaacgtctgttccttgtcctgtcttggttattcagttcccgttcgagatgaaaattgtggagtcaaatcatgagagcatgacatgaaccatacaagtaggaattgttgagttgctgagtttattttatttcttaacacgccaatttttctatgaactcctaatttcttaattgggaatgtaaaaagtgttacacaagcaggtaaggagccagaatgcagaattaaggactattggtttgaactctgcatttctaaagtatatgttatcaggttattgtttcattccatagtaatctgcataaggtacatctattaggttccccatccccatgtttgaaaggctcccctatttccgccctttactaggttcacatgacccgcttatattgccctttcattaggggcaagacttcttgtttccccttcacatctgacataaacaaatacactggagattataatatcattgttactcactaaaggagtttattccacatttcactccttgtttgcgaccttgtgacagatttaccccattttaacaaatcctacaacatttaaaaactgtgtcagtccatcatgttgggaaaaataataataaaatggggtaaaagttgtcacaagttcacaaatagggggttgagagttagaaatggaataactcgattgattgttttagtgtaagaggatgcctgagtgtattatcctgtagtccctgtgccaaaactttatgtaaacaaacatgaaattctgtaaataaatagagattgtagatacacagtgaatgctgatctgttggtacgtaaaaagatcatattgccccaacacgtcgatccgtcatcattaggcttgcctttgctttggtgctcaacagagctccaccccagcatgcgctgttcccttgttgccatacttgtctgctgcatgcctgcatctgtggccttgctgttatacatgactataatactccctctgtacagaaaaggatgtcgcaacttccccaccttctagttcaaacgaaaatttgcaaaaatgtccctcgaatttgaaattttgaattcatatctcaaattcaaactgaaatcttgactgtccgtcgccgtccctctggcctcgcgcggctggagctcctgctggcctcccgctgcccacgcccggccggcctcccgctgccctcgcacgacgggattacccgccggcctcccgctgccctcgcgtcgcccgagctcgcgccgtccacccgctgccctcgcgcgaccatccgctcccgccggcctcccgctgctctcgtgatctggaatcgtggcggtcgccccgttgtgatctgggatcgtggcggtcgcctccctctgctccgttgtgcctctgatcctccacaacgcctcgccgctcgcctgctctctgcctgcgagcgccttgctgctccacagcgcctcgccggcggcctggctgcctgcgcgcgcggcgtgctgctccgtgtgctgagcagctggccctcctcttctccgcttcacgctgctgacctcctctgcacctgtgcgctgctgcttctcctcgacctggtgcgccggaacctacggaacctgctgctcttactcctgaacctgttgaacatgctgaagaacagagcagtgcaaattcagttgtacaagaaggtcagaatttaggggaagaaattaacaatccagaacaaattgaaaatccagataataggagtatatggctgtttataatattgactgaattttattttggaccaggtgtctgtttacaatgttcagatcaatgttaacaatcaacatagcagcaaactgaatttaatttgatttacttaactgccactgaatgatattactcctgttcctgttcctcttccagattctgcttcaattttgagtagtctgctaactgaatttattttgactagtctgctaactgaattttgagtacagtagcttcttccaaaaaggacctgaacattactgtcaatcaagatcaatactcatctccagttcagaaaatttcttactcctgaaatagcttgttctgaaatatctccagcattgcgggaatagcttgttctgaaaaatcttatccctcttctctatctttttcctttctttatgtcagataagaatctatgttcatgcaaaggaaatatgtctaccgtaaaaatgggctgcacacagaagaaatgttctcggtaatttagcttcttcctgtacattgaatctaattatgaaactgatttactccatactaacagtacacatttgctaatggtaaccacacaaagtgctaatggtaaccacacaaagtgcaaagcattatactcctacaacaccagaaatgagttatatttctaaatcagaaatgtatcatcgatggcagataatgctgcaattggatgttgacaaaatactctggacctataataccagctactagtgtcacatatttttgggcattcctgtaatggacatcactcaaatgaaattgaaatgcaaatgagaggtgaagaaaccatatactgtcagcacattattccctggccataggaaaagcaaggatgcagcagcagaaaccacatccacacaatgattcagtttctgtaatgtttccactggtgtcaacacattattcccatcaatgattcagttttcaaaaggcagaattctttcggttaagacgtgcagcagaaattatgtcaaatccacatccacacaaaaacagggataatcaatcagcagaaactagccatagaaaggcttgtaaaagatgcaattccacatccacacaaaaacaaggataatcaatcagcagattcagttttcaaaggcttgtaaacattaggttaatgcagattcagaacacaaaaaccaatcaaacaaccagctattttagacagagtagtaacaagctgtcagaacattattccttggactaatctgtcatgttaaatccctaatcgtaaacatgtatactcctggagtagaaaaggctcattgctgcaatttggagttgcacattgttcagacagaacactagctagtttcagagttccgtatgaggcagataggcttaccattggacgcaggaagaaggctggggcagctccacccgatggaactctgaagaagaacacccggtggacctggaaccgcgccgctcccgaccggcgagccctctgtactctgcaactgcgccacgccgagccttcgaatcgggtgctgcggtggcagccctgcagtaaggccgagcttctgcgcatggcttcgtatctgcgccgccgcccgccatggaggacaagggcggaagatttaaatcttccacctctcgttgcactgcagcacaaaggtagagatttcgatggaaatcgcaggggagcagcacgggtgagcagcgcgggggatcaagggcggcacaggcgtgggggagaagggcggtgcaggcggtggccgtccgaatcgcgggaggagaaaggtggcagatttcaatggacatcgcgggggagaagggcggcgcaggcgtgggggagaagtgcagcgcaagcgtggtggccgtccgaatcgcgggaggaggcatgggggagaagtgcggcgccggcgagcgaggccggcgcggagtggcagtgggacgggcgagacaggagaagaagctggagtattctgtttgtcgggaatttgtgaaggggcttttcagaaaaacggccgcgcgacatcctttcctggacagagggagtagtataattgctgttctcacgcctaaattaggccccattagactgtgagtcggactcaactcaacagagagaaagaagattggcttggttgcctgctgcagcttcctatggtggtgagtgctgacgattggggaaaagcgggagtgtatggaggagacaacgggttccatgtaaaataatactccttccttcccaatttataggtggtattcagattccgagaaagtttaaatcacacacaaacctatagatttgttaattattgctgcggctgaaacggatcagatagattttggtgcaagtaatctcacagcctcatgcctcatggtcgaggctctatgcagcccagtgcatgcgcacctaacccggccatgcaaagcccactataaatacaatcggcaggagaagttaatggatgtgtggaaaccgaatcattaattaggtggggtgtcattactttctaatacgacatctactacaggaaaaaaaaatctgaagtgacctgtaaaattggaaggagggagtatgtgagggagatggggagctgctcggcttagaattctagaactcatttcattggttggagagtttatttctgtacgcttcggggagagatattgccttcaccactataataaccaaccttccaatatttgaaatgcaagtttgacccatatgaagataacaaaaaacagagaaatttgatattccggaatatgctgattattttttcttcaaaagtgcgactgaaaagagagtgcttgatcacttcaattgaatacacagaactttgccaattgtgattaatagtaacaatgttaaccttgtccgttcttggtacatcatgttctcttgtgttagttgggcagttggaagttattttaaattctaatgcaacaattttttctgcaataccttgtttgcatatatttaagaagatgtgtaaaatagctatttttaacatcctttttaactgtgtttaccatctttgacagggcatatcgatcattcagctagagtt

SEQ ID NO: 2000 - DNA, 5144 bp, Brachypodium distachyon
  Intron number 2 from transcript Bradi1g40580.1 (locus Brad i1g40580) derived from phytozome v7.0 (chr-ID Bd1; pos 372 51083 to 37256226 reverse strand)
gctacacgctggggcagctggacctgcttgcctaggtacacaaggctctcgcctctaattttttgttccttctcttgctgttgttactgctgtaccatctctgattgcattggatcagcatatgcctcttttgaaactacctcctcttgattatgttctgcaccgtgtttgtttgctgaaaaccaaaacacctatacttgcttcctttgaaggcaatctacaaacgaaaagaaaattgcttgctttgcacgtgtacgattttgagtatggatagcaccgagaattctttgagggatcctggtagtcattcagtcccacgcagacgtggacggccccgccgtcaatcacagcctattgttatccccaagacaaatcaatctgattcgtccaattcccggcgccggtgtgcacagcttaggaatagaacaagtacatctacggaagaacgtttggtatgtcagcggttaaatgaggaatcatgtacaacaattttgcaaacaccaagtttcacccacaatcgtaagttcttattcctttgcagttagtgaatttcagatttaagtctccttatgtacaagaaaaatatgaatggactgtatctttcaggaactatatttgaacccttaaaccttggggaacccaatcattcatgcaaacattgtgccgcttccttttggtatgaagagcatatccgaagacacaggaatactcctgatccaatatataacctatgttgtagaggagggaaaatctatttggaaccgtacaagtctcctcctcagccaatgttggatttattgacctcacagaacaacacaatttcaaagcacttttttgatcatattcgtcaatataataccatgtttgcaatgacttcaatgggtgctaaagttctggaatccatcaatgatggccgagcaccatatgtcttcaaggttagtggtctagtgtgtcaccgtattggttctttagtgccaccgcgtcaaggtcatcgaccagaatatgcacaattgtacatctatgatacagaacatgaggttcgaaaccgcataaatataacttactctgttgacccttcatcttcacggccttcatcttcacgtcattccttcaatgctaatgaagatattttccaatctcttatatcaatgttgaacacccataatcccattgtgaagctatttagaacagcacgtgaaagattatctgcaaatgctctggatcagttcatcatcaggatatttggcacagttgatgcgcatggagatatctatagtgctccagtcacatctgaggtagttggtttggttgtcggtgatattggatcaactgatgttgggcgggatattataatagataatcgctcatcaggtttacaacagatcaatgaaaaacattgcaagtttatggcgatgcagtaccctttgttatttccatatggagagaacggttaccatgaagacctcacataccgtaccacatcacaagatcagtcagagcaacatgggaaaataactatgctagagtattatgcgtatcggttacatgacagaccaggtgatttcaacacaccattaagaggtagaaaattaacacaagcttatgaagttgatggtttctgttgtgttgaagagtaccgcattgcatactatcgcaagcccagttttcagaaaaaattatagatcatcaccatacaatgccttggcaaattctgtctcaagaattatacatctggctcttcggttggtcaaagaattatattaccatcttcatttactggagggactcgctatatgtaccaaaattatcaagattcaattgctgtttgtagaaaatatgggtgcccagatctgtttgtcacattcacttctaatgccggctggcctgagatattagagactctatcatccattccagggcaacaaccttctgatcgtccagatattgtgaatagagtgttcaaaatgaagcttaatatgctaatggatgatattaaaaagaaaaaattcttcagacccataaatgcaggtatgttttacatgatttctatcataaattaattggcgttgcctgaatcttatatttctttaccctaaaaagatgtctctttctgtagtcctatacacaattgaatttcagaaacgtggtctcccgcatgtccatatcatcatatggttagccaaagatggaccccttgatgcacaaaagatagatttccatatttcggctcagctgccagaccctagaaatgatccgatgggatacaatgctgtatcttcattaatgatacatggaccttgtggaaatctgaaccctagctgcccctgtatgtctgaaggaaagtgcacaaaattttatcctaaggatttctgtgagcaaaccactgtattggaaaatggtttcacacaataggcttggccaaacaatggagtaaccgtcagtaaaaatggagttgatattgataatagatttgttgttcctcacaatgtcaacttggtagtgaaatatcaagctcacataaatatagaaaaggttaatcatgatggcatgtacaaatatcttttcaagtatgtaaacaaaggttttgattgtgcaagatctaaaatccagcctacttctgcatcgtctgatccatcggggcaaacttttaatgaaattgacaactatctagaatgccgctatgtgacaccgaatgaggctgcttggcgcttgctagaatttgatagtcactatacagacccttctgtagaaaggcttcctgttcatcttcctcttgagaataatgttatttactcagaagatgataaccttgaacaagtgattcagaacccaaagaatatgacaactaagttgactggatggttagaagctaatatgaatcaccctctggctaaacaatatacctacttagaatttccagaatattttacatagcactccaaccaaaatggcaagtattgggattatcatcgtggttctcgaagaattggcagaattgcttatgtcaacccttcccaaggagaacttcactatctatgtttgctgctccacattgtcaaaggagcaacatcctttgctcaaatcaaaattgtatctggccatctacatcctacgtttcgtgctgcatgtgaggctctaggtctccttggtgatgaccaagaatggttgaatgctttaaatgatgcggctcaatgggccatgccatatcagttacgtcagctatttgtcacaattttgctcctttgtgaggtaacaaatcatagaaaacttttagatgaatacgcatcaaaaatgtctgaagatgcagcacattgcttgaatcgcaaccctggtcaaatgagcaacctattagcagatgtgtatatttcatcttttcttctgaatgaattggataagttgctaaaagatgcaagatattgcttatcccattttaatttgccactgccagatgatattgggagtatttctgcagaaaataggcttatgctagatgagctcagttatgatatatctgatatgactgaaagtttagatgaaaatattacgaggctgaacagcaacaagaaaaatgttttcgatgctatttataattctgcaatgaatgatgacggtcgaacattttttgtttatggctatggagggaccgggaaaactttcttatggactactttgcttaattctgtaagaagacaagggaaaattgcattggcagtcgcatcatcgggaatagcttccctgctgctaccagggggtcgaacttcccattcgcgttttaaaattccattggacatctctcagaattccatgtgtagtataaagaagaatacaaacttggcagaatttattcagaaaacttctcttattatttggaatgaggcacctgttaaccataggtattgttttgaggcattggatcgtacacttagagatatattatcgaagagaaggcaaaatgcagatagcaagcaatttggaggtatgactgtagttcttgatggagattttcgacaaacacttctagtactacagaatgcaaccaaacgacaaattttgagatcatgtattgttaattcatatttatggaaacaatgcacacttctgcagttaagtgaaaatatgaggctcaagtcagaaaatctatccaccccagatagagaagagctaagtaattttgcggaatggcttctcggtgtgggcaatggaactgagccttttgtttctgtcccaaatgaaccgaccaactgctttatagagattccgcaatctctccttctgtcccctgattctagaaaccttgatgggctgatatcatttgtctatgacttaggttgcgagccagctaatattacatcatatttgtgcgaccgtgcgattttagcacctacgaatgaggtggtttctaaaataaatactagaatgatcgatctgctagcaacaactgaaatgacataccacagttcagattcaattgatgatagctctgctgatcattgcactctagagtcattatacccaacagagtttctaaacactatttctctgcctggactttctgaacattgattgaacttgaaaattggagttcctataatgcttttacgcaatcttaatccattaaggggactttgtaatggtactaggcttattgtcacgcaactgacaaatcatgtgatcgaaggcgaaatcataacaggaaaagctacaggctcaagagtatatatccctcgaattatcacaacatctaatcactcaaggtggcccttcaaattgagacgacgccagtttccaatccgcctttcatatgcaatgacaataaacaagagtcaagggcaaacactaaacagagttggagtctatttgcatctcccgtattttctcatggtcaattatatgtggcattttctagagtcacttcaccaaaggggttgaaggttcttatcgaaaacagcccagcttcttatgagaattgcacccataacgtagtttatgctgaggtttttaatcagattgctacacaaaggaactgaaagaaaggaaatctctgcattcgtgtgtttctcctacattatatgctttttccaattcacacatgcttattccgcagttacttgctttataatattcttcatccttcactttcagga

SEQ ID NO: 2001 - DNA, 1404 bp, Brachypodium distachyon
  Intron number 1 from transcript Bradi3g14500.1 (locus Brad i3g14500) derived from phytozome v7.0 (chr-ID Bd3; pos 129 00165 to 12901568 reverse strand)
gctcctcctcttcctccgcgctctccctcggccaggttaattaattagtttgatttcttcttcttacggcctttgcattttgtcgatcgaggatgctgtgaagcacacatgcagacagatttaattaggaagaatatatacatatgcatatacttgttgattttcctgtgatgatctctacttctagtataatataggagtattaatttttagtcttactaaacccaaggtttcttggcatatgattttcgtaggataggacggatgcaaaaatctgtcctgatcgagtacctttctacaagtatgtgttcatcaaggggccgggtatttaatttactttttcatagaccgacaaaaaatgcactgaagtagctcgatcgaaggctagctaggagttaaataccaaaaggggggttcatcattcatagcacgtccatctcacgggatttaatcctgttgctttcatatccgaccctgagaaatgaaatcaaagcacacacacaacatacatatggttggtgcctgcatttggatagatgcatagacagcattaagttttcctgcctttatttctcaagcagctggtttgtgttgtgctgtcttgtgtctccttttcccaacctataattctcaagtaatatttattgctccccaaaatgtgtgtacttactgccaaatttttccaaacagtgtttcctcgtcagtacccagtgctgtcctgggtactactactactactactacatgtgcaatttattgtttgcttctagctatcctgattttgatcctcccatttcgaactctcgtatgttttgtgtacttcgagtatttaaactcgagcaattccctccgggcctcttatgcatgtactcattttacagttcagtaagtgcaaaactgtgtgagatcatctgaattctgcacttacggttaattgtttctgtacttttcagttgaaatttaagatcatcgatctgaattgtgcagttcaattgttttgtacttttaaattaaataaggatcatctgaattctgcatttatgcttaattatttctgtacttttgagttgaaatgtaagaatgtaagattaggttctgaattgtgcagttcaattattttgtactttagaattaaactgtaggatcaactgaattctgcactttcagatggttatttatgtacttttgagttaaactgtaagatcgatcaagatcatctcatctggaatcctgaaagcccaatgcagctgtagcactgacctctagagcatgtgtttgttcagttaacctctcttgatcagtactaatttcttggctctcacacagttagttaactatttctgcactgtacatcagtatgactgacagactgaaactgctaaaattgcaataacaatgcagaac

SEQ ID NO: 2002 - DNA, 2472 bp, Brachypodium distachyon
  Intron number 3 from transcript Bradi1g70300.1 (locus Brad i1g70300) derived from phytozome v7.0 (chr-ID Bd1; pos 686 88813 to 68691284 reverse strand)
tttggatcacccttttcttgctcaagccattcaaggtatgaatacttggtcttcatttagtaggtgcctaggttgcacggatacggcgatacggatacggcgataccgctgttttttaaaaaccctgatacggggatacgtttgtgtatatatattagaaatataaataatatatataaattagtgatttttatatgaggacgagaagttgagaagtactgtaggaatataggaataccgagacatggttgttggtagaaaatcttgatagtcgcagcagtgcaccttttagcctcatctccacctaattgccaacagttcacaatcagttcacctaggttcaatcttgaagtggagcaaaattcagagaattagagaatagaggagacagagaagaaggaaggaacagagaaggggaagccaggagcccaggagaagaaggaaggaacagagaaggccagaaggggaagccaggaaggagaaagctgacttatgactgctctggtcgagtgctcggcggtgatggcgagggagcagcagggcgggccggcaggggatggcgcacgggcgcagcagcagaggtggcggcggccggcagcggcgatgaacccgcggaggcaacgcagcagcagaggtggcggcgtgtgggactggtgggatgggagagtgggtggggaatggggatagaatgccccaggtttactcattagagcactcccgtgtccaggccagtgtccttcaggtatccgcgatttatcttttattttttttaataaaatgctggatacgtacgggacacgtattttcgagtatccgggcgtatcaccgtatccgggcgtatccgacccccgatacgcccgtaagtgcagtatccgtgcttccgaggtaggtgctgctggttccatataaatcacccttcttagtatgtacagatctatgtaattttgatctattttcagggaaatacctgtgatctaatgccttgctgagatatttttatctcgtgtttcttagtgcaataattttggattgagcattgttgtatgttatatttctgaaaagttggtaagggattgtcgggacctcgtttctcgatggagaagttagtgtaggcaagtgattgatactggaaacataagaaatctgcaaacataagtgctctggtgcagtggtttttttaggataaaaacatgggtgctatattaacttgaaaaagttgggcagtttagtacatctacttgctaaatgtagcaaatacattttagtacatccgaggtcaaatcatgggactagccttttaaccatgctaatcccatgatgtagctccacactacatggaataaaaaaataaaggaaagtctgcgccttctcgtggacctcgatgcagaacaaggaaatccccaaatcaaaaccctaaattaactacacctatgatacacaacacaattggacctaagaagatgaaattgaccgaagacagtagcaaaaacgaccagtgcgtgtcagatcatcgagtccatcctccaaaacccaaagcctccatcggagataacgaggacttaccgtaatctggggtattgcacgccactctatgccaagattctttggcggagctggtcatctttgtggatctcgaactgcaaccgctgacgagctcgctgcagccgctccagctcaatcgcctccctcgtcgcccttaatcctcccgtgagtgcttggtgatagtaagggtgtacataattgggaaagagaagagcacaggggtccttttgcaaaaaaaagaaaaagaaaaaaagaggccctgccgacccggctgcgtgcccaggagtccacgtcagcattgttaacaggctaatccaacaatttgacctcggatgcacataaatggcaagctataaacatgtttgctacagtttgcgagtagatgcactaaactgcacaactttgtcaagttaataacactgcccatgtttttacctttttttagattagttaaaatgtaaaagaatataactcttaattctttagccttctggggactgggcttgtaggcagaaagaatgtgtattgttcatagtttgcccatctactatgaacattttatccaaaggaagttcttttctctttgtgatgatgttctcatttgttacaacctctgatgtactccctccgatcctaaattcttgtctcaaatttgcccaaatatggatgtatctattcttaaaaagtgtctagatacatgtaatatttcgacaacaatttaggatcggagggagtatcaagtaccacagtatagttaaggcaaatcctccaaattctgacatatatctagttgtctagttgaagtcatatcgttggaatcgaattatttttaattgcagaactgtttggttggtttgctgaatatcttaaaagatcttccttgaatttgctgcagcatttgataatttgaggattagactgggaggctct

SEQ ID NO: 2003 - DNA, 1851 bp, Brachypodium distachyon
  Intron number 11 from transcript Bradi2g57110.2 (locus Bra di2g57110) derived from phytozome v7.0 (chr-ID Bd2; pos 55 332901 to 55334751 reverse strand)
ttctttggaaaccattatagaggaaacggcagaaggtttgttttagtaatcagttatgatgttttggttatgtaatgattaaaggaatatttatacttgcttttttcccattgatgattgccttgcatttttgccaattaagtttgttttgatcatgtttcccccccttcagtgctccctttcagttaataatatgatattctgcatgtctgcctttttccctaaaatagttgtcacctttggttgttagaacggagtatattagatggaactaatggcaggtttgcctgctctcttctattagtaagactatttttagtaatcagttatcacacaccgctttagtaaaaccttatgatatttttgggtggctaatgttttagaagaaaatttcttccttacattgcatcttgtcaattttccatttcaggtgcaatttgtgatttgtttcatatcattgatattggagatttgttctaatcatgtttttccccatttgtttccactatgtttgaaaatgtgatattctggcccttctaaacattatttttttcgacaagcaaacattagttggtgggccataggctggtatatatacatgtacatttttcgaaaatgatatatatacatgtacatgcggtaaatatgtaggaaaccccttgtgcaatggggatattatacaaaatatatggagactaagtacatcttcgacagatggaacttactgcaggagtgtatgttcacttctcaactaagatcaacttaattttgtctccaggtgcaacggtacaaccgtgtgattctttggaagttgttccagaggaatcacgagaaggtttgtttttagtagttagtcattgtattttacctaatgctttggagaattatcatctgtttttcctctgtttgtcttgaagtttttgtgccaattttccatttcaagtgcacctcataagttgtttcatattattggagttgaattttccatttagtagggctccattccatttatatatttgctttgctgtgaaatacatcggaggtcctagaagtattagaggggtaccaagatagtcctaattgtatttagggacatgtatatactgtaacagagtcaatgaactggaatcatcgatttgcaaacccgatctgaatctatttcatttttaattccaacatcgactaaccatggaaaagcaaaagcatcaccaaaatttgggtaccaaaatattggtagggcaagttttgactaaaaccaaacatacccttaatggccccattctagtgataaatttgcgctcatttcactaataagatccctcaaagagttgttctcattagagattaatcatgtctgtttcttttgctattatgaaactaacaagacatatgttgatggccgaactgaccacattgatcaatgtgagaaagttacttggtggctgggcagcttgggactcaagcgtggtccttgcaaactagccattcaagtatgctacattgccaaaatcaaagcaccacgggtgcaggtcagctgcaccagcgagcttaggaccacgggtgactcacttaaagtactattattggacctatatgtgcactttcatagaattgggactaacatggcacctctcggatacttttaggacctactgtgaatcgactctttgctattcaacgcctctgcttttctccctcaacataatttttctgatcaattctttacttttcgctatagatctatggatatggatggaaatatttggaattctctctcaccttttaatatgaagacctgcttgccttctgttttcaggtgtaacacagcaagtcactgatcctctggcagtt

SEQ ID NO: 2004 - DNA, 1911 bp, Brachypodium distachyon
  Intron number 5 from transcript Bradi4g07850.1 (locus Brad i4g07850) derived from phytozome v7.0 (chr-ID Bd4; pos 676 6354 to 6768264 reverse strand)
ggagtttagcaatccaactcctttcataaggtagctcgttgtttcttggtgtatctcatttttgtagacacttctcccattctgtcttgtttcttttagtgcctccaggactctgtcatcgttatattactagttagtactccctccaatcctaaattgttgtctaaatattacatgtatctagatgctttttaagaagaaataagtccattttacccccctcaactaatcgataagtccaaaaaacaccctaaactatgaaaccgggtatttaacccccccgaactatcaaaaccgggcacccgacccccctgtgcctgtttcctgctggtctgggcggttttgaccatgttgaccaccacgctggcaacaagtgtctgtcccgagccctcctaaccccgcgcctagacctctatctctcttctcagattccaaatcgggaaccctagctctggcgtcggcaggggctggacgacgcaggccttgcggaggcggacattgggcgttggggctgctgctaatcgactgctggaacctgcgcccgcccctcttcttcctccccgacgccggcggctgctgctcggtgagttcatctgcttttttcttctttttccctctccttctgctcctctgctcgatgcttagcttgctgcattttcttctgttcttacagagcaatggaagatgacctagactgcaactagaattgcaaacagatttgagaagatgattaaggctaaaaatcagagggataccagcggaggaaaagagaaggaaaaccgaatcgaataacggctaactctggtcgcgggagctaaagaacagaagagtgagagaaaagacagacgggagagagaagtctgggcagatgggctcgggacagccacttgccagcctggcatgccagcatggcggtcaacatggtcaaaaccgcccagaccagcaggaaacaggcacaggggggttgggtgcctggttttgatagttcgggggggttaaatacccggtttcatagtttagggtgttttttggacttctcgagtagttgaggggggtaaaatggacttatttcttttaagaatagatacatccatatttggacaaatttgagtcaagaatttaggatcagagggagtacctaccagtgcggtcgttcctaaattgcctacttggtaatgtattatcacagaggccgaatactaatttataaggtgaataagtacaatcgaaagattccttttgaggtattaagcttccaaagtattccaacagtgagaacttacacaagggcttattggttagtagcatgaatggtgggctaccaagacagggttcaattgtcaacactatcttaattgaaatgatggctagtttggtagttcctcctaggcaccacccatttatttaaagtattccaagggtcaattacatcccattgattcttcacattaaaatcatgaaatgtctctagccaaaacattaatggcaaacattgcgatcttttggtaggccatttgaaacaaaatgaccaacagaagattgggaaatgaggttccgcaacttcagaatttgcagtgaaattttggttgtggccactttaccattttggcatggtatttgtgtgtggtattggtaactcccaccattcgtattgttcctctgttacattgcagcaatctgatgctcactaactcaataccacgatgttaatacttctaaaatgaaatttcatgcaacttctgattctgcaaagctgcaccatgatggctttatctacttggcctttttccccacataaattttcatcagctgtctgcactaaacattctgcaactcctttgatttgtttgacatgatttgcaatggatttcctcaggagccgtgagttcctttggcaggaagggcatacag

SEQ ID NO: 2005 - DNA, 8994 bp, Brachypodium distachyon
  Intron number 5 from transcript Bradi3g59190.2 (locus Brad i3g59190) derived from phytozome v7.0 (chr-ID Bd3; pos 584 21346 to 58430339)
gtaagacttacgtgtttgaattgtttgttatttgtgttattcaatcattctattaatgcaatcaagttgtttcattgtggaccgttcgatcggtcttgtatgtttggatgggagtcacaagtccatagcacaaaaacccaacgaataggcagcagatgtgccgctgtagttcagcaaattattgtttttcttctctgaaggccacactctacgcgatcgagctgctacataatataagtaaacaagtccatgttgctcaggcacatggacgcgtgctggcactctttttctgaagtaaacaagtgggcgatacgccaattgaaagaatctgacaacagcattgatatatacaacatgcaagcatcagtacacctcaaattttcgaatcgaaatacgatcggtacggttcgagaaacaaaagtgataaaatcagattaattgtggatatatgtaccaatatgatactctttactattcatcataggcgcatgatttgtcctttttgttttctgaagctgtagtctgtaggtggaatctgaatttgaagctgataaacttctcgatctctcttccacactatctgaagagcatgataaatttttatcttccacgctatctgaaagagaaaactactccgtatttttcacgagtcatgtcactggcattccttgttcaaaaaggtatcaaacccagaagtagagaaaggattccttggtcctatcaaaaatagagaactaattaagccatgcatgcatgtggcattgtggcatggctttgactcgccacaatattggcatgcagtgcgtacgtctggaagaagtcatcagcgatgggtgagaagtataattaacgggacaaagctggctatgggttgaaatgacagggaggaataaaccatcttcgggtagttcgtacacaggtctaaacctcggttttgcccacaaactgtcggtgaaatagacattttggctctccttttttttgcataggcggtcggctttcttttctctctttacgctgtagctttgtctctgcctagaaactagaaagtggaacgtacggaggctgagttctccctgagaaagcgatctggcgagcattagttgacgtctggtcttctatcacacatgcaagcataagacaaaactaaactaatcaaggaagcaaatgaacagtaggacacgccttagacgtcctgtccttattcttcctcttcaaaaagctctaactactctcctacctggaacattttgttatagttagtatacaaataattcccaataaaatcatggccacttggccagctcaaataagtttctgctcttcgattgctttcgaggaacatgctcgatcgttaatgcactagctatctttgtctggtttcctggccaaaatggaatgaatccaaggcgattgcggttccattttggcttgagtttttcactcggtttctaaggatggctcccatgcatgactgatattattggatggtcgcctgcacatatataatataagaggatcgtctagaatcagatcagaattgtcagaccagatcataggtgtacattctaaataattcctctgcgaattctctactactctgttcttcaaatgaatggatgtaaaacgttcgcaaatgtacttggtacaggcatgcatgataggaaacatcctggcagcttgattgcggaatcgagtttgcagcgcatagagtagaccggggattaattaaagcttagtttatcggctggatctggctgcgcgcggcgacgtgatcgcttgatatcctgctgattggatctggatatatatgcagactgtagctcaagatggtaatggcccccaaatccgaaaacccgtgggtttttaccccattaggggacgggtttgggtcaaatctagtcctcgcgggtttgttcatgggttaacagtgaaacccgacgggtttcacgggtttagacccgggacagcactacccgaacccgatacctaatgaaacccgcgaagatttcagtacagcgcatataagtggtccaatccaggccatatgtgaacttgcatgagattgtctattttttagaactatgatccggcagtcatcttcgtcggctctcatgttggcggggtgtgtgtggtgtgggtcggtaccgggagaaattcttggttggctcatccgaccacgacgacggggacgtctttgtacgtctttctccttctctgagacgttgttgagttacctgcacaccacacccgctcgagattcccgggtgaaaacccacagtccttggactagacggcgacggcgccgatggtgtcgctttcccccttgggggcgtcattgggggaatgctagatttgcgggtgaagggtggcagtcgctgttgggcacgtgttcttcgggggctctggtttgcaacgtcgttgacaaggctggcatttcaatgcttcgttttttcgtcttgaagatgggttgctggatggtggtggtggctgattctggagcgtgcgcagtcagcacactttgagaattcacttgctcggttgtgctcttcgtgtggcctccggatttaggtgttgggtgttggtgcggtcagggcactcggctccgataatggccacaccctcatcagtcttgtaggaatagcttggtggctttgagtcgattgatcgttgtattcgtctcgccagacttgtaaataattgaataaatttggctgtgtgcatcaatttgatgcagaggccgggggtctcgacctctttttcaaaaaaaaaatatgctgccatattaagtgatgttgtcatcttgctgttgttatgtgtgaatcgtactgaaattatattgtttttctttcatgttgctgctgctattttggctctcagtatgtatgttacctgacgagttcgggttccccgatgggggcgaaaaacccgacggggacggggctgggaaaaatctgaaacccgtgaccggggacggggacgggtccgggttcaaggtcgcggggatgggtttgggcagcaaatacccggcgggtttcgtccccgttgccatccggagctgtaattaatcttttttgaggtcatcgctgtaactaatcttgctccctctggttcacaacttatgacgtttaggcatcgacaatcttgaaaatctcatttttacccctagtttctacaacatacttcctccgctcataagaagttatagctttgtcgtaagtcaagcttttgtaaattttgacaaactttatagaaactttttcaatatatctacaactctaaattagttactccctccgacccatattatttgtctcaaatttgcccaaatatggatatatctatatttataaagcgtctagatacatgtaatatttcgacaagtaattccgaccagagggagtacattaaatccgtcatggtgtatattttcattgtatacttatttgatattgtagatgttggtgcattttcgtataaacttggtcagaattcaagaaatttgacttaggataaaactagacctatttatataggttatatttaggaatagaggtaatactagtaaattatactagtaatactcctatttgagaagggaaaaaaatcctaaaccgctagacatgatatagtacattgcaaatattttcagatcagccttagcctgaagcggagaaggcacttattaaggtcgatgccgagttgcgaaataattaaccataccgagttgcgaaataattaaccataccgttttcatgcaccgaatggtcctccaccgtcattcatatattgcacgctggtttacagagaaagcaaagtctgcagacctttgtcgcccaaataaaggcaatatcaggcggctgggccgggtcaataccaggttacaattcagcgacatttggtagccttgacggagctggccgggatgaggtgcatgtaccggcagaaagtgagagctgagcttctcagaagtagacatcaggagtcgtgacagatgatgtttcttcctgtgatgttctgtgattatagttttcagcaggtgttgtgtgagtacttacatagttgcatattcatgtggtggtgtttaaattgtgcgtacatgttgtacttggtttcctttttccggtcacgttgaagcttgattttgcccaacaaccgctaacaacccacatgttattttttctatccggtaaaggaggatctggtctccggctgatcattaatcatactatgaacggattggaatattttgatattctgagaactgaatgccatgcattattccctggtctcgtcggcttgctctcggccggcaagttctttctctcacaactcctagtcctataaatacctcatgcatcagctcccaacgatcacacacattcgaagctagctcattggctctcctcaaacagcaagctagctataggacaagcacgtcgtaagtgcttgttgcctagcccgcagcttagctgatcccggcaaattctcctacacttgacgtacggtccaaattgttgccggccggcaatggtgggggtaactaagataaccatgatgctttgggtacttggtgtggtgtttacatttggagctgctgcagttggtctggctgaggccaataacgtccacaatttctatgtaagtctgcttcttcttttgttcttacacgcacttcgtgtcccaagtcaacaatggattagatcatgcagaattgtcgatggtaaacatacaacttttataccatccggagcatccatgcatccatgcatgttttcgtgtagaatacctaatgattttttactaattaaacatgcaacttttttgaggttcgcaaaacatatgacttactgattagtttcaagagttttttatataacaaaacaggactgggaactagtgattatttcttgtgcgagaaaaggcagcacaaggagactgacaacattacttggtgtgatatttttcagatcaaggaggctaaccacccaaggctctgcaagaacaagaccatcctcaccgtcaatgggcagttccccggcccgaccatcaccgctcgaaggggcgatgtcgtcatcgtcaacgtctacaaccaaggcaataagaacatcaccattcactggtaattgaacttgtctgctttcgacaaaaaaaaacttgtccgctcatctgggccgaccattttcaaatcgatcaaactaactatatattctttcttagcctacctagcaattgtccttctaacgtgtcaatggcgtgtgtgatgtacataggcatggcgtggaccagccacgaaacccgtggtacgacggtccggagttcataacacaatgtcccatccagcccggcaccaacttcacctaccggatcctcttgtctgacgaggagggcacaatctggtggcatgcacatagtgacttcgatcgggccaccgtccacggtgccttcgtcatccaccccaagcatggcagcttctatcctttcaagatgccgcacaaggaaatacccatcatccttggtatgtatgcatgtagctcaattatattaaaacatggatcaatgtatcgttgccatgtggcatgcatgttgtgtgaattaaccacgagatttggacacgcaggtgagtggtggaaggccgatgtcacccatttgctagaggagtccaagaggaccggaggtgaggttaatctttcagatgcaaacatcatcaatggccagccaggagactttttcccatgctccaaggacaatattttcaagctgccagtgcaaaccggcaagacgtacttgctccggatcatcaacgctggactcaccaacgatctcttctacggcatcgctgggcaccttctcaccattgtcggtaccgacggccgctacacaaagccgttcaccgtcaagcatatcatgatctcacctggacagaccatggatgcgctacttgaggccgaccgtgctatcaatggttcatccaacgggcgatactacatggctgcacggacgtttgcatccaacaccgctcttgacttcaacaacagcaccaccacagccattctggaatacacagatgcaccaccttctaggcgtgcggggacacctgacttccccaaccttcctgccaacctcgacatgaacgctgcaacggagtacacggcccaacttcggtctttggcaagcaaggaccacccggtggacgtgccgatgcatgtcgatcatcccatgctcatcaccatcgccatcaacgtgcttccttgtgcacccaatcagacgtgtgatgggccaaatggcaaccgtttggcagcgagcctcaacaacgtcagcttccagaacccctccatcgacatcttggatgcttactacagttctgtcaatggtgtgttcgaggcaagcttccccaacaagcctcctttcttcttcaacttcacagacaccgtcgtcccaccggagctcgaggtaacaaaggtcggtaccaaggtgaagatgctgaattacggtgacgtcgtggaggtggtgttccaagacacgaccatcaacggcgccgagactcaccccatgcacttgcatgggttcgccttctatgtggtaggcagaggttttggaaactatgacaagctcaaggacccggccacatacaacttgatcgacccaccgtaccagaacacagtcaccgtgccaaaggctggatggaccgcaatccgttggcgtgcaacaaatcctggtgagtttttagcttttgggatatgaccttactataatgttttacgtgttatgtttcagaaatcactaacttttgttcttattttggttggttaggtgtgtggttcatgcattgccacttcgatcgtcacactgtgtggggaatgaacaccgtgttcatcgtgaaggatggcaagactcccgacactaaaatgatgaagcgccctccaagcatgcctaggtgctaactgccgtgatcccgtcgagcctggcatcaccacgcatcacaactaataaaatatgttgttgttgattaatttattcgttaagtgtcattccatcattttaagcatatgtgtttaataaacggatcaattgagatcctagtaagtagcgagttcattctttttccatttcagctgggagagacaagatctcttttcatcacatgatgtaagggtctttgatttgtatgtcatatttgttattcaatctatgttttctagtgatgttttattaccatcagtgttctatgtctatatggatggggtgcatggggatgttcaattgtgcacatatagcccaacagctgtgacgaacatgcatgtacaaatagatgagctgcagtgtgggatttgtggaaggcctgggaagacacttttagcttttattatgaaaaaacgaaattggaaaggaaaatggccagttctcgtacaaaattgtacatgtactcctagcaactagtatagctcatttcccatgcatgtgcagcacgtttggctatctatatctttatttatagctttcatgatatttgtataaattcactgttttgttccagttgattctatcaaactgtatactgtaattaaataactaatccacgggcaatggctttgactcttcaaatgtgatcggcggtaagtctagaagccggggatcaattaatgaaaaaagtatagcaggttttgagttcaaattaatgacaggagaataaatctgtaggtacaaagcggtcaactttgtttcctctctgttcctttgcctacctgcaaagggaacttacgtacgtcctgtaaatggtttcttctcgtagaaagcaatttggctagcattacttgacgtgtggtctcacacaacacatataagcacaaaacgaagcgatcaaggaagatgaatagtggtacacgccttactctcagatcggacaacatatagacttcgtgcttaactgtcaagcaggatatactgctaaaggagtactctgctagctacctaccgtatctatgcctcgtgaaaggctgaaagctacctgaaacttttttgttagttagtagatactctccaatcatggccagattaaacaattaagctactgcctttccctttcgtaagcgttcatgcctatgcactaggagtatagttaataagcctctaattaagcacgactacacctacttgcgtcaaaatggagcgaatcctatagctgtttgcgaaggttcagatctctatctccatctctagctgttcgcgttggagtgtagttcgaagattaactaaagcttgtttcatcgggtgggcgtacgtctgcggccacttgatcgactgctgatctgcacgcaggccgcaaagtgggagtattatattgcactctgacagtccacttgtagaaatctttcctacgtgatggccgtagtattgaggaaaacaagggagagacagagaggttggaggtgatcaatggccgggttgatcaactaaacagccaatcaaaacccggccagatcacaggccagcggtgatgatcttatagtcaaagggacacagcggtggagatcactgaatcctggagtatatgcaaatgcaactgacaacatgacatgatttaatatatctccacagaaacacaggccagacatgcatgcatcaagcatgcaatattgcaactgcatccatgtactggactttgattttgaccggggcaggcatgtgccccttctgattgattaattgcgtgggtatccgcgttgaatctggtttgatttgctcaaacaactggttatagcccacagcttatgatcaggcaaagcatgcgggatctgatcccccgcgtaggtaggtaccgttaacaaaggagaaaaatctgatccccacgtgctttccatcgctgactggtcctacgtacctacaaatgcaaatgccgccgtccgtgtgggttgccgcgaagcgagtgtgtattcgagggcccgtgggcggctcttggccgaaacaaacacgcacgcgccctagttaattaac

SEQ ID NO: 2006 - DNA, 4175 bp, Brachypodium distachyon
  Intron number 9 from transcript Bradi2g26310.1 (locus Brad i2g26310) derived from phytozome v7.0 (chr-ID Bd2; pos 247 21092 to 24725266 reverse strand)
catttttggtattcgtcttcaacatttttgacattgtaagtttattcttcagacctctgttttaatcaattttaatttttaaatagcgtacacaattagtgagcagccagccccaaccaccctgccttgaactgcaattgtggaaagtagccttgaaagtggcctaaccattaaaaacaatagaaaaatttatgtgacgttgaattatagagaatgcacacaaataaaaagtgagttctaaatttatcatactattccgtcccatattaagtgactcaaatttgtccaaatatagatgtatctatgcctaaaaagtgtctagatacatgcaatagaaaatcacttaatatgggacggagggagtatatttttcgtataggaagggtttcattaactggcttgaactttgaaatgatggaagggactaagtactaacattaaaaaagaacctgctaacactgtaacctacaatgcaccacacagaaatgagcaatgacatgtaagtgcgtaaaacagtgtctgtacttattttatccaagaaataagtccattttacccccctgaaaatatcgcaaagtccaaaaaacaccctgaactctgaaaccgggtatttaaccccccctaaactttcaaaaccgtgcacccgacccccctctgcctgtttgaagctgttttgctatgttgaagggtggtttcgacccagcatcttcctcctctccttcctcttctctctcttgagccaccctctcgcgcaccgctctgctcctcctctggcgccgcctctgctattgcctttcacgcagccccctctgctcctccctctcgctcaccccctctgctccccctctcaaggaagatctgccacgagctgctggaggcggcgccggcctggaggcgggtcttgacggcgtcgatcgggagcagcgccatgtaggtcaaggccctcgctgtggcgcccacgcaggccctgatggccgcgcacgcgagtgggtttggcacctgtgcctccgcctgcgcggagttgcagggatggagagtgaggagaaggagacggtggcttgggaggaagaggcaggcgtgtggtcgaggagcgaggtcaggtcgacggaaagggaggggaagtcctgggagcagccgccggaggaagggagcgcgaggtcggcttggacgatggcatctccagtcgccaccggtaccggcgccgcccacgtgctgagaataagagaggagtcaggctcggggagggggatacatggacgacttgtgccagcgtggcagtcaacgggtcaaacccaccttcaacacagcaaaacagccaaatacaaggcagagggggctcgggtgcctggttttgaaagttcagggggctaaaatgcccggttttagagttcagggtgtattttggacttatttctttgtccaattccacttccataaaatacaagactgcaaaagtgttcctttccttttgtcccccataaagacctagataacacttgagggtttggtaccttaaattttctcactgtgcatgcaccatgaaggtagtagacctcaggttgcgcataaacaaaccggaacctaaaccaaaatttgggtgtttccggttttcggtttcggttacagttcacaaaacaactaaccatagttcagttaaaccaaacaaaaccgaaaaatcatatggcctagtgtcataacaggcttggtttgggcacgcacctgtctcattaaaaacgcgagcctgtagcattcacaaacgcaccactaggggtgggcatattagccgagaaccaaaatactgaaccgaataaaccggaaccgaaactgtttaaaccgaaaccgagaatttcggtacataattcggttaccattcttagaaaaccgaactttattcggtctattcgggtctgacccttggttacccgaattaaccgaaggaaccgaactatatacatggaaatagaaagaagaagaaaaggcaattccaatccagccccgtgactggggaggtcgatctcctcgtgtcctcccgtcccgtgccgtcccgttctcctatctctctcttgtagcccaatagcccaggtgggaaccaaatcgactgtctatttgatcgatctcctgagtctcctgagacctacccgccaagctcatgtgcgctgcgacgtctctgattcgatccaatcctgactccaacaaccgcggccgacagacctcacctcccttttctctcctctctggccctccactcccactccggccgtgcggtggcagcgatgctgcagggctgtagcctttcagtctggtggctggattccatactccggcggcggcctttgttcgtagggggcagcagcgcttccatcacggccggcgccggcttgtacgacggggtgacggttatttcggtcaaaaaaccgaaccgaaccgaaagtttcggttcttaaaaaattcggttcctcctttcctcaagaaccggtcgattagtatttttgaataaccgaatttcctaaatacctgaggaaccgaatagttcggttgaaccgaatgcccaggcctccgcaccacggctccttttgaagacatctgttccgtgctgcttgttacctctgatcgatgtgggactttaatgtttgcttgcctgtgtatagtgtaccgtgactccgcgctaccacgggcgccgagcgcgcgggcctagctattcggaacctggcacaaacattcaggccatatggacttaaggtggcccataacagttttctacgtacagttcagtcgcgggtaggcagccggtgtcgtggatcgaacaccgacacaacaggactagatcagagcagagaggtgagaggaaacgtggcacctcatggaaacaaccaaaccaaaattgcttcaatggagtaccatggatcaattaattgtgcattttgtaccggatgcgggacgtgactgctacacagagtctggagtcggtgcatcgtgctttcagtagagtagcagtatgcctaatacttataatcagtttctgactctgtacgtgtagtggccggagcatggagaaggaacaaaatatattttttattttggctggtcttgaaataagatgcatcgtttattttgcatgatacaagtataatacacactaatatttgattatctttcagtagttcaattagactaaactgaaaatggaagcatgtgcaccgaaaaatttgcgtgccgctaaaaaattcgtgtcaactttggctgatttggttattaccgagacaaacggaaatcaaatggctattaagttataacaactgtatttttatacaaaaccgtatttagcgaagtatacaaaccatataaaccgaaccgagaaaccaaacgcacaccctgaagtagacctaccctataccttaatagcgttcgctatcaaggtcaggaaggctactatttagagcattgactttaatcataagacggtacttctgtgctttctgtctagagtttaatcatgaagtgtcgcttacttttaccactatatgtcattttgttttgaaatattgcttgttcttctgaactgttctacactgcaagttttgcttgtcaattctttcatctacctatattatacatatcttttttatatgtaacctaacattgcatcaaaagaaaatcattcatcttattgtattattcctagtccatttgaattttaaaatttacctttgattccaatgatgctattctttctatgatttacctgaggaccacatacttttagttgttgtgtgcctcatttctcataggagatcaatatcttgaagcaaatgcttagtgcatgcaaagattgagtattagtgcattttgtttctcaggacaaacttgtgccctgatgttttattactgttatttgattgttgtatttatactctgattatgaaaccaaataccacatgtgaaaatgagtatgatgtcaaacatgacagcaacttatgatcttcactcttataatttgatagtgggagtgtgtccttaccaatttatcattcattcggattttggaacatgacatcctttttcatttatgattgtgatgcacacttatgtttgcacatgcgctgtcaaaacacaccttaatctagaaactgttcactgcaggccaacttaccaaaagagatatctgactacttgaa

SEQ ID NO: 2007 - DNA, 2075 bp, Brachypodium distachyon
  Intron number 1 from transcript Bradi3g19920.2 (locus Brad i3g19920) derived from phytozome v7.0 (chr-ID Bd3; pos 189 11790 to 18913864)
atctggaaggtgaggaggtctgtgcgccgtctttccaccacttcatttccatttttttatttttaccttttttgtagaaggaaaggaactgctccttgctttccgaattacgccttcagtttagatgcaaaaattgtaccgtagttcaattgaaaacatggccttgtcgccgccagggacattgacgaatgcttactagatggccagtcattttggttattacatggcatctttccgttaaacatacttaggatctcctcttcacggccacaaactcggaacaagtgtaactcaccacctaataacaatgttttgagaagtaaccgatatgatagaaagcctaatttgactgaggggaaaattatcatgatgaatgcagcaacatcctgaaggtcctgagcacttacaatttaaacctggccgatttaggatggcagacttgagttgaagactcaaatgatgacatgactagtgcctgtctatgaatcttattgtttactcgtgtacattgcaaagcctgcgattttattgtggaatttatggatgatggagcatccctgttctccctattcacacatactacgaggtcaatataatggtgaccaaactctcagatgcacacggaccttcacccgcattattgactattgattggcaatacttgcaagaatccatcacaagctgtaaatttttgggtatgttgctatgcagcatgtattgattgacaagaaaattgtgtaggtaggcacaatctttcacaagattgccctaggtttcccattctgtggaatgattactgtgactatgcaacacctcttcagcttattttcaaaagggtaggctcagtggcggagtcaacattcaaactgttggtgtacacaacgttaaagatggttcaatagaaacttccaagccattagcaaaaatcatctttatccgtcaagctaagaccaagagagctatagactttctcttcacgcctctttggattgtagggattttggaggatttcaatccttaggacttttcctattaaagtcctttggatcataggaatatagtattgaggttgtcaaattcctacggtcccaattctgtaggaatcaaaacatgaactcagatcccctttgattaccaggattctataaacatgacatctctcaatcttgcatttttcctattcctatggtttctaattccttgatccaaagaggccattcatattttgagtctttgtcaaaatacacaattcatccatacatctagggacaaacagtcgcacaccagtgctgtgacaactaacagattaaccattatgaaggcaacaatatagtaaaaagtaacagctaacaagataatgtctagtagcaaagccacatgatgaaaaatcaaagcaaaggcactgcagttgtgtgctgttgcaggctctctgttcgttggtctcaactagccccggcgcccatcagtgtccagcgtcgcatgcttgccctgcctgagcttcatgaggtcacgaatgccatttgccagtttgccagtgtggtggcgatgcccaagcagatgggctggctgttcttttgttgaattgttggcttcttggacagatgggcttattaagagtgggctgatggggaatgccgactgggtttttggaggggcaatggaggagagcaagttggcagcaggctgcaatatgaaatcactatatctaagaatctttgggactattttcagtatatatgtgtattataactatttcattactgattctttgccaaaatatagtcgctttacatctgtattctgtacaaccatgtcttacacaaagctccaccaccctgggaaggctacatttgaaaaattgaagttctagtatcttcattctgaaaattagagaaatacctcgagttcttaaattaggaatgcctgggctgtacgctatttatgctgggtgctatttgctagttatccctgacaaaatgttatgctagttctaaagagagtaagcataagttatagattttacttttgcaaattttacacctcgctcatcatctgatgtgtttgcaggaaaatat

SEQ ID NO: 2008 - DNA, 1645 bp, Brachypodium distachyon
  Intron number 10 from transcript Bradi3g37080.3 (locus Bra di3g37080) derived from phytozome v7.0 (chr-ID Bd3; pos 39 414727 to 39416371 reverse strand)
tacaatatcaaggagctgttgcaggcatcttgaaggtttcatttggtcagcttagttttttcttgtgctgacttgtgtatgttattctgcaaaataacatttaaagagaaatatattctttaaagtatgcttaatgccacttagatcttgtttggctcccaccatttgggcctggaatcctggaattcattttggattctaagaagtaagaacaaacttttagctggcacacagaattgggtataggaattcaatccgaaattccgtggaatcgcacctatacctaaccccaattcttctcttaaacgcattattcatctggatttgcctctcattttacatatccatgtgacaacaaacatgatttttgaatccgaaattcaaattcaatcaaatgatatcctgtaaaaaatttgaaatcatttcatttctaccaaatgaaatgaaatgaaggctgccaaccaagttgttagagttcacgtgccactgaaatgatctggttgttttgtttttcttttcagtccggaagttcagcatttttctctgttgtgaatttaaaactaaatttctatcccctgcaaaaaaaaactaaatttctaggatatgatgacttcttccaaggcaatgcgaaaatgggaattccaacagcttattatgtgattatcagatgtactttatggcttaggttacatacatttcagttctaaagagaaccagtggggaagctagagcagagaactattgggttcagctttactgcttagggtgtaatcttgcactaacaaataatggataagctaatttaatgaaggattcggtgaaatttattgggttcacctgcacccattgcttatacaccagcgtcgcccctgaagagaacgtggcatcacgtttcatcaagggtgcaaagtttctagggaactacataaaacaactagaactgtatcggttagcagtagagatatactatttgagtagtgtttctatgctcttcgcaaaactaccacagatcttaaagcactatgattggttatggagcatttggtgcttgcaatttgccagtcagacggtcgagtttttgaagagcttcacattttgcagagcatgaagcactacccgttaaccgtggtgcttgcagcatctccacaatctttgataattgtacattttataaatttttagaatcataacttttttttggaacgaaaagaatcataactcactggattcttgttctaccttcctagttccatgaattttgtagtgtgctgaacttttatgtttatggaggattttctaatagaatatattcctgaccgatgtaaagaatctgatccctgtcattcttggtcaaccttactagttccatgaatttgtagcgtgctgaagttttatgtttatggaggattttctaatagaatatactcctgaccgatgtaaagaatctgatccctgtcattcttggtcaaccttactagttccatgaattttgtagcgtgctgaacttttatgtttatgagattttctaatagaatatactccagaccgatgtaaagaatctgatccctgtcattgttactctacatgaactagatgagaaccatcttcctgatatgttgtccatttgttacagattttgtcctcc

SEQ ID NO: 2009 - DNA, 1522 bp, Brachypodium distachyon
  Intron number 1 from transcript Bradi2g43230.1 (locus Brad i2g43230) derived from phytozome v7.0 (chr-ID Bd2; pos 437 28264 to 43729785)
cacggcggcccgcgccgccgcggtcgtcaccgacggtgagacttaccagcaaactctgttatgtactgtcggtttaattagctagtattccgtatttattattcgttgcatgttctgtaggagtgctaagacagtgtagatttaatttcagttatgtatttgccgttttgctgttaattcttgctacccagggtatgcgctattctgtagcttttttttttttgccgaattactctgtatctagttactgcgccgttttttccttcctttttttagctgttgtagttgttgttcttggtgtattcaccgtcaatgttaaggtgctgtacttgcatgattgggttgccgtaacctggagtgcccgaattcggagtgaccattaagttactttgtcgtcaagtacgataaaatcatgagacagatgaagttacaaatgggtgtttctcccgaactgatactgacactgctatattcagacaactgatgagtagggagctaccaataacagtgaacagcgtagtaatatgcatagagccatagagtacgttatgccaacgacccgatcaggaattaattgctcataaaattgagccgggtagagtacgtacggtgcatcaagtagactgtagactactcgtactcttctaacaggtcggtaccacgtacatacgtgtctgaccgcgcggtcgattttaccgacacgcattaaacatcttgtgatcgctgatctggttggatctgagccctgcgccatgagcgatcttcgaaaacatgacgaaatgatttcggatcgctgtcatgtgcatactcgatcatgatttgatttattggagggccatattatacatagggtataactgtcggcccaccctcacatggcatccgcgctgcatgtgtacatggagatcaagatgattaattaacgaatcttctgatgagtccggtgctgatgatggaacaaacatgcatgttcagttgttcggtgttcaccgtccaaactccaaaggatcctttttaaatccaaaccgcttttaaaaagttaagatggtgtcatggtgtgctagtacttgtaatccaagccactgtttgattcgattcggttccttgtttgcttgcatatcgatctgttgcgtgtgcagatacgtcaggcatgctttctttgcagcatgtgcatggtagatggggtagtgaatgcgtctggaatggagcagactagcatgcaccctgtcagcttatactaccactagacgtctgtcgggtggcagactggcagtaacactaactagtccgtaaaacgaaacatgggacgagagacagacctactgtgcagagtatacttagttagtaaaacatctgaaataattcaaatcaattagactcttgtgtgagctctctaatatgatttcccacattcaaaattaagtgttactagtagatcaacgcttttgtgttgctgcaatttactgctaagcaactgaggttgagggtctgttgttgttggcgcatgcagggcttctgccga

SEQ ID NO: 2010 - DNA, 4989 bp, Brachypodium distachyon
  Intron number 1 from transcript Bradi3g10650.1 (locus Brad i3g10650) derived from phytozome v7.0 (chr-ID Bd3; pos 884 3579 to 8848567 reverse strand)
tacccgcccatccaccaggtgcgcaacccgttcttgcgccgcgattcgtttcttgcggtcttccaagatgtaggattgatctcgccgtgttgagggggaattgcgtgatctggtgacgtaaaggtggaaacgttgttgcgtgcgcgtgggtcattaatcttgtgcagcctccctgtcatgggtgattgtttaattggtgcatctcaaggaatgggattggcttttttcaacacctagtagcagagcagcgcgtgtattgtgctctaccgacgcacctgcttcctgcatcttgttgagcttaatttgcgacccagtttacatgaagagaattatgtgctgagggtttgacaaatttggcatccgaggaggcaaattgttgctgtgatacactacgcatagttttcttatccgttgccatgtgttttaataagagtaaaatacaccactagtccacgaactcggcagaaatgaacactttagtccacgaactggaaaaacgcacatgtaaacccctaaattgggattactgtaacactttagtccaaaaacggagattttgccgccggccatgtcaacggagagccacggcgactgctataggggacacgggcacaagagcgacgcgtgagggagagagagggcacgggcgccgcggcaaagagagcaaactagggttagggattgctccgatttggggattttgccaccgatttggggaactcgggatggattttaactagcgcagtcattttgcaagaatcaatcagcaatctgcggtcctggccgaagccgacgtggcgtgttttagccctgccgaaccattttttgactaaagtgttacagtaatcccagtttaggggtttatgtgtgcgttttcccagttcgtgaactaaagtgttcatttctgccgagttcatggactagtggtgtattttactcttttaataaacccagtatagttttcaacatgttcgagtcagtcaggtgcgctagtctagcatctctgcttgtcaatttatgcctatgtctgaccagttcagcagttctgcggcagaaagtcagctgataatctcttattgacttgtcttgcctttgttttgtctcttttggatcacatgactttgaggccctcttccattctagtattagatactagtactacttgatagcgaaactatatggccaacaggaggtgggaatgatgttcagggtatatgctagtgaaatgttgcattcccatttacacttccttttttccattagtggtgagcatttctattgcatacttgcatgcccttccacaagcgtaaggtaagttccatttagtttaagctggtaaaaatgttcttttccttgctgtcatgcctttttctgtatggttgtattaaaattactggtactgtttttttttaccagtttgcaattctcacatctgatctttgccaacaagtaaacatttcagcaacacatgttgtgctgatacgctcactagattggctgtaatctttcatgggctagcaatcacctggaacatgaagtctgtgtggactccttgttgtgcatctcagacaattcgttgggcgtggtaacctttaactgtgtgtgcggacaccttaaagagcaaaggtagttccaacaagctaacatgtttgggatctcttatgcaccatgacgggacatggtgtctaccaccgtgttgagttttcctagttgatactcaacgatggagttgtagttgatcaacttgcttttctagttgtgccaagggatactaggtagatgttgatacaacctgctactgcaccacaacttggatcttgtgattactcattttccatggccaatcttgatgccaacatggtgtggcctaggtgtgcgctccaaacgagcactgggccccacttcaacaagagcatttgttgcaatatgacataaaaggggcgtcaaaagatgttggaggtgtttagaccaacatggattgtacattaaatatcatcatagaacacaaaaacagagctacaaagaaatcatcaaatatgttgtgtattgaggcttgaaagcattccggtttgttggtagttaatggcattgtaaagaacttgaaaaaattgttatgagtgcgcaaacacttgtactccggatgaagttaaggtcctatatgcaagttcaagttggtaaagaattaaatgccttaaagtttattcaaaggcttgtcgatcatggtgtaggacgtaggatagcgactagagggaaacatgggaaagggagggttactgaacaagaacgaagttgttcaccatcctctatgcgaaaaaaaagccaatctcacgacacgacgtgggaatgtgtgttctcgaagttctagcacttgccggtcaaagagaactcggcaacacttgaactgtgggcctcttcataaccttcttgaggagatcatcaagtcaatctccaagctatctttgcacaaaaaaaaatctccaagctatcaaggagcaggcaacctccaagatgaacaggtacatgaagatcacctgaagggatcatttgccacaagttgctcaatttaagtgcatttcactcttcccaaatctttttctcaaaggatagcttagcataagtacaagaagggagaactctctagaataaggagtatattgacattggcaaaagattcctctagcaaagatgaggggagctgtttataagcctcccacaataatagagcagttaggctcattaaatagtttttcctcctttatcggatgattagcattattccacccgaaacttttgttagggtaccaactgtcagaagtcatacaataattgagctaatttcatgtgtttgaagttagcccgtttctgtgacataagacatcaacacatccaaacactttgaaatgtaggatatattttgttcattgccaaggcaaagtgtggctaataaaatctaagccacaattatgacaataagacatcaacacatccgaacacttttaaatgtaggatatatttttttcattgccaaaggcaaagtgtggctaataaaatctaagccacaattatgacaattagacatcaacacatccgaacacgttgaaatgtaggatatattttgttcattgccaaaggcaaagtgtagctaataaaatctgagccacaattatgacatcattggaaaagaggttaggtgtatgacaagtggaccatataaacactaaactgtggtaagcaaaagaaacagatacctaaggtattatggcatgcctaaggtcaagtgtcgcaatctgtcgccaggaactaataggcttgtttttttttgacaacaactaaataggcttgttaatttaacccacactatcaatcagacaatgactcatgcttctcaaccttggatacttggatgtagacccataacataggcactggtccagggctggaattcgagcagagctaactcgactcgttagatcttgttaagataaagatctagctcggcttgactcgttaatatcacaagttcaaaaccaacccggtttcaatcgtgtaactcgcgagttggctcatttaactcatttaactcgtataaatgtgaatagctgagcataatatactacaaaattcaatatatgaggatgttgtgttcttgtgtcacttgtgtgtttgtttaggtctaggggattagtagggactggacaaagcgctagacaaagccacctggcaaggcaagaagggctacatctcagatgacttggatagtttggcacttgggctgacctatgggcgctgattttaaccgagtctaacaagttaaatgatcagctcgttaacttggctcgttaaactcgatctgctaatgagatcaaattgaaattcgactcgaccttactcgttgggcagagagcttgagctaagttgatcctactcctttaacttgcgagttttgagttttgattctagccctacattgctccaacaggcaataggattcttcggaatgacaacaaaggacattctgtttgggttaacttttggcactgaacagaatctgaccgttcggctattcaactttcaaccctggtgcctctcatgtaggatatccctttgcaactgcttctggatccaggaaactcatgtgtaatacatgaagactccaacttcacttaatatttcttatgctttctcttaaattgaaatacatccctaattgagcattgaacagttgacaacattgaatttactagtcatcaacccttttaatagtgtgacacctatagcagccatttgatgtcaaatccaactctgagatcaacaaatgctaggaaaaaagacattagtcttaattacatggtttgcacctttgctacgtgtagctcatatgttgtcctctgtcaatgcgatcactgaggctgttttgggtgttgtcgacacaagtggttagctccttgatggcatctagcaccatcatgaagcaatgatattggcatcttgagagttgagactccggcatgatgatatgtgccggtagctctaatatcaaatctttaggatcgtagccttggggtagtagttgtggacttgtggtacccgagggactatggtttgtctgaaataagccgaactccacagctacaagacttgagtccaagctgtgacctactcgtactcatgttgcacttccacctcatgcctttgcaccctagccctgtgccgcttatacgggattccctacacttccatgttctgatgttccagtacatcccttgattgcgtagttactgtgtcccagttcttgcctttcttgactgatgataacaatgtcttatgggattatcattctaattattgtgatttactgtatggaacattttcctttgtaggttcagcattaacaaatatttattaaacataagtgctagtttgtaatcaactttcatttttttctatgttacagtgccaaaacggtcatacactttgttcaacctgcaa

SEQ ID NO: 2011 - DNA, 2991 bp, Brachypodium distachyon
  Intron number 1 from transcript Bradi1g32800.2 (locus Brad i1g32800) derived from phytozome v7.0 (chr-ID Bd1; pos 282 82642 to 28285632)
caccaattgcagcggttttctcgggactatcgaaggttggttggttcttcacttgttttttccttggttgactatcccccatgtgtcaaggacttagaacagaggacattccgcataagtaatggattttattggagctcaccttccacgacttcaatttgagtgatttggtgacagttccactagccgtatctgtagtttctgatcggaatcgtctggtgatttattccaactcgttaggaagtgaagtgttgatggagaaagaaaacttcctgttttagtagttgcaaatgagtaagaagttcttgcaatgacccaagaaactcatatgggcagtggttagttatcacttctgaactagtttatcagtttgggacctttacctctgcgaactttagcatcagcctcatttttctttttctttttcttttttgagatctcagcataaacctcattgtagtggtggggatgagggcaccccaatctggccagcatatctgctctcggtatggtgggtcttgtaaattatagcatctgcatatctgcgaatccattataaaaaacaaaagtagtggccacttgttacaaaatgacagaccatacacatcggagtcgattagtagcattgctcagttcctttgatctgggctctcctgcacatgtatgagtacaacataaatcttggtttttttttccgaataaactccatttagtttgtttttgctgtctttctgtttgagattcacttcttagttttaggtgccataactgtaggaggattaattgttgccatccagaaagaggtcagttccagtgtaatatctgtgctttcgcgtcttagtttggactggattaggtcaaggttcctttgataatgtctcttattaccttttaaaaaaaaggggtggggcgttctttatatattccactttagtttaatactataattgttcgactcatgttccatgagatgcttcagtaatgtcttgattggaaatggagaaaccaactgtgcttaaagaaactgtttctctaaacctgtatgaggatggcattctttcttgacaagtgtgctaacctggttatcctggcaacagaagagaaacagacaaaaagcataccggtactatgggtcataaatggcataacttatgatgctgcatccgacattccttaaggtgcaagaaacatgtattaaggagcacccggttcttcactttcttcacatgcaagattctcttttctctttgtggcatgtgggagcatcagaataacagatatatcaccgaattttttgaaccggaactacttttctcattgttgttggaaaataaagttttatgaacactagttagcaaatgaagcaaatagtactatcctatagcctctttggaaattcagcttaatttgtcaactaccagttgttaacacgtgcaactgcacaattaagcgtgtaggcatagttgatataaaaatctatgcatgatacaccactttgaattgatatagaaaccacatttgccaaatgcattgaatatgcatcctcgtcacctttattttctaaaaaccaaaaggcatcatcacctgcctttgtctgtccctgtctaagctatgcttctatatgatgagttgcagtatatgtcctggcggtaattaatctataaacttatatgtggacagcaaactaggactcctacttccctatttattctatgcattaataaatgatttttgccgtcagtaacattgaattagacacttccgtaaattgggccattgagtcccaaaagctattaaaacctcttagtacacttagttctccatttttgtggagaacacgtgcgtcctatgtataggacatgactatccaattgtatgcaatagaggtcataacggagattttgtttgattcttgttatgattcatatgtggtttgcctgtgatgtcagtactaaaacatgcaattttgttttctctgactagagggaaagtaatgatatgttcaaacctcaatttttctatcttctaattagcactacctaatagtctagctaagtcctccacatgcatgtgtattgagacttaatttttcagtcttattccaaactacttcctccgttccataattcttgtctcaaatttgacaaaaaattgatgtatctattcctaaaaagtgtctagatacatctaatatttctacaagaattatggaacggaaggagtacatgcaaatttaataacttttgtcacttcagtcctcatttgtctttttcattcttaaggatttgtgagtaaatatttgcacatgccattttctcttgtacccgagaggataagttgatagaaccgcgatatcatagtcatttttctatgcaattttcattgtcttataaccttctcttataagaagtgatgggtatttacttaactatggtactcctacctattatcaaattagccctcgatattttaatatggattggtacctatggatgggctccatgcatgctgtattactcagattaaacttattgtatagtatacaatccttgcatatctaagtcatttcttggtacacatatgtatggattcctcatgcagaagagtctgagcccttcttttttctttccctatcacagtctgatcagtaacaagcagaacttttaatagtggtaggagtctttacaagttgacatactacatgcactggatgtttattcagaatggattctttacttcatcgcatatgacatggatgcccatatatactttttgactaaaccttgggattgcagtctcatgtatactttttaactaagccatgggattgcaatatgacatatcgatggccaggatggtttttcctaggattgatgtggttgcttgaaaggagcctccaattagaatatataagacagttgctaattgtttaaatactaaatagtctattaactgattcataaatcttactctgttgcagcactgcaacta

SEQ ID NO: 2012 - DNA, 4988 bp, Brachypodium distachyon
  Intron number 1 from transcript Bradi1g52760.1 (locus Brad i1g52760) derived from phytozome v7.0 (chr-ID Bd1; pos 511 32679 to 51137666)
agatcgcacgctgcctgaacagttctcactttcaggtaatattaatcccttgtccatggttaattttctccttatgcagttttattatccatttctcctatgcacaagttatcagcttctcttatcccatcatgataatagattcatatctgaaattatcataataatttgctaactctacttgtattattggcaatttggcatgatagcatgcttttttgtgcacatatgtacaattacagtgtagtaatggaatgacattggattgtttaagttccatttgtgatgctaatgtatttggcagaacaattttttctgcagcatcaaccgtttctttatttagatctgtttttcggaagggtgaaactgatcaattcacccaataccctccccctcccccttccattaaagaattcatattagtttgatgctagcgatcccatgtggtactgtggaacacaggtgtttctgcgggtgacagttttcagtgacaaaatttctatgcaacgatttctaaaacaaatttcttttagcttcgcttttgtattctttaatctttaaacaattaaacaacgtatttcccttatatcttatcaccaacttagtatccatctatttgcctgaagggtgacgtaaactcagtatacaaaaattcagtgaactactcaagaagcatgttttctctttacattgtactttgtactttctggttgatcagccagagtatttttggtagttatagaacgtaggccattcatctgcatatgaaataatgaattagatgtttattactccctccgacccatgtcacttgtcccaaatttactacaaagttgtactaaatcagtgataagtaattccggccggagggagtacatgtttagttgtgctctaaagattgtcagatcctttgatcattgcttgttgtggactcacattgcaatttcaaaactagctgtataaattgggtgaaatgtagacatgttgaatcccgttgccggaggagaccaaacctgtggaggctggcagtaatgcttccattatctacaaaaaggatatgacaaaacattactccggttccaccatcttcatgaaatttcttgcaaaacaaaaaaccagaaacatgaaccctgtctgcaacacatcattcagcatgcattcatacctgcccattttctgctaagatattttccccagcattttagtgacacgatagatagagggtaggagaaacaaagcagaaattgaacttgtttgtggtttgctaatctactggtttaatttgcaaaatttggctttcatgtacagggcaaataatatttgtgttgtggattgttcaaattatgtataaacatttctagttacgtgcttttttctggattttggtcacgtactgtatcactttctccatatatcaccaaatgtattattacatgtcatactagacatttcgccttttgttttcgacaaatgtagactgtgttcaatatgcaaaggcatgcttccttaaactaccacatccacctccaaacactacatcggtgctcgtgctcgtaattttcccagcctccatcaaacactacccttctctgcacccatggcctctagtgccagcttcacccttctctttaacatgctatgtccaaaattgctttgattttactcaatgtttctttttcagattgttttgactcaccatgttacctcgataaagaactagctccacataaaatgacatttaatcaaaaggtcttattgttggaaaaatctgaataagaaaagtttaggctttgatatctatccctatgtctacgtggatctcctcctgtccctcttctctcctacagctctacacttccccgtcacaccatcttaacatcatccatgaactattcaagctggttaggtggaaatcttttgtgtatggtataatcttttatttacatcacaagaatacaaaaacaacggacaaagtggcatgcttttgaacaccgtctaccttacaggtggaggaagtcaaaatttgaagattaatttaagtgcttattagaatgctataatgtccttgaactggattgtcacagatgagcagtttttatttttgtgatgcatcaagaatagattaggcctgggcattcggtatattcggtcttttcagtttggtctattcggtgttctggtctgtcgggttccaagaaatgatgaccgaattcctgaaaaaaaaaatcaaggaccaaacccaaatagaccgattattttggttcggtcaatgcctctacggtcccccgaatagacaaaacaacatggagatccttgttgagggcgacgtgcagcatagcaggctgtgctggatctggtaatcgggctcatgggctatcaaggcttgcaaatttgtctaggtttttacataaattttggatgtcaaaaaccaaacccgaaccctgaataagatggaaaaaataactgaacccaagccatgatgaccgaatagaccaacaacaattcgatctatacaggatgaggagcaacgagggaagggaggggtgatgacggattcatgctggatggatggtgacatcatggaggtagaggttcacacactatcgtgtttgctggaggtcgagataatcacgcagcactgcatgggaggatggatggtggtgccacgctaggaataaggtctcgctatcatgctagccagagggcgcattatgggtggtaggcttcctgtctccatcagactgggtgagatgaccgcggagcgcggtgccgtatccaggctgctcatctacgatctgatggctttggttgtaagttttcatatttgcaccacaagctcatttttgacctgatccgtctccctataagtatgccagagttagtaatatattctagttggacaaagaacaccatgccatgcacatgatatagatgttaatatgaactgtaaacatgaatgtccaattatttatagtctccctgcaagaacctattattactacacctttttgtggctagctatctatggtgtcattctccagacaaaaggtagggagaaaaggagtaaaagttactcctgcaatgtggtgggattgaatcataggtagtaccagtacatttattggggtaaaatcatttttgatgtgtctaggaaggagcaattatctgttgtttacctgaaaactgcttgtgcatcgaaagacttgaactgtgagttgtaaattatatggaaatcttcttgaagcgtgaactgtacatgaagctgtgatgacatctagaacaggttcacggccacacattaggagagtccaggaggagtctcgatgaggaggacttgattaggagtaatggaagatcagatgaacatagagtcaatgtaatgagtagttatataaggaaagcaagttctcgggagcgagcctagctcacttgtttgggggagtgaatgtactatcccaccacttgggatcaagtcctcacggatgcgaatttaggttcctatgtataccgtaggggtctccttacagttttctttcaaaaaaaggacatcaagttctcatagaaggcaacgtcattaactgaaagctataaataggaataaactataatctttcatcaagcaagaaataaacatccagcccttcaaattgctaatccttactcctttaatttcttatgtcacgatcgtgcgtgccatggaaggtgttccatataacgcctctatataaattgtttccattatggtttaggtttaaatgacatctgttaagagggtgttccatatagtgtctttacattgggctgctgtgaatgaaactgggccaacatgaagagaagagaagagccggagcgtgtttctgtaatcaacatgagagtgtttctttaatcaagccaaaagtaagcctccaatcgaagagaagttcttccgaggacatcagggcaaatgcctcttctaccttccattaatggatgactcagcactgaaggacaacctaaattacatctgaaagatgaattttgagaggggggatacacacaattagtaaatatgaggattagcttagaaagagtgcaggggagttcggtaaagaaagtcatagagttcgaatcctagaaggcaagttcaattagtagggggcagctcgtccttacatgcaacacccatattacctttacagcaatgagcgccaacatcagaaatcccagatactttgtattatcatcacccaataggtgttatgaagtgtagaatgttgaacaacatcagcttttctcccctcaaaccaatttaattattaggcgtctagaagtaattcaatatcttaggctccatttggaatttgtggattacaataatctcgtttgcctaaatagattttgcctattttactatttgtttaaccaaaattctcctacttccataaccattttccacagcaggttataaaataagtcagtcacaaactgggcctcagtaagcaaaaattgagcacaaacatatttccccttccagcaaaataacatttgttcaacaactgcagaccttcaattaatgaacgccgtgagtattattcgttgctgttgtgttttgccatgtgaatcctttttagagtcattggtttgtattattcccttggctgaaccatggaaaatatgagtcccaatcagcagatcctgaagtaacaggtaaatcaaacctagtttgccctgaaaaaaaaggtaaatcagacctagtgatcacaattgatagcactatgggggcatgaccatatgcataaccagtactgtgcatagctatcactcgtttgggtttcccatcatattacagaaaacattgcttgagtatgtttctagatttaaatgttttgacatggatttacatattttgtatctggttatccatttattttacgtatggtagttgctcaaatgtattgatagtaactgtacttctgctccttttaggttgctgagagagcattattttt

SEQ ID NO: 2013 - DNA, 3809 bp, Brachypodium distachyon
  Intron number 4 from transcript Bradi1g14480.1 (locus Brad i1g14480) derived from phytozome v7.0 (chr-ID Bd1; pos 114 07141 to 11410949 reverse strand)
ttcgacgtatttaacaacatcacgtccaatacaaggtttgtgcatatactatttttttcactgcttctactaataatgttgaaaactaagatgtcgaatgatatgctttgtattatgcctttgtcttctcgtgtcgtccccgaaagaatctgcagcctccatttgtatatgttctgtacatatccattaatttaattagacgcgttttttatatatatagatgaattgcatggaatgttggaggcatttgactaaactatcttgattaggacgatgctctgtcgtcggtatttgcttgccccttgtagagtaacacttgcatatagggatttgtttgtatcatgcatgcacgtacggtacttaattagttcgatgcgaaagtaaaccttttagaatagaatagcactataatttaaaatccaaaaaaatggaagggaatttcagataatgtagccgttttttagacgtagcgaaaatctcatcttttgagtttttgaagttacaaaaacaaattacacaagaataggtagaaaccggtccccagaaacttaaaaatttataattataaattatttatgagccacacaaaaatcgcaaaatgagttaagatacaaaaggcgacatttgatgttacataacgtaccattttgtacagaaattcatctcgtgattcttgcgccaattgcaattggtcatacttccacagaagaatttaagcgagtggatgtctacaaccacaacatcaggattcaaatccctcatgggcacagatctttcaaaaaaacaattgtagttgtaccccccaccccccaccccccaccccaccccacccccactgctttcttttcaaaaaaggatttataaagcaagggctatcaaaaatttcaaaacatgaagtttcaaaacaaggatttgtactagcactcaactaccaatcataaactccctctatccactttcatcgtccgggtacaactcttgaggttaaaacttgttcattacttagagtaacaatatataggttgtgtgagccataaaaattatgtagctgaaattcgtattcaaaaaggcaaaaatagaaacacattaggcataatcttaaatctttatatgtcatgtaaaattttctctatattccaagaagtataaaagaaaagcatgaaacaaattatcattatcagtaattataaaaggattgtcattgggaggatttgtaaataaaagagtaatatcgtttacagtatcttcatatattgtttatgaaaaagttacatattattcacctgcttactttctaaatatatagttgcacacgagaatttttacaagtgtttatgacccagtaattatacgataactttcgagctattatcaaatagtacattctttagtgaacatacaaactatatgccatatattagtttcatataagtagaattaaggctggtgccttgcatgcagatttagtgcttgcagtactgcagatcagccacgtacgtatgctaatatatgtgggtttttagatgaagcgggttttgaattgccaggatgcaataaaatttgaattgactgaaaaccaaagggttcatatcaaccctgtccgcatatgtgagattcaaggggcatgcatgtaccacaccaagataggtgccacttatttcgtaggatcaaattataatggtgtaaattagttgttgagaaaagtagtaaacgctacctagcttattattttgtctccagatcataacaatgtagataagtcaaaaaaaaatactaaaaaaggtccattgaaaaataaatatggccacgcttaattgtgcaggttactttgctggtgctgtaacaaaacattcagtctaaactaaaaaggaccttcccgtgggagatatgaaatcaactagaaattatgcataatgtttttttgttgtatatataaacttgaagatcttaagctatattgagtgcaaatttagcaaagtatctgttaatttttcatgtttgaaaatctatgtatactttctctcttatctttccttaacccttatatataattagaatctataaggagcgaatgtttgctctctaacctcttggagcgatcagctctgatgatggtctgatcaggaatacgtggctgcgattgcgtcgtgttctgcggacaactttagtggagtggggcaaactgtaagccgcaactttagttgcgtgaaggtggctactttagtctgcgacggtgacaaccttagttctgtgtgggtgacaactttagcctgtcgcgctgcaagattagggagccaatgtttgttcgccatgtgtttccacgcagttttatggtcagcatcattcatgcatggatctaaaatatctgaatacacatctcagacgcagaacagcaaccgtgggtcgcttgctagctaaggtgacagttgtgcatgtctggtgcacagccatattgtcctcgaatgtccattccaaactcccacgcatgcgtgcagaggcccttgggctggaagcctccaatttaatcacggatgttcttcaaaaaaacaaaaaaacacacagatgcagtatgtatgtagagcaatatggatgtagcacccagggcaatatgcatgcattggccatgcccatgcatccatgggggacaggtccttaaaggaaaagtaacttctagctagcaatcttaccagactgtacaccgatcagagtacgtactgccgccggttggggaagatcgatcatgatgcttgggcaagacttccccccccccccccctacctcgcagaacaggcgcagatgatgagagagaggtgtcagttttgtactgcaagaggtaggtagcagccagcatcttcatctccatttcatttcagatctactcctactactatatcaattgcagccctgtctgcgctgcgcacatctcagggctggtcattttgcgccgagtgctggactgctggccggaccgggcatcttggcgtaggacaattagaagaagacaaggcaggggcagcagcagcagcttgcctccatccatccatccatccatccatccatgatccatccgttgttggcgctttgaccggctgagaaagcctgcaatatctagtgcatgtagtgttgtactaccacagtccacagcacgcacacccaccctagcgcagctagcttaaatagagtacatgtggttgagtggcgagcatggacaagccaacttgacagcattgacgcactaggctgccggccggctgcacctgcaatgcacaaggtagtagtatctggctaggtctcttgtgctcgtagtgtttgccatttccatctgggccttactcttgcatgccttactcttgcatgcatggcatgcaggcggagttaatttcctgctgccttgtacagttgtacgtacataactgctctacgtacgtacgtgcagcgtagtgctgttgccatgcatgcatgcatcgatcttggtccgctctcgtgtttgatgatctgatggttttaactgtttttgctgcctgttgtattcattgtgtctccctgcttgcctgcctgcatatatagtccccacaggcccggccgggccttcattatttgctcttcgccttctaactaattaggctggctagctagtaaatactccctctgtcaaaataactaacgtcgatttctataagaatacatacaaattcacttatttaaagacgacggaagcaatctttactttactacgtgtacgtattgtgctagtactcgatcatctgagagaaatattatttgttcattacgagctgcagaaggcagcc

SEQ ID NO: 2014 - DNA, 9699 bp, Brachypodium distachyon
  Intron number 6 from transcript Bradi5g08230.3 (locus Brad i5g08230) derived from phytozome v7.0 (chr-ID Bd5; pos 107 96747 to 10806445)
agggaatcaaccgtttagttctttgttctggaaaggtatattatgccacacttcctgatggcagtattttcagaagagttgcaaattcacctctttagacagccctttttataactaacttcctattatccaggtgtactatgaattggatgaagaaagaaagaaatcggatcgcaatgatgttgctatatgtagagttgagcagctgtgtccattcccctatgaccttattcagcgcgagttgaagagatacccaagtatgttaaaaaatgccttcggtcaaatatttccctgaagttgctactagagtactctttttttctgtgtgaacacatcatagtttttaaagtggtatggcgagcagtggcgacacccccttttataacgcctatggcatgtggcgagaagacttcatggacacatactaacttagtatggcaggcaaattaaattacagcactcactcgctaccaaattaagtcacaactcgcaacttagcctagtataaccctgtgcaaatacatagaaaacagctgcagaaagtctcaggctctcagcctcgcacaaaatgaaccaaggaaaacaggcctatacggacgccacagaccagtttctgtcgcgaggcccaaggcgatactctggaggggcgccacattgttacaacgacattacaatgacggtatagcgccggcttgaaaaccatgaaacaaacaaaagccgttcatgtcattgccttgggtagagcaatctggagtactcttttttgcatgccaatctgatatttgtttggatagcatgggagcatgcaaggcaaacaggtatacagaacacgggaggaaagatgcaaatggaaaatatatttcagatgaaaaattatttgatgaaatatgatgcccacttttatttgtgatgtggttccttgatcttaaataagggtatagaacaatagataactcaccagtgacgtagtgtacctgtttatcattagttaaataggatactcattccagttataaaatgtttttctgttgagcaataagctggcagtaatgagaacactttcatattgtttgctttagtgaactttagtaaacaataaaataaactcatatcatctttgtgtttctattctgcagatgccgagattgtttggtgccaagaagaaccgatgaacatgggggcatatacctacatcaaccctcgcctgctgactgcgatgagagcgcttggccgtggcaccatagaggatatcaagtatgccggaagggccccttctgcagccaccgctacaggtttctattctgtccatgggcaggagcaaaccgagctcgtgcagaaggcactgcagcgagaccctatcaagtgtccgttttgaatccgtagatgctccgaatagccatcagaatctcttgagtttggtgaataatcgttttggatgtatggtacggcacgttataaacggtctgaggtccatcttggacagcaattttgttttctgcatcgaagttttcatttctgagcttggttccgctgcacccatgaacaggtagcgaaataagcttcatcaccacattctaatattttcttagacacgccacattgtgagatttaccttgacattgtaataacaaagggtgcatcttctactaataacaaaggagtatattagtagaaggtgcatcctttgttattttactacactcggacaacaaaattttgggttcttcaaagtgcttctcataaaattttggtgttccataggtatgccactctggtttttcattggatgattcttgaaacttgctttcagtgatctgtgatgtgaactcgggtcagcaaattggggtattcgataacacggcctcttcaatggattgtgtttgtttgtgttaattttacgatttgagtatagtagttttgatacttcgaatggcattctccgtgcacgctaagtgtaaccattctacggcttgagagttacactaaaggtaccacttttaacgatttttatgagcaaaatgcatggcttgaaaattatagcaaaaacgcttacaagttatgtgcaactaagataaagaaatacgtttgctcggcctagacgctgagttggcacatcaacatagacagaatgacccgtaataggggcaatgccaacaatgcaaaagggcccctcaaatgcttcgccttgaccattatctccttagccacttcttgatcgtgatgcggtagccagtggagaagatgatggcgtctaaagcgtgtcgctcaccgccgcaaattccaccatgttgccatctctccatgaccggtaacacctagatctggttggtcttgctcttgttgcatgtgccgacgtcgattgatcgggcacacgttgctttggagttctcggcaaagggcccaagaacgggtcgcgggaggtcgtagttgaaagatcgaaagataggtacggtcggtgagggagtggtgaatatccgactaacaaaatttactttttttttttcatttttatgggatacaagtattaatacatggttcactaaaacatctaaacgatgaacacccctaatatgatgcaatagccgaagcacgagcacaagtaatagataatcaattgaaacttgcttggtagtcgaagcacaagataaacaattaaatttagcaagtaagtaacgggcaagaatgatatcacagggggagacgaaaattttatcgaagttccacttactggggtcagtatacgtctccgtttggaggagtgctctaccacaaaggtagaggcgccacaaaggctcactctattctccaactcaccacaccacaaaggtgggataagctttcacaataccacaaaggtgaggtgagttccactagtggctttcttgagcgtgaacgccgaacccttacaaacaaggagaatcctcaagcacctcctcacaagattggaagtcttgaaaagacaccttcagttaggaatcccaaaatcccaaagtaacaaaatccacaaagaaaacaaggggaatcaacttttcaatttggtgaaaccctaaatcaagatcttctccttcaatcctcaaagaatcaagagtggggaagcactagtgagggagatctaggaatttgaaactcttgtatttgggggagagaggaatagctcggtggagaggaagtcccaaggaaggggacgactcctatttaaagggcgtctcaagatctgaccgttaagtgaattttgcgcaaccgggtggtagagaggtagcagagaggtactaccgccaacgggcggtagtactgctccggtaccaccccactaccgctagaagacagtagcgtttaggtgtggttccggtacggggacggaactaccggccccggtactaacggcatagatagagccgcactgccgcactagagacatttagacactaatctcttaggctaagattatgaggtgatctctctcccacttaggaaacggctttatgtgggtgcaaatagtacaattgtgtacctgaagttgattcacccaaacctttcccatgtggactcctttttaatagtacggattttctacgactcaatataaataaaaagccgtaaatccttctacgcttctttcctttttgagagcaacgaaccttcttgtgccatttgatctcacatctgaaacactcaagcacacggttagtccacgagtcatgttgtcattaacaccaaaacacttaggaatcaaaatgccctttcagtagttggcggtgtcattgctagagactcggtggcacatgagcagccctagcttctcgatggggaggacttgggtggagcgtcgaggttgtccgtgggagcgaaggagcgacagccaatggggtagatcctcatgttgagcatgcccaggacaacgtctggtgctgggcgccgctaggaggagcccaaaggccttgttcaggcggactaatgttagagtgtggttcatatagaggcggcgtgacttgtaatggtggatgaccagcatgttgagtgccgtcacttgcattgcctattctggtaagccgtgccgcgacgttcgtactggtgtgtatagaaatagataagttgtggcacgactagggcaactagcccgagacgaagcaaacacgtccaaaaattcaaattttgccatttagcccttcaaaaaaaatatacatgaacattctgtaaaagaaaacaacctattttcgtgccaaaatatcttgccacaggcccacgagccattttgtatgagagtgcaagcataattttttctcaccacggatgcgcataatttgcaacatgtaaacgtgtttgctactccgtacaattttcgtgtacattggtcaatcattatcctcgatttttattaacgcacattcttgtatgcgaaaatcacccggaaaatgtcaaatacaccgccgcacggccgcagtccgtgacctgacctgacctccttcttctggtccttcctttctcatctagtcatcttcccttttcgacggcgtcctggaaggaatcctcctgcccccgttccaccgaaggacgcctggagagttctcctcctccggcctactggactagctcggagtgtagatccatccggaattgggtaatttctttggttgctgaagccctaaagtacttcgatcgatccggtcttctctttggtgtgcgcaatttaatcgaattctctcttcctgcgacggaattctccaatccgtcctctttttcttttgcggctaggtttggcgttgagaggggaaattcgatccggaaatggggtggttccgggccgcgtcgggtttagcccgggtggcgctgcgaaggaacctgtctcgtgtcccggcgagcccgttcgccggccccgcgccgcggtacttccactcgacgcgtccccggcgattcgctgcgccagagccccgcgccgtgccgctgtcgcgcctcaccgacagcttcctcgatgggacgagcagcgtgtacctcgaggagctgcagcgggcgtgggaggctgaccccagctccgttgatgagtcgtgggacaacttcttccgcaactttgtcgggcaggccgccacctctcctggtatatccgggcagacgatccaggagagcatgaggctgctgctgctcgtgagggcgtaccaagtgagtgggcacatgaaggcgaagctcgatcctcttgggctggaggagcgaccggttccagatgttctggacccggcattctacgggttctctgaggatgatttggatcgggagttcttccttggggtttggaagatggctggtttcttgtcggagaatcgccctgtgcaaacacttcgttctgttgttgaacgtctggagcaggcgtactgtggcaccatcggttacgagtacatgcacatacctgatcgcgaaaagtgcaactggctgagggagaggatcgagacagttaaccccagggagtacacctatgatcgtcgccaggtcatgctagataggcttatctggagcacacagtttgagaatttcttggcacagaagtggacaactgcaaaacggttcggcctcgaaggtgccgagacactgattcctggcatgaaggagatgtttgacagggcagctgatcttggtgtcgagagtattgtcatagggatgcctcacaggggcaggctgaatgtcttgggaaacgtcgtgcggaagcccttgcgacagatcttcagcgagtttagcggcggcaccaagcctgtcaatgaaggggagggcttgtatacagggactggcgatgttaagtaccatctaggtacttcatacgataggcctaccaggggcgggaaacatatccatctatcattggttgcaaatccaagtcacttggaagctgtcgatccggttgttgccggaaagaccagagcaaaacagtactattctaatgatcttgacaggaccaagaatcttggggtgctgttgcatggtgacggaagcttctcagggcagggtgttgtattcgagacccttcatctcagtgcccttccgaactacaccactggtgggacaattcatattgtggtcaataatcaggttgccttcaccactgatccaatgtcagggagatcttcacagtattgcacggatgttgccaaagcattggatgctccaattttccatgtgaatggtgatgacttggaggcagtggttcacacgtgtgagcttgctgccgagtggaggcaaacatttcattctgatgtagtcgtggatattgtgtgctaccgtcgtttcgggcataatgagattgatgagccctccttcacccagcctaaaatgtataaggtaatcccctccacccccatgcacaatcattttgatgatgatctgacttgattctatatatgtgtttggtttagctcttcctttgttgattccagcgatagtatatcttttgagtaatgatatgcctgagcttagtattccacttagctgacattggtatgcagaagtaggacaattaccataagtgagcaatagcattgatcctgcacaattgaatagtgatattatccatgtaacatgtatccttttatacatctgtaaggttctttccttttgcatcagattattaggaaccatccaagtgcgcttgagatatatcaaaaacaactattagaatccgggaagctctccaaggaagacattgacaagctacacaagaaggtcagcaccatactgaatgaggaattccaaaaaagcaaagacgatatccccaacaagagggattggctttcagcttactggactggatttaagtccccagaacagatttcacgtatacgaaataccgggtaactgattcttcccttccagcttgattgtttccaatgtttacatccacattttatgtaagtatatgtgatgtaatgcatgtgtaacgatgcagtgtcaagccagagattctaaaacgtgttggagaagccatgaccactctgccagaaactttcaagcctcacagggctgtcaagaagatttttgatctgcgtcgccagatgattgagactggtgaaggcattgactgggcagtgggtgaagcacttgcttttgcaactcttatagttgaggggaaccatgtcaggttaagtggccaggatgttgagaggggtacattcagccaccgccattctgtcattcatgaccaggaaactggagagcagtactgcccgcttgataatctggtcatgaaccaaaatgaggaactatttactgtaagcaacaggtatgaatttgtctgccgacttgttcagtttggggtgcacttgggttacttcatttaacattttagaaggaaacatgaaatcaccataacctgatccgcttgataatctggtcatgaaccaaaatgaggaactatttactgtaagcaacaggtatgaatttgtctgccaacttgttcagtttggggtgcacttgggttacttcatttgatattttagaaggaaacatgaaatcaccataatctgatgacctgaaaccgtatcacctagttcaggtaatgctgcttttatgttccacatcgtgagaagctgcatatccctattgcaagaaaaacttcaggcaaaaccctgatccactagtgatcaagttttgacagtggacgcatggctctgaccaattatgctttttgttatcagcacttggaaggaaaattgacaatgccttcttttaatttctaagaacggtttagaacatcacaaaattgggcccatcattaatgtatatggaagatgtaatttgggatgctgcagcttcgaagtagtagtttcaaccttagagttgtactgctaaattactaccgttgccttctgattcatctctgttgttttgagcagtagctagggataaatcatggttaaatacgttccctgtggcttgtagtactgagatgatctatatgaagatgaagtaattaagaaaacaacatcagtactgagatgagatgatctagtttgatggtttagaacgttggtttctgcatgctcaaattgctttgaacagttggaaaacctgaaggagaagatattttgaccaattttatatactcttaaccaacggaattagtaatttcagattgaaactactaggggcatgctctactgatccataccttgacatatgatataagtctttaaactataggcttgttctgacttcatggcttctcccatctcccttttatggttgatctgactttatttactataatctgatatgtgcaatcattttaacagctccctgtcagaattcgctgttcttggctttgagttgggttattcaatggagaacccaaattcacttgtcttatgggaagcccagtttggtgatttttcaaatggagctcaagtgatatttgatcagttcattagtagtggggaggcgaaatggctccgtcagaccggactagtcgtttgccttcctcatggatatgatggtcaggggcctgaacactctagtgcaagaatggagcgcttccttcaggtattatttgctccaactgcaaagatgttggccaagtatctgtggcgtatgaagtacttgtattatatctggacatagaaggaacatggctgagagctcttactgtaaagtagctcttgcacaattttaccatgacatgcatatacagcactagaactgccataattgtacactagattattttaatattctgataccacttgccaatgacaaaaccttaccatttccccaccagaattgtattactcttcttcattttcttgctttatgcttttcctgttctcagccaatatgaataagaaactgtatatgcataatgactcagcatattgtattgtacttcctctacttttgattagacagtagaaactacatttgggatctggcttatggattttagttgtacttctatgttatgcaacttatcggtcgtccttcacatcatttgagaccatagtcatggagatgtacacactccttagaatgtctatgctaaattttagatttaaaatatagttacacattctgcaaaattgaacagattgtgtaaggagattttttttgctgggtcatatgcgttttagacactcgtttcttttgttttacctatattctttttatgaacatcaacaattatattgcagatgagtgatgataacccttatgtgattcctgagatggatccaacactgaggaagcaaatccagcagtgcaattggcaggttgtgaatgtcacgactcctgcaaactatttccatgttctgcgtcgccaggtgaaaatcttgatacctttctctgtttctccctcccggcctgcagaaccatcttggtccattaacatatctccttgtctgcttccagatacaccgtgacttccgaaagcctttaattgtgatgtctccaaagaatctccttcgtcacaaggaatgcaaatccagtctgtctgaattcgatgatcttgctggccaccctggatttgataagcaagggacacgtttcaagcgtctgataaaagaccggaacgaccataaggaccttgaggagggaatcaaccgtttagttctttgttctggaaaggtatgttatgccacacttcctgatggcagtattttcaacaaagttgcaaattcacctcttcagacatccatttctacaactaacttgctattatctaggtgtact

SEQ ID NO: 2015 - DNA, 3401 bp, Brachypodium distachyon
  Intron number 2 from transcript Bradi1g14670.1 (locus Brad i1g14670) derived from phytozome v7.0 (chr-ID Bd1; pos 116 30617 to 11634017)
tctgccctggattaaagaaaggtatcatccctctttattgttttggtaacataccaacctaagcatgcccatttctcaatattgaaacacatgcaaagaatttccatagtattagctaaataccacacctttgtggaacatattagccatggcagtaagcaattggtgtggttttaaaaacaggcaaccatttttttgtgtggttacattaataaactctgcaatttttcatgttttcctgcggaggatcagcaaagagtaagaacttgggaaatacctagtgttggttgcatctgattgcctaaagggggcaattcggctggatagatgaggcaagaagagagaattggtgatgagatattgactaacttcttgatttctttgttcaactgagaggccaagctaatgcagctgcttacacaggagataaggataccctgaggatcaagcctcatactaacaaaaaaaatctaggaatttacctgccaactaacaaactaacaaactaaatctatctctctttgccggttgcatgtgcacctggcccttgcgctggtgccagcggtgccatgctgcggtgctgataagcacgtccctacatgacagacccccttctaaaggcaacttgtcttcacgatgctcaaataatctttggcatcttctcaggcaacattgcatggagccatgccctcccactggaccaatagctgccattggtccctggtaggctggttgcgaacgacacttgccagggttggcaacaccttaccgcacgcgggacatcatgagtgctgtatgggccatagttctaaggagacagattgtcgtgaggcacctccggcaatgacagcttgtagtgtggtgaaggagttggagctatgcccgcttgccaaccttataggtgacacggcggtggttattttcgtagtatagcttagtgtagccttgtgcttcaagtagtctttcacgcatgtcatgaaggaactggtcatggttcaacagcggccacccgaccgcctacatttgcgcctcccctttccaaaggagcgaagtgatggagacaaatgtccatatatgtccttgattggcgcagatgatgttaaagtggtaaactcgtaatcagcccatggcagccaacgcatcctttgatgcagctcatctctgatgagactatggcggctgactggcggcccatttgaggaaggatggaaggctgaacctgtgcacaccggcaagcttgaagagctccttccacaaacttactagcaaagactggtctctgttgcgcctcctcgaagaaagtgtgagcactgacctagccatgttatgcatcgcaactgtccggttagaggataatatcttcatatatgggataagatcccagttgttgcaaaagataagattagtttcctaaggtccaagttttttatctctgattctccgtatataagagaggacttgcaccccttatcaatcaagcaataagtcatgattgtacactgccgagaagtccaagcccatcagtctgttggcccagcagtgttgtggatcgtcagcaaccactggtacaacaagaacttgaggcagcagcggtcagtcttcatgacaaccaggcgccccaacaggcacagccctgctgtatgcatgaatccgatcaagcttctagaggcttcaagcttatgctgtttgttctcttcaagcgagtagcgtactgatgtattttatgtgtggttttacttatgtccgctggtcttaaggttacagtttcttagtgggccattgttaaatcataagttagacctatttcgtatgtcaccataacttggcaaaggtcaatttggtcatatttagctttacaagtgaactatctccaattgtctgaacagatgtacgtgcaagctactatttcactgtgaattcctgaagtgtggataagtctacaaatgtctgttatcctttaatttaccatttatgttttgttaagatgttggcctttacatacgaaattagtccctctgttccaattagatagcgtttaggataccgagacattctccattaagcacctcatgcacctattcttagtatataaaattaaaaaataatggcactgaagtgttctggatgaaaaaatatttatgccattacttgttgagaattctgaatttttgtgtgtatattagcagtcaaagttccaaaaggtcgcccatgtgcttctatttgtcagtttatttaagcagggggtatctatttccctacataaggtaaaaataaactctgcaatgacaatttcgaatagtgaggaatgcctatgagtttgatagtaactaccaaccccgttcagaagtggatgacgttctataatgcattagtcaaacgtctatttgactataaactattttgtttggtcaagtgaacacatcatcattagatttttaattatgttttcgtaatatcgttttatatgaagaataattgccaacgttgcacgtggagtcctgggaaaaccccaaaatgacatgtattgtttaaaaaatggagtacgtacaatttactgtgggcattccagcagatcttccagaattttggaaagatgaatgttgagcaatatgaaatttccgtaacaatgtactacttagtttgtaggcattctaatactgcagtacactagggttgatgattttgagatttccatttgtttttgactttttgttacagggagcacgtgtgtgttctctattatttactttcacatcatctgtgggtatgttgtcctgacctgttatttgttgctggttgtatcgaaccctctcgtctaaagaatcaaccacaactttgctacttctgcaatgataaatccattgattaggtgccgaatatgcatctgatcgaggtcgatcaatgataggaacaaatttgtgtttactgtctaaataccaacttcaattagcttatattcctccagaagccaaataactcaaaaaacttggtgagtgtgggattgcattcctcagtacaaatgcggtttgaagttttcacagaacccatcctgtaagcaccatgtttatgatatcataagcttataacagctttcaaatttagcatatgctcgagatcccccaagttctgtctgttaaggtgacaaactgacagtagtttatgaaaacatgtcagaaagcattcatctcagcggaaaacaaatataacaaactacagcagagtattatggcatgtttaatatctgcagcactccttacctttatgtatatcgcatagctctttagtgttatttgatgtaattatctggttgctgaattattctcctgctaggcttgacctaaccctcaaattcaattgtaaatacaggtgggtttttgcagaaaataaggaccagcttggtg

SEQ ID NO: 2016 - DNA, 4249 bp, Brachypodium distachyon
  Intron number 1 from transcript Bradi1g33400.2 (locus Brad i1g33400) derived from phytozome v7.0 (chr-ID Bd1; pos 289 46611 to 28950859 reverse strand)
ggggctgagtcgccggcgcctccgcagcctgcaaggtaccgagccacacctctccttccatccctctccatacatgtcgtgcgcctagccgtacacgaccacggccgtagaagccaacggagcgagaagacgcagctccagcggtggtcttcgcaagcgagcccagcggcaggccttcacggccagtgagtaagcaatggagagaaagggagaaatagcggctgcgcagagggcagaaatcacctctcccccacgactgccttctgtgaatgggacttgcagaaattcccaatcaattttcttctatttgttgtgcatatcaggtgtttgtcataatttctctaagagctatgtctgatttgttaacttgtcaaggttagcaagcatattttttatgtgctgtgatgatgcattcgacacaactatttagcgtatgctttagtacatgtgctttataagtacatatacatggaagccggcactttgagctggatctttctaaaaaagaagaagtacatgtgcttcataagatgcgacaattacatttcatcaaaaccgctagtttacgcaacgttggcaatctcaaagaatggttaacatgtttgagataatgaaatgctttgtattgttattttaccaccgctcaattgccatattatttaatcctagtgacaagattattttatcatatttgccatgctttaccgccgcccaatagccatgtcttttgcgcctggttgccagattatttgatcataattgtcatgttgttttaccatcgctcaatagccacattctttaaccatagtgaccagattatttgatcgtaattgccatgtttttttaacacagctcaattgccatattttttgaccaccaattgccagattatttgatcataattgccatattatttaaccctagtgaccagattatttgatcatagttgccatatttttttaacactgtttaattggcatgtttttttacccctagttgccagattatttgagcataattgacatgttattttaccattgctcaattgccataatatttaaccttagtgaccagattatttaaccataatttccatatttaacaccacttaattgccatgctttttttccatagttgccagattatttgagcataattgccgattttaccactgctcaattgccatattatttaaccttagagaccagattattgaatcatggtgccatgttgttttagcaccgctcaattgccatattatttatcttttgtgaccatattatttgatcatagttgccgtgttgccttaccactactcaattgccatattgtttatccctagtgaccaaattgtttgatcatagttgccatgttgatttattgacactcaattgtcatattttctattcctggtgaccagattgttcgagcatagttatcatgtgttttaccattactcaattgccatttttgtatgcttattgactggattatttcactaattaccatattacttttaccattgctcaattgccgtacacttggcattatgattgttttaaggatctggattaaattcttctaagtgcataaaaatttagttgtggcggcatcaagagacgctgagagtgattgggttgtcggtggatataggagggtagcagtagcaacctcggatgtgaatgtgtatcggtatacatcggtgtgtaattaaaaacttgtcctaattgttgtacatatttcatcgtatagtgtatttctatatagtgattctttagcagtccgcatgaagacatgaggcaatttctatctaattcatgccgtcaatttctatctaattgaaaacagataagaatctaatgtgcgaatacaagcaccgtgcgcagccgtccggcgagctacagcatgctgcacgtagctagctaacacatgagcgtacaaacgtacaaatacacgtgtggaggacatggacgctcagggccgcaagacgcgctgcaaggtactaggccgccgctgactaccactacgtggggaacgccgctgtgtagttttgtccaagaatcaaaccggtacatgtgtgttgggatcagtaatggcagttgcgagtaattctagtgaacttctatgattttgactacaggacgatccacgcgagggtcgcttctctattctaactcaattgcagctccgttctatgcctgctccgaggattagtttttctgaagctagcaaatcaatcgtctgtcgatggtaaataagcatattttttctacagtatacaagaatcgatttagccgcagttaaaaggttgagtaggccggggtccacatgtcagaatccacctcggattagcagttcgactgcccccacgggccacggccacggttcggcatgggaaaggataaaagaagggcaaagcagcctagcagcgtgtctgctttcggaacggtatcaaacaacccacccggccgccgccgcgccgccacggtttcgggagagccgagagggccggagagatacggccgggttccgcgccgtcggcgaccgctcctcagccatttctcggtaccatctctctctctctctctgcaactctccttaatcccgtatgcggcggcctctgttgacccaggatcgttgtgggatacgtgtgtcccaatcgatttccatggtggttttgcgctagcgccgagctataccggatagatccgtgccgtgatgcccgatctggctcttgagacgcgtagtcaggtttctaggctggaatatttgcctcttcgattcacgctgcagggtctagattgcacgcagttagtcctgttgtgctggtactgctttggctttctgaagtgtcagttctgggcctgtggtctgtgcataggcacatgtccactttcttgaaaggaggcagtttaactttcgacactggattggattttgcctatttgaggaattctgggtcgagtttcagtgatgtggtgatgggaacatgttgtcctatttgctctcgttcagaataggaagaccaaaaatggaatatgtgaaggacatagcctaattaagcattttcgtacctcatgcagcactcctaaaattatgataaaattgtagcaaaatgtagttcctgcagacgcagaaaatggacgcaaacaaattttagtagatatatatttgcttacaaatatgtttacctgaagagcgtcttctgtgtatggctgtatgctccctctacaaaggaaaacaagttatgttttagaaggtgcagaaagggtaatacagtaacaagaaatatcgcgagcgaacgttcgctatgtggtctcgccatgggacatgcagtggacgcttgttctcatcgtgtgaacgtgtgcaatttacacaccgtatactccctccatccggaaatacaaatccaagttacttatttccggacggagggagtacatgttttccagcacaccatgtgaatttttgtctgccacctaagctgttagcgtatttgcgaagcgcttgtcgtttgccggctatcggtgtccgaaaataaagggcactaaataaagaccatgtgtgcatttaaatctaattaatatagcggcacggtggccagggtcaaagatccgttttctgcgttacttgaacagtttgaacatagttccagtagcacaaggtttaggtcataattatagtagctatcagatactacctatatttaggaacagaggtactaccatttattttttcatatcaatcacatgtaaagaagtcttttgtaactaatattctagctacgaccacatcctggaaaatcctataagaaaataacagtgaccaaatttgctaattcaacatcagataaagcacatgatgctgaatttatatcattctttgttaatttttttagaaacattcttcatgatttaagcacattaaacataaaaatagccattaagcgatcaacagtgatgaaattccattttgccagggtactagagctccctattgctccctatctcaggttttaggattctgctagctttaatattcgtttcactgatatcctttcttatactagcaagtcttatagtagtaagttattatctcactgtattgtcctcatgtatgatggaagcgtgtgcagtcgttcctatcaatttcatcatgatcaagatatatggccatttgttggtattttctgaaatgtaactaatccactctgatttaacattttgcaggtagaaaagtgagacctcaa

SEQ ID NO: 2017 - DNA, 5595 bp, Brachypodium distachyon
  Intron number 8 from transcript Bradi1g54300.3 (locus Brad i1g54300) derived from phytozome v7.0 (chr-ID Bd1; pos 526 94220 to 52699814)
tggcaggacttagtggaacttgtgattttgtcaaggtattattggcctacccactagatcacatttattttgggttcagctttttgcctagtttcctgttcttcccccctccttagtaagcaaagaaatctcgaaaattccttttagaacccgtgcgacatctagctcgttatcttggccgcgaaaggaagctcgggatcccctgccgcaggctccacctccgcgtattctttccagcccatccagtattcatgatcatatatcttcttgccacaaatgataattttttccgtatgcccctaacttattacaaattcgtttcttctttattgaacaatttatttttacaattatatgcatcaaacgcgtcccgtaatgtatatctatttttgttagcatttcgatccctcagaatctgctgtttaatttttttaatactctctcctcaactgattgtcctagtcaactaccccctcccatccataataagtctcttgaatttagtacaaagttgtataggtccacagtgccatgccatgccatgccaccatcttcaattaatagacaataatactaggctcaacgcgggtcaacaattgtgctacgattatggtaccaatttcacaattcaaacagagatttcgaaacattccacaaaacagaatcccccttgctgagactgataagacacaaaaatagcatcataccgaccacaaactacaacttattcagttctcacgaaccagcagcttaaacacacctccctacattacgttttcaatcaacttaatacattgtcatccattcggaatccactacaagttaaatcacatgtccaaaggaaacacacctcgctacattacgttttctgacgctggatatgatccacactattttctatcctccaatgatgaccagtctgaatgaaagagagactcagccaagcaaaatcttggggtttccgcagttgttcttctgatgacctgtaccgccacagtttgagcacttcggctgacgcctaggaaccttcgggatatcactctggtgcggacaggtcgtgctcttgtgtccagataaacggcaaactgaacagaacctgctcctcttgctgacttcctcgtacggcgctttttcccttccattgcttggtcacccaacaggtcttttcttgcttgtcatcgttaccccgcttccattttgagcattcattcctgacttgcacgcttcgcccgttcctggggttgttgctgtttcctgtccaattcctggcgagtcggcgcgacccctgttaaatcgtccctaaccccgacctccgcattttcccttgttaattccgcctgccctctctcgtggacaccaagaccgtccggagttgcacaaagaggctccaacctggtattcacatcaaccatgagttccattgccagttcataagcagcaggattcgaatcacccatcctgacgatctcgaatgcagtaagcgacaaatttgagtgacgcccttgatctttctggtagctgcggagatgtggtggcaaaatgtcccctgcatcccttgtccatcttttcagaaccaaactgctaggtatttccatgtgccccagatgcagcagcacctgaaaaaacaaatacaccagcaaccatcccgtcagttccctttgggactagcagctcaacagaacatattatgaccagccttccttttatttcaaagtactatttttatcaaacggatatcagaagagaacatacctttatttggtgacagcagggcatcccggaatgctcaaacgagccacactcacatttgtactcccccttatcttcatctacctggagacggtatattgtcttgcaccatttttccctgaatacatgcctggtatgtctagcgatgtacgacttcctcggctctatttcctctagcatgtactgaccatactcagatagagagtgtccaaattgctctaacatagttctggtatataccttacccgcatgcacctcaatcggcagattagccttcaggaccacaccattctgttttatttttgaacatttgtagtatcacgaactaacaaatagtacttgagcataatggcatgtgaaatcaaaacacaacacatatgtttcattacatctaacccacaaatagcggcttcataatgtaataaaaaatagcttgaatacgtcacttaccagggctgtccttttttcctagtagctctcctccgagtctatgtcgaattgcagcttctcgtgttgcttcacaaatatatgcattgggcatccaggaggcatgtaagtcttcagaacatggctggcgctctcgcttcgttgagtgcttgttatcttggcacaagagatgttcctgaaataagatttcgcccatttgcgacgaacctcataaatctgagtaagaaacggctgcttctgcaaaccatatttctccaacatctccgcccagcagctctcaaattcctcctccatacacataaggttcaccagcttgtggaattcagctctgaattcactcttcttgccatacaaagcccctagcgactcttttgcttttttcaacacgtgccacttgcaccaacggtgcttcgtgttggggaacacttcggctattgcaagttccattgatctagcctgatctgcaaacaacaatcacccgttatgatatgttgatgggatcgccgacaggtcacacaaattggcccatgatgcggacataatctaatcaagaaaaaaaaagaccacaccaactggccatgccatgtgggcaatatggcacttggggagtttttctagaggaagaacctgtgagtattgtttgtgggtgccggtccttcccacctatcatccgcatgaactctgcgaacacccatttagagctctccactctctcatccctcatgagaactccacccaaaataatgctttggaagtggttgttcacagccatgaatagaccaaatggcatgtcatacagattggtcctgtacgtcgtatcaaatgtcagtacatctccgaatcatatgtactggtccatgcacttgcccgacgtccacattagagtcttaatccgtctgtcgtcgtcgacctgcactgtatacttgaaattggggtccgcctccagcatcttgctaaagacatccagtgttttcaccgcgtcattatctgactgctcctggcttatctttccacaaagagtcttcaaagacatcttcgtgaatggtatacgatccatgctcccaaagaaactaccaattatgctgtaaaccttaccaaggctgatgggacttgcttcaccagttgcttcgtgtacctatagatgtgcttatgggacttccagctatacctgggcaaaccccgggccgggcttcataaaagcccgaacctgaagcccgagtcgagcccggcccgaaacaccgaaaataggccatttaagcattaaaataattatttttggaataaatatttgattttttatacctattttccctaaaaataccttttttagtcatttcgggccgggcttgggactgaaaagggaggcccaagcccggcccgggacgtcgggcttcaggccgggccacccatgcccaggtatacttccagcacggcttttcaccacaagtttttgacaggggatggttgtgtttgtctctatgctcacagatgtaccatcctttgtcttctgatcgaagtaatctaatgagagctgggcacccacatctagcagaccggctgttttccgtcaacggcttcccctacagccataacatgccactaaatcatatcaggacattttggaaggtcagaaataactgaatagatataactgaataacagaaataacattttcccaaatatatgcgtagcaaaatggaaggtcagatctaatttaccgcacaagcacacacgatttcctgcatgcacttctcccggtggacgtttagcctgcatttagcataccgaatgctaaacccaacctcccaggaatacaggttgtagaagttgtatgcgtcgtccaaacagtcgaatgacgtccctaccgccggattcactacgatgtcactctttctttccgcatagttcttaatcgaattctcaagggcactcgttagttcatggttcagttccctttcttcaggggccgcaccagtccgaaccctgaaaggaaataaaaaccaattagcaggcctcagactctgaataaacaacatcattcctaatcgtcccacgaacctcatattatactacgttcggcagaaagaaaaattaacaggttattaaccagcttttcatgatgattctaagctcgcagcactacctccgactgatttgagcgctgtcgttgctccataaactattttcaaacctgtgcgtccatccttcagagttgatcttcatcagcccctcctgcataggtgcgtcgacatcctccctgccagcctcatcgtgagccgcctcctccataaatacctcctccgatggctggtctgcgctgccagaagcgagaatgacgcttggatctatcagcacaccgtcgttcgaaaagcccggaacgctgcaagcatatcagatgatcatcgtcaaaggtaccccgctactacaggaacagagggggagagaaagccaatccaatacaatcaaaacagcttaggcgaaggtgggggacgacttacatggcacatccttcgtcgtcgccagacgcctccgtcaatgatcttcccatggtcgccgcgttctaggtgcagagccgccgagacactgaccaccaccacacaaccacagcaaaaaatccccctcgccacacgggaatggattgcagagccagcgctccggatttgagcttcaagtgccgtaccagatctgtcccgggaagagttatccccgccggaggaacaggcaaacagcgccgccgccgcctggtgtctacgacgggagaggtcggttggagtgagatgaagcctttttttttttttgagagcattttttttctttttttgagggggtgagatgaagccttcttggaacgaataaaatatgctcacctacaggggccaagcatcttcaatgcaaggtgcctgaggtgagcatattttattcaccctaaaccaccatcaatgcaaagcccatatcagacctgtcccattttttaattcgtccctggacggcccaaaatgtaatcctgaaacgtaaccgaggtccagtatttgtcactgttaccccatacgctccctgggccaaagcctcagtattccttaatttctgccgagaagcccaaccttttcccatgtcacttggcccactggcccatatcctgacgaccgattgtgcactctagataccgagctaacactcgctcgggtcctattattccttgtccaagaaatctttgcatttgctttgcccacagttccaaaaagtgctaggaggatggcggagtggtgcttttaataaagaatctgtatattggatgaagacaaatgttgactgtgtaaaaaaagttatatgcttgtggctttttgaaattaaatgacagttttcatttcctacgtattgatcggaatacaggcagacttc

SEQ ID NO: 2018 - DNA, 5462 bp, Brachypodium distachyon
  Intron number 11 from transcript Bradi2g35630.1 (locus Bra di2g35630) derived from phytozome v7.0 (chr-ID Bd2; pos 35 963309 to 35968770)
ccccagatattcagtaataccttccgtagcaggtatgtggaaatatttacttttatctctttgattttctgcattgacaaccattggctccttgggcaatataggtataaaattagaatagcatatgattgggtcctgtgccatgtactttgtgattgttgtctatcgaattcaatccctacgaccccaggttagttccttgcttttagatgataacatacatggtatgctgcactaaccatgctgcggccaagatagttttcaaggtgtcagaacaatagataagtttgcggttttgatatcatattgcaattcaccacatgttgtgttgcgttgaggtgttagtcttatttaatgtcagggtcttatcgatggttagcaaagacatgtacacttgtaggcattgctgcagatcacctctagccattacaaacacttgtcaagaatagatatccagctagcaataaccagaactgctatttgaatgaccatcatcttctctcttcatggttcgtacacattgtttccagcacttttcgaccggtccttttcttgtttttttcaggaatgttcaacgcttgtgtacatcttaggggcttggattttgacatgagaatcaacggcggtcgtcgtatgaccccgtacgaagcaaggtgctccgcggctgccaatatgataatcgagcttcggaagagggcagaggaagaatagcaggatatggaaagttgcctaattaaacttcttaaattgtgaattggtcggcacagaaaaagctgagctagtctcatcagcacaacattgaaccaatctaagttccatccctataattgtcttgttgccttgtcatgggcaataatcaccttgttatctaatcttggtagatagtagtgttgctctgtcgtgaaggtagatggttgaccggtgtattaggagaaaatgctacccacatttatcgaattttgatacaaattgtgaattgcaatctacgctgcaaattcgagtgctgccaaattgcaaaacagttagcatatcctatttcggaacatatgcagaataccctttgatcaaagaccagtccaaattcgaagcaaaacagttttggattgactgcatattttgtacgattaatgtgtttgaaacacatttgaaatttccatttcaatggaagaaaaatccactgaaaatacggcccatcatggcccatggaaattttgaaccgttgtgctgcccatcatggcccacagaagtttctcttttgtcttcaactgaaagagacgtgtttcagacacattcatctcactgaaaatatagtcaaactttgaaatagtttcgcttcgagtgtggattgctctatgatcgaagggaattctgcctatgttttaaataggataggtaacaaatgggcgactgtctttgtcaatttggtagcactcgaatttgtagcgtacattgcacttcgcaattggttcaaaattcaataaatatgtttcacattttcttctttaatccaccggttaccatctactttcacgaccgagcaacacactagatatctatctagacagggtaacaaaacaattattgcccatgaggagaaacattgcaaggtcgaatagatagacaaggcaaaaatacaagtatttttctcaggaaatttggttcaacgttgcactgatgagactaactcagtttctttcagcacctgccaattcacaatttaaggagcattattaggcaactttccatagcccgctattcttcctctgccttcttttgaagctccattatcatattggcagccacacctagcttcttacggggtcatacgacgatcaccactgattctcatgtcaaaatcaaagcccctcagatttacacatgcgtcgaacattcctgaaaaaccaagaaaatgaccagtcaaaaagtgctcgaaacaatgtgtaagaaccatggagagagaagatgatggtcattcaaatcgcagttctggttattgctagctggtgatctatccaattcttgacaagtgatggtaatggctagagatgatctgcaacaatgcctacaagagttcatgtctttgctaactatcaataagaccctgacgctaaattagactaacacttcaacgcaccataacatgtgtggtgaattgctatatgagatcaaaacaaaaaaaaattatcggttgttgtgaaaccttgaaaattcttttggcctcggcatggttagcacagcttactactacgtgtgttatctcgcaatggaaggaactaatcaggaaccgtagggaacagcttaccttgtgtgttatctctcaatgtagaaaactaatatagaaataacttggcaaaatttggtgaaactttggcagacgatttgttcgtcacactctgtggcggacgatttgtccaccatgaaaagcatggcatgccacagtttaacacaaaaataattaaatttgtgtccaccaaagaaacatgcaccatgtttgccacaaaaccttagtgattgtagagtatgtaattgttaattttaaccatgtttaaatgcgaaaaagacagaatagcactcaagattgtctgactgtccatatcacactgatcagcaccacgttctgcaagtatgtgttacttgtgaacctgaaacaaagagagaattggatgagttcgaatcagcttatcaaggacttggaaaagagaagagaaggcataacatataacatacaaaatcatcccgcattttctgaattgattgtactgaatcatacatctgatcattgttgttctccataatgcctccttcaatgaaatttgaaatagacagattaggattttcggtgaccaaaataacaaatcatgaaaaacaagctttcttgggtaggacagtcccaacctgagttttctgaagctcccatattttgaccttccaaaacaatgttcttcgttacatgatcagcactttgtgcctgatacaaccagtagttctttaacttgaagcagagtaaatgtgctatgaccactagatcatatggttgatgagactaggctcgagagaaaactatcaaagcataacacttaactttattatcaggtcatcagctttgaattctattttttatcacttatggaagtggtaaggtcctaatgtgttccgagtattgtaatttttcaatattttcaagctgtacttatttagcttacctttttagggaagacatccggggtgatatcaccaccctgtgtgtttttcttgtccacttgaacacctaaaagaacgtgattatatcacaacacaaaaaaggaaatgatggatcagtatctagatagtgttaaaatgactcaccagcttgtaggatgatttgtcctccacttgctgcagctgcttcctttgtgtttctagacttggttgtttgttttgaagtatccacaccaacaacaataagtgcatcattttctctcacggggttgtcaccatcccgaccttccacgttgacagcagcgctgtagtcttggcttcctatgttcttttgttgttcttcctgcccttgttggtgctggatctgttgttgctattggtatcaactaattttattgcttgtttcttttgctttggtgttgacacttttttagttcctttttgcatcttgtacttgctatttgcttcttgctgttccacgctttcagctatttcatgtagtgcagaatcagaagggctttcccgaaacatgtcaagtgttatctgtaccatcattaacccaacaacttctggcgcaacttttatgcataaatagcttagtacagatcttatgttacctctgcaggaattgaagcaaactcttcttaattatatgggagaatatgatagtgctcaacaacagatgatgttttagggaatggatcatttacaaataactgtccactcatactgtcaagagaggaaaatcccaaaaatgtcaggagttacaatcattcagaaacggcaaaagctacatgatacaccattaagcattttagaggacaacaagaaaaaaaaacgattttatgcaatgagcattatatatacatgaaacacagtactgctagaggggaaaatggaaagagctttagcgaagcaactagtaccaacatagtttaaagatccatcaagctagataataaagttggttaataaaaaggggtgtaatctacaatcatcgaactgcctaataggtaaaagcgaacctggatatcaactcttgtagaggaatttctgtaagttctctgttcatggttttttcataccccacaatgaataacttggtagttgtcctttctgtactcaatgtgtatgtcatatctttgtcgagaagatgcaattttgagcgctccataccttttaagaccataagtttaccatatgggagaggaacaatgtacagggagcaaacagaaagtgcaaatcttaataaaaataacaatcaagtattatatatgtatatcccacttttaaatgctttgttttttgaaagtgggctgtgtattaagaaacaatagagttcagattacaatcacgcataaccaagtattatgtatgtatatcccactttttacatgcctatatttacagaactatatataaatagcattctctaggaaccaattgatttctttgagcacatgtacaaggtgaattaatcattgtagagtcccaggttattttaacgtgctagtttgtgaatgatgcaattaaatacaattttagtaagtagtaggctagtagcttgtacgcaaccaaaacaaatgagagccacaatgccagagaataatacaagtgattacatttggattttcttatgttttgtccccgaactgaatgctgtgaaatgagttaaaagcaagtgagaagtgcactttttggatgttctgtgcaatgcccttcctcttgcttttctatgcaaagcaactaagcaagaggacgcccaaaccactttttaggttcattacagttcaaataaattaacagaaactaaggtcaacactaaaaaatttcaatgggatatattctataatggttaattccccttattctcatccaagtgagcaaactatagatacatgtctctttagataccaaggttgtacaattgcatcgaaatacttcagcatgagacttaacaaactgatagtttagtatctaatatatagaggcaaattgaaatagatagatatggatatggaaaattaggggttgtgatgataaaaatccaacctgttcaacgctccacctcagtaaatgctagttgcttaagcacatatggatgttccaaagactgcttgctgctatgtgagttaccagctgatgcatcaaattccttctctatgattgaccagacaccttgggtatcagagctatattcagtcaaacatttttttcttgtcgggtcaggaaaaagcacggcaacttttgctatcggccacaat

SEQ ID NO: 2019 - DNA, 4676 bp, Brachypodium distachyon
  Intron number 2 from transcript Bradi3g19070.1 (locus Brad i3g19070) derived from phytozome v7.0 (chr-ID Bd3; pos 176 87118 to 17691793)
tctgccacttctaccgcgataactggccgtgcaaggtgcgctctttggcttccttctttttttttaaagagaggttaagatcggattggatcttggactgagttgcagaaaaaccccagcaattgcgttgttgaggtgtgtgtggtacaaatggtgttttgagatgtggatctcgtagtaaattgtcttctgtagacaatgctgttctgattaggtcttgttgtatttttaggaagatcgggatgtcttgaagtggatttaatacttttgctgtcgttctagttcttaactgaactcctgaaatttcgatgacatctgcaatattgagtgacacaacttcatttccaccgcacaagccatgctcttcaacttcctgttatcaacttgttgacactccaactaagcacctctcactacttccaatttaaattacttcccttttattaatgaaatgaagcttgcaccctgttttggctccatagaatcgaattagattgatccaatcaatatattttaataggatttgaatccgattctgcgtaatatcagttctagttccttgtttggctgccatttggaattgaatgtgaaccgaacaaaaaagaagaagaacaattcattatcaaaccagccaacaagagaataggaaacacgaacaagaacgagaaagaagactgccaagaaaagaaaagaaaaacgatgcagcaaacattaggcagtttggtcgtcgatctggacagtgtgaggagacctgttgcacgagaagttggtctgaaggttggaggcttctccttgaggatggatataaggtcttgaaggggctgaactgccaagcctcaaatctttggcacctgcagatttgatgcagcagtgctacatgaagtaggatcctgacggttacgctggtgacctcttgttagctgtgatcaaggagttggaggtgaaagggaggatgagcagggaaggacaacatctgtgtcctttcccccattacaggttcctcccagacctgggcagagtaacagttttgatggtcgcttgcgatggtgggtggtaagggaagggtgaagtgtgggtcaatgtcagatttgtggagcaacgacataggggaggtgagaaggcgaaggctgagggatatcaaatgaattataggtgtcagccaacaacttgatccgttgaatttgattccagttcgttgagagctagttcttgtgacacagacgtttcttctccgcagcccacccatgttgctcattgtgttaccaatagttcactgtttcaaaaataagtaaatataaaggggaagcctagagggttaagtcaatacttgtttgatatttcttttttctaggtctgtttgtgtgtgccaaaagtatcatctcctaaggaatagttatttgtttctagagtccaatgtcctcacgtttgtgaaaatgcatgctggatgccctagagggaaaggccatacctgttggataaaatttacaagcgccatatatgtagtggcccacaaattgaagtgatcataagttgtgacttggtggcctaagctatacgcaattcaagtcataccatctgtacgtaaggtactccttgttagttgttgttgaagatcaacacgtgtaggtatgtttctatctgcaatttgctcacaagaacaagaaagttagacacggcatgcacacatgcatttacatttcacagcccacaggcagcaataacgtctggctggctctgatggttatgtggaagagacaaaatgacaagcagccggaaatgatggtttggagcaagcgcaccacagacttccctcgactctcttctttctgttgatgatgtccttttggttggttagagaaaaccaattggccttgatggtgcagcttggttgtagccatcaaagcattcccactttgacagcattagcatccccagtcctgggcctccatgatgcacctcaacctggtgactgctgaactgtgcgctttcgcatcttcgtggctggcatagcactggaggcagttgcaatggtgccccagtcgctgcttcctccactccagtccaacatctccaaccgtctgcacaacaaaccactggccaggtgctgtcgttgcatgggggctcatatgtgagtgtatgcaggctagatttatgcgtggcaagatgttgaggggtttctttggtcttgtggcgttagctagagcaatttgcaagtaagtacgtaaaatgtacctacaggtattcaacctgaagtttaacttacgtatagctttgatttgaatggtaatgtcatagagctaaaactaatctgatgatgattttttagtgttgggctcaaatagataattgctacataatgtttgtctataaacatgtgataggttcccaaggtatcaccgcatcactagtctgtctatatcctactagcaaccgtgtgcgtgaatgcacgtgttgacaagtgtaaattaagccgcacatacatcttatatgccgtcatgaatgcatttcaggagtggcgatgggagagaaaaaatccaaaggtaaaaagtaggttattaatagtattagtcatgccaattaaaataaaattgattaaaggaggctccaaatttgtgcacagccgttggatgagaattatgaaaatggaatatatatttttggatggttggtattaaaagcatcccactcaactcgtgcttttttatatttgtatttatagatgtatagatatggattagtacatggggtgagaaggtctgtgtatgccttggtaaacaaaatccctagatgtaataaatccaattgacaaatgcagttttagtttaatgtgcgctccagggtttgtagttaatatgctgctctatcctaatttcttacatatggttctttgacaccatttattagaaatagatctccctccctccctttgagccctcgtgctgggatttgaatgagagattatgtttctgacttgttgctctaactatattgatggggttagcttatgatctactccctccattccataattcttgtctcaaatttgcccaaaaatggatgtatccattcctaaaaagcgtctagatgcatgtgatatttcgacaagaattatggaatggagggagtactatcatttgactgcttatgtctacttctgcgccgatcatgcccgttacattttacaaatgtcaccaagtacatgctgtgtagtacattccttctattttgtgcatgtataggtaaacttcagtgcctagagctgtttgtttaatgcctatgtttcgtgttttcatgcaaggacctatattttgtatttctttttggagcggaagagctatattttgtatttttgtgttgttttggcacaatagcgcatacatcgttttttgttggggtggggcctagttttataaccacctgtaaagtggtgagaagcaaggtcattgaataggcaatcttgcttattgtttgttccagctaggtaagatgaggttaaatcatgcttcttgaactatgtgaaatgttcgtatacacctaggttggatggcaattgctaaaataccacaagttgatgtgcaagatctacagggtacccaagttggtgagccaattgataaaacccctcagcagtaacttaatttaatcctttctcagtcacaaggacaaagaaaatgacccatctgacctgtggccggtgcgctccatttcatatacaatgcactctctctctctctcaatcaggggggaagtaaaaaaaaatggctgttttcacacgggatgttcggttcaactaggttagcaacaaaataccaaaatttggaagatcacacgcccacatgttcacctatttcatggcttctcatgaattcaacagaaatacatcaatcaactaagaactaacctaaaatttcagaactcgggttttgagaaccatagcacaaataagagggaaaagagacaagggaagaagctacctgaacattccacctggaaaagtgaaaagagggggcaagatgagcagacgcagcaccactgcttgttcagctttggcatgcatggacgaggccttgaagtggagaggtgcaatgatcatagtgagaaggagcagctacatgaggagggataggtgcaaagcccaggaagtggccttatctgttcggcatggtgggctctagttaacgtcatcttctttgatagcccatctcgcttctctcctgctcatctgcatccttgctctgctagatgggctagtggagaaggggtcgtccacgtgaatggccgacgcattgtcatttgttgtcgctcattgaatgacattgtgtccaatccattctatttcttcttctttccagcagatttacaattttggtataatcatcaccattttattttgtatgttgctggttataatccatgtctacatgacttccatctgtgtactttgtgttttggaaaaactccatgctggtgtctgcacaatgctgatatcagttcactcttttttcctttatagtttcggagctaatgttcctctgctgtgtttgttctgctagttagtgcagttatgatgtattcgtcaggtcggttgtttgcatagatggtatcattgatattttgctgaaccttgcattgtccaaaagcatcttcttatatcctcctctgttggcctgcaggtc

SEQ ID NO: 2020 - DNA, 4377 bp, Brachypodium distachyon
  Intron number 1 from transcript Bradi1g26810.2 (locus Brad i1g26810) derived from phytozome v7.0 (chr-ID Bd1; pos 218 81014 to 21885390)
ggccaccgtcaccggctacgccttcgtcgtacgtctctgactctctctactctacctgcctactacttcttgcccgatcgatgatccgagatcgtctattaactgcactactctaagctatcccctgcatatctgttctgcacttctgcgtgatgccgtgatcatctgtgtcacaaccccacgtgccggtcatacgcatccatctctcttctctccttcccttgatcatcactggcttattacaattattagcacagtgccgcgatgtgctcttactacgggcattaatggcgataatgacaatgtcagtagttaatgtgctagtggttactagtaaacgacgtggggtaggaggagaggacgttgcagctagatgcgcgtcagaaggcagggcattttcaatgctcgtgctagatgcccctgttgaccttcaggcttcaggatatacttcgtgttgctactctaccatttttgtgtaccggttaagtttcaccgctgtcacattcctttgatttcgtcagccggaatacttgagagcggtaatatacagtttactccgtagtagcctagtagcctagtacctgaataattacagcattttgttcctcggaaattaaacagtaaaatgatgtgtgtacttgtgtgaaacacatatagtcacggctgaccagtattttggttcttctctgaccgtccgccacaacacaaaacctggaaaagtggcattgctcagacgtagtgtctctattacttttccttttttttgagcgagaccttattgacctgtcatattttattgcttggagtagagagagggagagaagaaattgatgtttctcagataactcttataaacagcaaataatcttcctgctaacctaagtagctgaacaagcaacttcgtcgcccaaaaggtcatagttagttgatcgtagttgtttaaagagtgcctggttactagacggctgctaaaaattatgctacgcagaaactattttatagacgtacggtgaaaaattagtcgtgaaagcagacaaaagctagctgaacaaactgatctcgcgacctctcttgcctgatctcttctccgccgatacgatctggaatgggcggcacgtggatcgacgacgtcggacaggacctgtggctgcggctcgatcacctggagacgtacggcatgcatcttttcctgaaacgaattgaattcctttccgtgcctgccaacaagaaacagacgcgcgagtagttacgtccttcgccttggtgggagagatatatataggtgcgccagaacctgggcgaccaactgtactcatcagcaattgtctggtagctaggagtcgtcttgattagaaactcattcagaataagcaaagacctcaatgctgtgctgctcgtgtccgcacgtacggacttggcagtgctggatcgtcgtcacgccatggcaatagctggtccggccagcgtgagccagtgtcggaggccaagtcttgagttgatcaaagccaggaatgaggggagtagtacacgtcgtctcgttcggtctccgcaaggaaagtttttgaagcccaggtcaaagatttttttttttttagggaacgccatatcatggccaagtcaaggtcaaaagttacctctgaacgtttaatttggtgcttgaattagtcactactcacacctgcccttgtgttacctcggattagtatatttcggtaactgcaactctccgcagttactaccgctaggctgctagttatgctagcaacttgcataaacttatcactttcagatcccatacatataacatatagattcctacctgcttcctccgtttcataatttttatcagacatgtatctaatgtatctaacgctttttagaaatagatagattcatttttgacaattttgaaataagaattatgaaacggaggacttgcatggtcaatcaataatctccggatttaggtccgttattcttaggattttagtagtatcacacttgcataaactgtgtgataacgattttgtcggaccgtacgtctgcattacgtagtactcttaaaatctaaattagctggggcgtgggcacctgagtatcctactgctactagtacagtacggagtactccgtattattttttcctcagagggctctattgttcacacgtttgtgacgctagttctggatcttcacgggagagtacataaagggaacattccctgcagccggccggacgtgggtgagtctgcactctacagtaccagccgtaaaccgccggcaacgatcacggcgcaagtgtaaacagtggctccatgcatacaacagcacctacaccatcgtccagcgcatgcagtgatcataatactaggacatgcatgcatgcaaccggctcgtctgccggggtcgcacgctggcgcgttcatcaagacataaatcgttacgcgtccttgttggaaatcggtgtgtgcacggcaggaccacgatcggcgccggtcgttgtggtttctaaaactagaagtgttcaaagaagacgacacacatgaatgcatttatcatgactgcagtgcactttaaggccggcttgctggttggtgatgccttaactgacgctgtcgaccgtttcttacaaatttcgtttgcgtggtcggaaaaagcttttgcatggtagtacactttaagatcgcaaatcaatgtgtataccaacgtagtacctgccccgctttatcaagtcacgaacacgcgttcggcgtggcgcagcttcctgtggagatcagtgtgagaagtttttgcatggcaaagcagagattaagcgctgttgctgtcggggagagaagtccgggagttttttgtcctcttcgctgagtagttcgatgctacttgtaatcatgtttgtccattccattttctctagaagctccctccggcctgctgtcgcatccatgagaccatgacagcctgaggtctgttttggcaaatttgcctggccagacacacatgaatcatgtagtaattgcttaggccaggcattattaactacgatagcaaccaaaacagccccttggtggtcacgcgcgccaccggccaccatgctggcatggcatatcagcatggtcgatcggttgtactgtacgatgttgatggagcaaccaagcaacgtacgcagacgcaggggaaggcgagagtcgtgcacggtatgtgctccgtgatcacaagtcatcagccaacgcagaacttttatagaagcggtaaaataaagaagtttggcgtgccccaggaagtcggaatcttttgcgccccaaaagcttgaaagcttttgaacttgaagtagtctttctaatctccagttcgtgtagtactgactggagtaaaactgtaaaagcatccattagatatctctatctctatcgtgcttaattaattaattacagtacatcaatgaccatttcatggccactccgtacgctgcaagaaacacatgtgaatctttttccttttcagttctgagacgccacgtgagagatcttcagaagcatgtacgtttcgatcgagtgagacgatctatcggatcgtaccagcagcctctagttggtgtccagtccttttgctgccgcacgttctgtgcgtgcgcgtgggctgtttgaatggcaaaatgattgttctacatgaatcgtcaaggggtgggtgggacaccacacgtagaactatagaagcatgagcataaggccttcataacatgttgagattttcgttcaaagataattgttatgtacttttttgaacgggaagttagaactgaggaaaggtgtatggcgtggctcactttttatgatcctctggaaccataaatggtcaaaaagaagtgggcattcgactttctgactgcttggtcgtcgattcagcttttgcatcgagtatggttgtttacattgtcagccctttcactcgtcctcctcacaatttcgtcatcgcgtggtctttttttgcgcgtaagtttggtaggcgttcaagaccatactcagtgtatcctcatgggccggtcaccggtggggcctatttaagacacgcattttctattaaagaacttgtaaatattggagtaaaacatactttgccgccttgttgggccggccccctgaccaaagggctgtgcagagcatcccctatttgccgcaagcccgcgacaggcaatgatcgttctttctaaggctatcagtctcttttcatgtggtcgaaacgaccgaaatttcagtgaaattatgtacccaaattctcacattttcaaacctctcatgcaaacgcaatgcatgtgtcaactctgcactgtaattcactcgcacaaaaaaaaattgatcaacgtgtctcttgcagaccggc

SEQ ID NO: 2021 - DNA, 2212 bp, Brachypodium distachyon
  Intron number 2 from transcript Bradi1g41780.1 (locus Brad i1g41780) derived from phytozome v7.0 (chr-ID Bd1; pos 384 21615 to 38423826)
cacacaggtatccgtttctcacattggcagtaaaaaatttagagtccaccgatgtttttcgctctgctctcatggcgtgcacagttggtctcagatattgaagtatcttagaatcccagtggtgttaccgctagctctatcaaattgtccttgttgtcacttttaatgtttcatatgcctttatttatttatgtattttcatatgccttcttgatactactgcattattttgcttctgatacttgttgtattggacttttcaagttacaaggataactgtcataaactctattgatgaagttacaagataaaacttgaatttgatttcaatataaaataaaatacatctatggtatatataataaggtgcttatttatataaaattgaaatatctataagactactcgatgctgtcgagatctatttcatttgttctatcacttcttaattatgaacagtaatttcttgcctggaagagattccatatgtgccactcaaagctagctaagatgctcaaataccacaaaaaaaaatccggcttccaatatgccaccaattcacctcgaccgtctgttgaccgtcaagtggttgttgagaagacgactttgcccataaccttttgtggtcaatttctcctcttacgatgtgacaagcacattcggaatagtttcggcatgagcatagcacaaagttttagaataagtttcagcatgaaaatataacaaatgatataatttcagcatgagaatagcacaaaatttcagaataagtttcaacatgaaaatataacaaatgatataatttcagcctgagaatataacagtagcatatccccgtatcataatttatttattttagaataaaaagcagcaggatatacccaaattcagcataattaatataacaattgtcacaagaatatgctcacaagcattcaatcctactaacacaattcacaataacatcacagcaccatatttggtgttcaaaatatgccaatctaaactcagctatgttacgacacactgtgccctttgtcattgcaatttgttccaaatattctggttacatcataagggaaaaattgtcttctcaacagacacttgactgtcaactaacattcacctgatggtagcggtgaatttggcatatttgggaagctggattttttgagtggtataagcatctgagcaagttttgagtggcacacatggaatttcatctcttgcctgtgaatctgtgatctctttttggtgtagtacaaaaggcatggcaatgttaaaaaatagttaaaagggaaaatatcgaaggctaagttgctctgatacgtgatgattggtacagtatgattttttttttgcgggtattttggtgcagtacgatgatattgcatttcccagaataaggtacaatcacttaagtatgaatatgaatgttgaactcatttctttctccacacaccagtaccatggctactgtaaaaggtgcatttggtgagtaatttccttcttgaaaaagaaaataatgcaaatgatgttttaatcttctacattttctgaatcatctggcttatgttcttcctgtagcattcagattgaactacactaaaaaatcatgttcattcttccacacatcatggccaatgtaggagacgtacctattcacatctgaccgtcgaatttattgggaataatccaatctcatctctttgaaacaaggggtatttcctgttatctgtgagcttcaaacaattttgtcatctaatacaactacgatacgaattactatatgaattggctcatcaacctacacaaaaggaaagcataataagatagtacgacaaagatccccctagggtaattcctgattctagcgtcaagcaaataatgcacgtaagttacagatttgcatcttctaagaggttgaaatttcattcagaaggctcagacgtatgaattatctaacatggtgtaacatttacttaattatactgcagtgagcaacttttatcttcaatcatatataaagcctggttggtacaagggcatcatcacacctttttacggcactgtttgtacaaatggcacataagttcatatttgcatgtttgatgactttgatcattaatattaggacaaattatataatattgtctcatttgctataaatgatcagaattggctaactattgtttgtgatttgatgcagcaa

SEQ ID NO: 2022 - DNA, 8140 bp, Brachypodium distachyon
  Intron number 5 from transcript Bradi3g25620.1 (locus Brad i3g25620) derived from phytozome v7.0 (chr-ID Bd3; pos 259 67267 to 25975406)
ctgttgtacaacaggtttgaactataagcaaattttccttgtagtttctattctgaagaaatacatcgcatgtttagatattctttcccattctagctctagctttagtggggcagattattatgctgtggtggagctccagaagggggaagtggaatcggaggtgccctagctgagggcagcagggcggcaaggtccaagaggataagctacagccgcaggatgccttgggcatggaggtggtggctggaggcacgagcgcagcaaagctgcaggtgtggtagtggagaaagagagaaaagggagcagcttggctgctgcgaagtagttgagaaagagagctctggttaggcaattcgtggttgcagccggaggaggctaggaggtgaacgtgttgttggctgtctgctcaatatcggaggcttcggtggcagcagcagtagtgtgcgggtggccagaagaagaagaagcacaggattacctgcagaggtggaagcagccagcaggcccagacgaaggaggattctgcccaggcggagcgggaccctgcccaggtggaggagagagctgggtgaactctgttgtcatgggcatacatccctataggagcgcagccctaggtatccaaataagggactatatcccgttagtatctcctaaattagttaggcaagagataagataggaatattaagatatggtttgttagggaagtagagatatggattgttaggaaagtagagattagtttcttggatgtcaagtcgagtcttccctataaaaggccccccttaaatcgttatgaggcaagcaagaataaaccaatctagttatacctcctccctgcccttgaggtgcggctgcctttcatggcgccgtcgcgcctcttgggtccagggtcacctcgtaccaggttcatgacaatttggtatcagagcagtcgatctccaccacacctgataccacggagttatctccttccgcaaagtatgaagctacatgcgacaggattcaagctgcgttcgacgaactgcaagccccattcgcaaaggttgaagctacgctcaacagagtccaagcaatctgcaccaacatccgtgtgtgggtggagcaaaggaaagcagccacaacggcaaccatatccccaacagctgcagcgccgctgatctcgcctccatcgccattaccttcgctgccgctgccggcttcttcgttgctgcccctaggggcgacacaactaaagcaagcctggcttagtgcaacttgcggcagcagcgtgttgggcttgcagaacgccttagctattcatgacatgtggcttgcagcaagaagcaggggaagttcccattgcctgttgtgaggctgccatggattgcagataagtgattttctgctgagatttgagaagaggaagcagctgttggtttctagtgggattgtctacagcagcaactgtcggctgcttggattgctggagagattcggatggaactttggaggaagcacaagggagggagaagtgctttgtttcttctcttcttcttgagggtgactattgcagtgctacaattattggtgagaaaaattcaggtggaggaactttttctgagcagggaagaaagagaattgtgtttgttgtgtgcactgtccagacgttgtgttggtgcaggggtgtgagtgtttgtgattcgcatagtgcggatcgcaaggtacctgataaactatctcagttattcaaggcgaagaacacagacaatctagttttgacagtgagaggatcaaatgagctgctcaacatctcggccaaggagttcgaaaaattgaaagaaaagagaaatatgtggaaaattgagagaagtacaacaatgtttggtaacttcgtaaatcttccttttcttgacaaaggtacatcaaatcaagctcttacatctacacgtctctcgctcatattgggtactggattccggagggtctaaacatgttgcaggcacatcatgtgagtttgcaacatttagtccatacttgcccacacgtaaggaaactactcaaactgccaatgtaacttcacaacctgtagatgctatctgtcacattgtcatcggttctatatgctccatcatttaacgtttaatctagtatcaataagttcgttggtttgatcaaatggattgtcgagttagccttgatcgagaaaattgtgtaatcaaggataaagaaaacaaaaatgaagcttgggattagcatccgacataatgggttatggtacttggatagaagtggaactgataaagcattggccactgcttcagccgctaccacaagtgagcaactggctagggtgatactcctacactgctgattgggacatgtcttttgatacaatgagcaagatatgtcctgatgaaatgaaggtggagaaattcagacttgtatgctatgtttgcgagtatggaaggcacacaaggacgtcatatgtgtgtcgtgggctccgtatgttgagatatgtgtcaagtatgtgtaagagtagggctacagttggacttggaatttgtggagggttaggtgttggagtggaacacgtgtaacccggacctaatatataagactagtcatagtgggagtaccaaaggtggtaactaaagtgccaactaagcaattttggtgatgtgtcatgttattaatgaggaaagagagagttggggtaactagatatgttaccatcacatcacacttcccaagatacaatgagtctataaacctaataaatgaggcatctatgttaccacaaatatgttactacccactattaaagtagtaacatagactagtaacgtatgcatgttactagcttatgttactccccactatgaccagcctaaacgcaccgcggggtagcccaaaaaagaccatgacaacgtaatagcaataggctcgcagggggagccggcggcttgtgtcggcgcccaggatggccggtgttgcggtattatgggggaggagcgccggtagtcatgccccggagatgtaggcttcggctgaacctcgttaacaaatattgtgcctcggtgtcatccttgatcgtgcatccaccgaatttcgtaacaaagtagtacttcgccctttgtgttaattcactttgagatgtggacttctcgtggtctccgtaagtggaatgaagtatttcgtcacatccattgactgttactcctgtgtgccttggatatttctcatgaaacaaaagagcgaggtgcttaaatgtttcaaggacttgtatgcataaattgaaaatcatttagtagcagtattctagttatcaggacaaataatgggacatggtatgtgaacagtgaatttgataatttccttttagaaaaaggaataccacatcaaacttcttgtcatgatacatccccacagaatggagtagctgaaagtaagaaccgatatctcctagaggtagctcggtcacttatgtatactacaaaagttcctacctatggagtgaagcagttatgagcactacctatctcatcaatgggatgccatcaagggtagttgggatgaagactacttatgaaatattgttcaggaaaactgagtttgttgttccaccaaaggtgtttggatgtacatgctttgtcagggatcacaggccttcggggaaagttcgatccacatgccgtgaagtgtatcttcatagtgttctcaccgggacaaaaggactacaagtgttggagtgctagcgagagacgtacatttattagaatggatgtgaattctagggaatctgagctcttttatggagagaggccaaatttgagttctctgtttgactttgacactcctagcatcaacgatcttaatcgagaggggcagaatgaagtggcaagcccagcggaaggacagcaaccgagagtagtaatttacacagttccgtttccatgaatgaacatagatggagaagggtgaatgcggaggaaaatttaagggtctatacaaggagagagttgcaacgtgagctaaaaaatgaagaacgatggaaaaagccaagtgaagaagcaaatttaatggtgtatatgaggcgacaacaaactcgagcaacaggtgaggcacatgtacagtgggatccacaagatctaacaactattgaggttgttgacttgcctgatggtgagactagtgccacgccaacctcgtggtacgatggatctgcctattgccttgagggaacacgagttggggcaggaaaacctccaaataggtatggctttgagcccgatatagccaactacgtgtcataactctttgtcaccaaggtacaaagcttttatctcttcattgcaatttgtggtgattaccattttggaggaaatgaaagcatttgataagaataagacatggcacaatgtatctcttccagcgggaaaaaaaccggttagctacaagtgggtgtatagagtgaagcaaaatccaaaaggaaaagtgaaatcatataaagcaaggctggtggcaaggggttacagtcaaacatatgggattgactacgatgagacctttgctcgtgttgcaaacatgagtacagtaagaatctaatttcttgcgccactaattttggttggccattacataaactagatataaagaatacgttcttgcatggggatgttcatgagctttgtatggagattccacgtgacttctcgacgtcgagaaggttttcgagctccgcagcggtggcagcttcgcgaatatgccgacggttctccggtgatagcttgccctagttggaggtggtggctgcggtgcgtgggcttttggaagggggagagcgagagaagggtgcgagggttttataggggggtgcctggggctggggcgtggccgaggtggggtggtggttgccgttgggtgcgtgggggtcgtgtgcgcgtggtggttgggtcgtcggccgtgggttggggatctcaggcggggtccacgcgtcggagagaaagagaggggggaagaagggagtgagaagggatgggacggatctaggccgtaggatttgagatgaagggccaagattcgaagataccccttcaaggttttaagtgaaagagcattggccaggaatatgctttcccgcggggaaagcgtatttccaaaagaatggaaaagaatagaaaaggaaaggattgtaaaatacatgtctgggcctataaatcacccgaaatttaatttaaattatttaaatactaaatgtcctcgaaaaaattcaagaaaattttgtataatactctagttaaatactaaatgtcctcgataaagcaccataatgaaatgctaaaattttaatatgatcaaggtgatatgcatgggataaattgaaaaatgcaaaatgtgaatcttgatctcgagattcgggttggctagcaaaaggagggtagtccttcaagtattcttctcgttccaaggttgtttcctctttagtgtgatgactccattgaatcttacaaaacctgttagtatttgatctgggtgatccattcagtagtctcaagaatcttttttggtttgtcttcatatgttagatcttcattcaattggattgcttccaatggtattgtatctctgagaggtatctgtgactcagcgtgacacttcttcaactgtgacccatggaaaactttgtgcacactagacaatgcttcaggtaattccaactgatatgatacttctcctcatcttccaaaatcttataaggtccaacaaaacgaggtgctaactttgccttgattccaaatctctacactcctctaagaggtgaaactctcaagtaagcttggtcttctgtttcttaggtggccgccttacgcttagagtctgcatagctcttctgcctagattgagctaccttcagtctgtcctttattagcttgaccttttctcagcatcctggattaggtctggtgcaaacaattgcctttcgcccatctcatcccacatgagtggcgtcctaaatgtctttgcttgaagggcctcaaacggggacatctttgagctagcttggtaactgttgttgtaagaaactctgcatacggtagattatcatcccaactagacccatactccaaaaagcggtttacccactatgtttgaccatctggctgtactgaattctaaccttgttcctagggattcatgcaattgaccccaaaacttggatgtgaactgagttccacgatccgacattatatcctttggtacaccttgtaaacacacgatcacatatacatctttgcgaaatgggcactagtgtaggttgtcttgactggaataaagtgtgcgactttggaaagtcgatctaccactacccaaatgaagtcatacccggaacaggtccttggtagtccagtaatggaatccattccaatactaccccacgtccactccggtataggaaggggttgcaataaacatgctggtttctggtgttgttgtgccttgactcgctgacatataacgcacttcgcgatatactcagcaattcacgtttcatactaggccaccaaaatttctctttcaagtcaagacacatcttggtattcctagggtgcatgaagtatggcgagtcatgggctgaagtatcaacttcttgatcttacgatcctggggtacacaaatacgcttttcaaaccaaatggttccacattcatcttctgagaactccaatgattttccctcgctcatactttgtttgatttttccaacatttccatccttcttctgggattctcttatctgatccaaaagaaagggttttacttccagcgatgtgaggaatgctcttggtacagcttccatacttagtctcttaaactttagggtgtgcaaaaccgaaccgaaccgggctgaaccgaactgaagtttcggtttttctggttttttgtttcggttctagttttaatatttcgaaactgtttggctgtgttttttcggtttcatacacaaagattcggatccttaagggtctgggtcgcacatttattgtgcggatacctcttggaattagaatcacatggtcatccttacgggtctgggtcgccccaattattgtgcggatatctcttggaattagaatcacatgcttcctctgttcaggtatagaaggcctttttctaaaaacttgtatccaatactgggcgagcaatcagcgtcaaaatttcgttccaattttcatgaacgcgccagcgtagccttggaaagctctaaatctgctcctgtctaggggatttttcggcccgcgatctattggcatccctctaaaatcaccactccccgatcatcaaccgaggagatggaagagcatgcatcggcgtttttagatggaatagcatgcctctggtgatggattagatggagtactttgtatggatataacaattaatgtcaaatgttttcaattcccagttcaagcgatcgatacaacttcctgaggtggcgtggtattgggagtaaacgtccttgtacatctgaatcctgattgttttgttttttttgtttttttgaaaggggctctctatacccggacgtagagagttgatattatggggatgtgcatgaggaatattctttaatttaagctttgataacatgctttacattccattttatattctgtttcattgtgttgtttccctttcctagaactgagtcctggctgatttagttatcttgaacctggttagtttgtaggaacaccagtcagtttatggattaaactacagatctatttacaggtagataatttattgttctaactgaggtgcttgttttgtttcttgtaagtaaccaattatcttgttttatgaaaacttattaaacttctctaagtttgggtgaaaatggcctattgctactttcttgccaatccgggccactcaaataatatatttttccaagaaagagagaggtccaagaaatagtttcttggtcagtgatcacaagaccaactagtccagtctaggttcttgaatccctgtttggaagtacccctgtatcttggctattaataaaaaaagaaagaaacccatagtcccctaactcataatttgtcatttcagggtactctgccaatttattcaagccgaattgcagt

SEQ ID NO: 2023 - DNA, 2002 bp, Brachypodium distachyon
  Intron number 2 from transcript Bradi4g19110.1 (locus Brad i4g19110) derived from phytozome v7.0 (chr-ID Bd4; pos 217 28076 to 21730077 reverse strand)
acacagatcctccaggtcagtgggaccttgcaattctccatattgttagcttgctaggtcaaatcacactttcttattcagtcgttggtggtgaagggtatgatgtagtttgatggagtacaagctgtatatagagtccaacaagatctgtgaaattagaattgtttaccctgggtcttgtgaatgtgttctctagttttcagggagaagtctgtgaatgttctgttttatgactgcagaggtgctaatttgctcttagattttgttctcaatgcacaacgaattagctctgtcacttctgcacatgaggcagtcttagtgtaattgtacaagaaattggctctgtgttttgaagtcttccactgttacaatttaccaatgtcatcttagtggtgctgtggctgtggaggttctgaacagcgggttaatgcttcagtatgtgtactttgtagggagttcttaatgtaattattttgttgactccaattctcccatgattgcagggcccttttatgcatctgatgttactttgatgcaagataattttggaattttgattctttgagtttgtagtttctgttacggttttgattcgaattctccagtgacattgctaagccaattgggattgcaggaattgagaaatgcaggaataggaaaaacgcaggaatagaacgtcgcgagttgttgaatcctacaggaactgaaaataagataaattaataataggaactttttggcttttttgtactgatcgagtccatgccatgttatcatacacacaaaggaaaattcccaagagggctaagctcttgctcgaattcctatggaattggggtatatgaaatcaatacttggaattttgatggtttcattcatttgaaccaaatgacttgtacagaaaaattcctatggataaatcatagaaaatttcattgaaaatccttcaatccaaagaggaataatttaattttgatgctcctagaatgtaagagtagtgtgtaaagtttaactgggaaggctgtattgtagggactattcttggattcctatttagtttatatgagttatatccttgtattaatactttagtctagtgtaagataatataaagatatctaattgccaagattgatacaataattacaattttgcatcaactgtagccttaggagttggagtgggtttatacgagttatgtgcttgtactaatgcaagtctagtgtatgtcaatgttaatggcgtttataatgcacggacacgagtatgtcaatgttacacagcacgatatgcgggtgatgcacatcgaattaatgaatcgaagaactgaaagtcagaggaagcagtaaacacaccgctgtgccctgcatcgtgagagggaaagagaggatggtgctggtctgctagggttgaattgcctttttcctatcacttttgggctaggtcacatctaaggtgattgcttccgagctgactaaatgccagagatgaaaaaattagttcatttcttatgtaaattccgctgatgtttagtcagtacatgtctgtggcatatctgaggtgtatgaacatggaatattgtattaaactacagccagttgcccgactgaagtattgttgcttcattggctttttgcaaggaaaaaatgcaatggctatgagtttggactttggactttgtacatgtttgtcttatacatctcactgaacctggttcagaaaggttgtgctggtagcaaatattagtatttgtaatttatgttgtagtatacatgtcgtcaaaatgtgcttgtagcctaccccatctagttgatccattatcctgctggtacggttataatctctctgaccaatgttgaggtttgcctggccctatttttgcttttgtcttactgataaactgattatatgatgttttatgccttttcatgtatgctaatttgactaccgaccttttgctattttagcggggcaagtgatagagacggatacaacaaatatt

SEQ ID NO: 2024 - DNA, 4954 bp, Brachypodium distachyon
  Intron number 8 from transcript Bradi1g66760.1 (locus Brad i1g66760) derived from phytozome v7.0 (chr-ID Bd1; pos 655 50288 to 65555241 reverse strand)
cttgcatcaggtaattatcataccgatcatcttacagttcttttcttcatttggtgacagcagaggactttactttctgctatgacatgatatgtgtaggaccttttaactgtagtgctcaattgtactttatagagtaacttgacacattgttagtgaacttcttgcaagcatgctagtaaatcaagaatgtttgatgagtgtttcatatgcaccgcaacatggaacaggggcttgacccttcattctaaaaaaaaacccgcgtttgatgctagtgtattttgcacaatgtgtgcatgatgatattgaagtaacacatggaagtttttaatcttgtttcttgtatgcatatcctatgcaaatattttactttgaatgttccacacttcgactttgtcagacgctcgtccttttgtacacagtttggcactaagctgaatttctgatgatgtgcatgctgccacaaataaagtagtgattatcataacatggatgtgattcttactaattactcagaataggaaaccccttagcattttttaagcaatttcaatttgaaaggccaattgccacattaatgacgattatagtgtaatgcgtttgttatgtttcctcccatatagagctttgattaaacctgggcataccctgggccaggacaggtattggccgggcttcacaaagtgtgacagcaaaaccccaagcccgggcccgaccttttgggataaacaatgagttcttatacctatttttcgaaaagacaacatttttattcataccgagcttttttcgggcttcaggcaggaaactggagcccgagcccagctcaggacgccatgctttgggccgtgccacccatgcctaggtctagctttgatatagcaggatgttcggaacaactaactaaagctcctctgagaagactcgcccatcagataaacatccaacacctgaagcgcacagatttccaatcacatctaaggctagaacatgcaaactattttaaaagtttaggtgattggtaatcgaaagaacggtatagtttcctggataaaacttttgagctgattgggccaaactacaaaactaattgcttatatgcagaaacttgcatgcacaatgacaaaatttgtgaatttaaaagatgtgttctaatcaataactaaggcacgacacgttgggattgagaataaaatcattgttccgcatgaccacacgcacacatgcacaaaagaatttaatgataataattgaaaaaatttctagctttattcttggccaggatgtcatttcctatactaatacccacatctggtatattctattctaaattaattatcaaaataaatgaaccatcttatggggatgtaaagcttcagtgtccacgcacaaggaattttaaatgtcaacaaaacggatcaagactttaaatgatacatacagattttgaaataacaacgaggtatatcataactttgcaaggaggtaaggaaatattcctacaatacatgcacaaagggtcaacaaaagcaaacgcactaatgcagacgatatcatcaggaactgtccaatacatatatcacaccatggcgcctgcatagtgcgaactgcattttctccaattcagaacccttcggttttctataatcccttcaatcttcttgcaagatacattcatgcagagggcgtacatagtcttgaaccattttattagattccaattcgggaaaacactcagcgtggtaaaagcgcttactactacccttccattgaaagacggttaggaccaataagaaatgaaaaaacaaattgaaaactgaaagacatctttcatgatcaccaactacgtaggcgaagacttattcaattacattgtaaatgaaatcaaatatcatctacagtacacattcccaacaacaaaacatcactgtttttctgtctcattattctcagttacataataatattaagaaataagtaaatcgagtaacacttctactagaaacagcatctcagggaatgccgaatgcaaccacaagtttatcttagacacctcttgttggcttgatgatttgtataaagacatgtccgagggtcccacgtgtccacaaacgcattggtgctgcttgtactcgtaattcttgcgtagaaactttggtaatttctatacaactcaaacattacgaaatgttggatgcagatacataacatataaagtcaatcataaaactgaactaggaaggagtagcaccagttgctctttcctcagcttaagagttatgcatttggaatgtgtagcggtatctttggttgggtagaactacctctgacaaacaccatcgcaactgcagtatatcatgttattattgtacccatgatgtcctgttgttgagatggtgtctgttgaaggttgttccacccaacagaagatgtgacacatattctaaatgcataactcttgagccaagtgaaaagcaaatcgtgctccttacgtggtttcgttttattcttgctttcgtatgtgtgttattcacatcaaactttgaatatgtatataactagcctagtctctatgtaacaattgtgagtacaagtagcatcaatgctttgttcgtgaatacctggaccctcagacgtgtcaatgtacaaaccatcaacgtagcaaaaggtgtctatgagaaacttgtggttgtacttagtatttgctctgattcattatcttctctttgtgatggaactgtcacttgatttagtcatttcttaatcatattatgtaattgagaataatgagaagagaaaaggcagtaaaattttggtattgggaaagtgtaatgtaggagccaaggccttgactgacaaatggtagtttatttcatatacgatctaaattattaaataactttgcatatgcagctggtaataaaaaaaggagacatacgttcatgcagagggcataaaaagtcttcaaccatttaattgcaagacaataaattcatgcagagggcatacaccatcttgaaccattttattaaattccaatttaggaagacagtcactgtggtagaagtgcttaccctcatattaaaagatgagaaatacctaaaactggaagaagaaaaattgagaacggaaagacatctttcaacataaccaactacatatgcgaaagttatttaatattttaggtcataaatgaaatgaagtaccatttgttcttatctgcacccttgactcctatagtacacattcccaacaacaaaacatcactgtttttctctcattattctcagttacataataacatcaagaaataagtaaatcgagtaacacttccactagaaacagaggacaatgcatctcagggaatgccgaatgtaaccacaagtttattacaggcacctcttgttggcttgatgatttgtataaagacatgtctgaggatcccacatgtccacaaacaaagcattggtgctgcttgtactcgtaattcttgcgtagaaactccggtactttctatacaactccaacgttacgaaatgttagatgcagatacaaaacatataaaatcaataataataccgaactaggaaggattagcaccagttgctcttccctcagctcaagagttatgcatttggaatatgtagtggtatctttggttgggtagaaccaccactgacaaacagcatcgcaactgaagtatatcatgttaaaattgtatccatgatgttttgttgttgtgatggtgtgtgttgaaggttgttccactcaacagaagatctgatacatattctaagtgcataactcttaagctaagtgaagagcaacccgtgctccttacctggtttcgttttattcttgctttcgtatgtgcggtattcacatcaaacttcgaatatgtttgaattgtatagaactagcctagtctctatgtaaaaattgtgagtagaagtagcatcaatgctttgttcgtgaatacttagaccctcagacttgttaatgtagaaaccatcagcctaagaaaaggtgtctatgggaaacttgtggttgtacttagtatttcctcatattcattatcttctctttgtgatggaactattatttgattttattaattctcttatctaattgagaataatgagtagataagaagcagtaaaattttggtattggagatgtgtaatgtaggagtaaagggcttgactgacaaacgatctagaatattaaatatccttccggatatgtagttggtaattaggaaaggagatatacattcatgcagagggcatacaaagtcttcaaccatttaattgcaaagaaccatcaagctaacaaacagtgtgtataaaaaacttgtagctgtactaagcatttcctgagatgcattatttatttgggatggaactgttacttgatttagtcatttcttaattcccttatgaattgagaataatgagagaacaagccgtaaattttttgttttggaaatgtgtactctaggagtcaagggcttgactgacagatgatatttgattttatctactgtctgaaatattatataactttacacatatgtagtttgtaatcaggaaatttgtcttttaattttcaaaattctttacatttctaatttgtccttcccgtctttcaatgtacgtaagggtggttgtaagcgcttttaacacgccgagtgtcttctcgaatgggaccttaataaaatggttgaagactttgtacggcctcgcattaatgtatgtcttgttagaaaaatgaacaaaggaaaatatcaagggaacatgcaaaaccaaaagggagtgaaatggagaaaatgtactggatgtatgcaggtgttattgatttatgtattggacggttcctggtgatattttccgcattactgtctccctttggtgaccctttgttcatgtattgtaggaatatttcctctatctcc

SEQ ID NO: 2025 - DNA, 2681 bp, Brachypodium distachyon
  Intron number 2 from transcript Bradi3g27330.1 (locus Brad i3g27330) derived from phytozome v7.0 (chr-ID Bd3; pos 283 07297 to 28309977)
gaaggcgatcaaattcgagttcgcgccggtagatactatcgattaatagataaaactaaatatgaagaaggtctaaataaaaagagaaaaaataagttacgaaatgcagtgattcttcagtaattcttctttattcttctaattgactgcaattaaactcgaaaaaaaattctaaaaaaaagattgaaccgaataaaaatggatcatgatacgatcatgagacttcacaaatcgagattcgcctattctatatatctagaatatataaaggtataataaataaatacaaatcaaatatactattatcatatgataatagaatcaaatacgcagtatttacagaaaaaagtcttctataaaaaatatttattttgcaaactaaaaaatacaatagtcaatattcctcataatagatatacttaattatatcataacaatcttaagacatttttcgaatagatagaaatagttaatttgaattgagacacctattctatgacggatttaaacttacctttgattttcgtgcctttagtaggtttagtatttccggcaattgcaatggcttctttatttctttatgtgcagaaaaataagattgtctagtattttttagtgtaagtaagtgtaagtaatagaatatggtagggtatgtggctctttctacacacaaatgaaaaacggctatggatgcggatataggctacaagcataaatgcatgaatatgcggagccgggtatagctatttttattttaattgaatcaacgaatattttttgaatagaaagtcagtgtatctaacctattatttcacaagagtactagttgctgaaggcgatttcagaatcaaaaaaagtaaagtcaaaatcatttagcttattctctcaatttcaatcgactgctgctggatttagtatatctaatatgaattggcgatcagaacacatatgggtagaacttctaaaaggttctcgaaaaaggggtaattttttctgggcctctattctttttctaggttcactaggattcttatcagttggggtttccagttatcttggtaagaatatgatatctatacttccatctcaacaaattcttttttttccgcagggagtcgtgatgtctttctacggaatcgcgggcttattcattagctcctacttgtggtgtgctattttgtggaatgtaggtagtggttatgaccgattcgatagaaaagagggaatcgtgtgcatttttcgttggggatccctggaataaaacgtcgcgtcttccttcgattccttatgcgggatatccaatcaattagaattcaggttaaagagggtttttatcctcgtcgtatcctttatatggaaatccggggccagggggtcattcccttgactcgtactgatgataagttttttactccacgagaaattgaacaaaaagctgccgaattggcctatttcttgcgcgtaccaattgaagtattttgaatatccattgtattttttggaactgaatagaatgaagaagaattggaagaagaaaagttttctcaacatggggaggaagtccctccgaaatttgatttgttattgtattgtaaggggcttttttagtatttatctaaaggaaggaacaaacgaggataagataaaatttctttaaatttattttgcccaagtgggatatatggcatactattctttccattttcatctttttttctattccactccatctagatataagaaagaacccaatgcaatgaaattccactaatatacaatacaaaaaagaagaatagatacagggtctcaaaccttgctagagtttttgcttcaaagaaaaaaaatatcatcatagagtcagcgaatgaagcggattcattaacaactcaatttatagatcaaaaatgaaaaaaaagaaagcattgccttctttactatatcttgtatttatcgtacttttgccctggggggcctctttctcagttaacaaatgtctggaactttggattaagaattggtggaataccagacaatctgaaactctcttaactgatattcaagagaaaaggattctagaaagattcatagaattagaagaactttctctcttggacgagatgataaaagagaaaccaaagacacatgtacaaaaacctcctataggaatacacaaggaaataatacaattggtcaaaatagataatgaagatcatctccatatcattttgcatttctcgacaaatataatctgtttggctattctaagtagttcttttttttttggtaaagaggaacttgtcatttggaattcttgggttcaggaattcttccataacttaaatgactcaataaaagctttttttatccttttggttactgattttttgttggatttcactccacccggggttgggaactagtaattcgttgggtctacaacgatcttggatgggctcctaacgagctaatttttactatttttgtttgtagttttccagtaattctagatacatgtttgaaattttgggtctttttttgtttaaaccgtctatccccttcgcttgtagtcatttatcattcaattagtgaagcataaattcatttgatctcctgatattaatcaaattagcatctttctttctttagaaaaaggcccctttccattttagcaaaattctttc

SEQ ID NO: 2026 - DNA, 2964 bp, Brachypodium distachyon
  Intron number 15 from transcript Bradi2g38100.2 (locus Bra di2g38100) derived from phytozome v7.0 (chr-ID Bd2; pos 38 461645 to 38464608 reverse strand)
cagattgctaactggaggaggtgagcaggatctagataatagtaaactctccctgagattcagtgtttgatgatattatatgcaagccttctcacacttctgtatatgctcaacttagttgcaaataaagttcaacttcttttactacctggtcctcaggtcctatacagtatccataaatttgttactatcatattgcaacatctgcgtttggaaagattgataaaatgccacgtccttcatttcccttctgataaaatgccgcaaggtggccccagatcccacttgtcagtgacaggaggtgtcttatattttatcaaaggcaaactaatacgtggcactttatcgaatctcctgcctggtttctacaatctttaggactataatggtttgtgattgagctctgccacctttatgtgacaagactatcatttaccgtttctagttcctatatgacgacaattcagccctaaggtggcacaaatctggaaagctacaagttaggggaacctaaaaaacttagcacatgggtaatgttctggctttttacatcctctcgggttcagtaggatctgtaatgcattgagattgagttgtcttcccttgaatttgagctttctgtttgtgcctcatggcgccccactcgatggcttcagcaacagctcgttgacgatcaaatgtgctctcatctggcttaatgctatcagttaatgagtgatcttcaaccagtttgttttggggtacagtactagtcgtctcttcacagccagaaggcgcttctgctaggaaccccagtgcgacaacagcgtcactcatgtatggccgaacagagtcttcctcctctaggcacattgctgccacacccaccgcctggctcaaatctctttctgcgtattcacctctaagaagagggtctactagctcatggtacctcctcctatccctgatcatgggttttgcctgttgatcaaacatgaatttaacataactgtcagaaagaaatcttgtttcaaacattatctaatttggcattttatgttgggaagtatattctgcccgtgtattttggtgtaatcaagcacattgtaaagttgtaaataaaaggtgcatacccagttaatcaagatttgatcacgtcctggtctagcggaatcgacagctctttttcccgtgatcaactcaagtaggaaaaccccaaaactgtaaacatcagtcttgatagttagctggcctgtttttatgtattctggagcgcagtacccatatgtgcccatcacccgagttgagatgtgtgtcttttccccaacagggccgagctttgcgagcccaaagtctgagagtttagggttgtattcttcatcaagaaggatgttgggggacttgagatcacgatagatgaccggcgggttcgccttctcatggaggtattcgagccccttggcggttccgtgagcaatcttcatccttttatgccagctcagtggtatttggtcagaagtgagatctgcaattacaacagtaacagttcaactcataaattcccgttgcatctattaataattaaatgtgctgatgatggcagtgttagaaagtaatgctatactggtgtctgaatatctcgatttttaagctcaatataatgtgtgctgtaatccatatatgcttctcttaatttatgatcagcagaatctaggtttttatcatagattaatcttgatgttgttaaatgagcactggaacttccgaacttgaatgtgacggtgaagatggagactagcacttacccagcaggtggtctgcaagcgaaccaaggggcatgtactcgtacaccagtagcctttgttctccgtctgcgcaatagcctaccaagctgacgaggttcggatggtgcaagaggctaagcatcaagacttcaactaggaactctctgttgccttgaaatccattcaggtctagttgcttgacagctacaacctgatcatgcattaaaattaaagcagtgagcaaattgttaagtcagcaagattgtatcttaagaatgtttgtcattgagtctttgctgtatatacctggccattttcaagctggcccttgtagaccttgccaaagcccccttctccaataaggcagtcaaagcggaagttcttggtggctgttgctagctcacggaacgtgaatgcttttgcagctttggccgtggaagaactttcggcaggttcaccgtttgctcttaattcagatgattgctctttcgattctgcaaaggtgagtttcaacatttgttagtgagaattttgttttgtgatcacttggtggatctgaactttgacatagtctgctacaataggttgcagacatccatattacttttagatgccattctgatccatcatattatgttcagaatggaacatgcattatcatagtaacaaatttatagatactgtataggacctgaggagtaaaaaatagataatatagaatataatggctaggtatattctaatgcatgtgacactggtacaaaatagataatgtagaataaaatggctaggtatattctagttagaaaaaatatacacaaatattaaatatactaatgtggatgactgcaacaaatatagatgtgacaagggtgtcatttgtccttaaacagagctacagtgaacggtctgtatgtagaagcttaaagaatctactgactcaaccattgaacaattttagtggattattttcctacaaatgtccatctaataaaaagaagacaaggcattgagaatttctaatcatgtatcttatctgaagtattgtattttcgcttatgactggctgattatgtgtgttaacattgctgccaatcaaccttgttcaagctattcgtttaaatacctagagcagttataagagcattctttctgattcttaccagattcctggaggggtgctccggatcccattgaggtg

SEQ ID NO: 2027 - DNA, 998 bp, Brachypodium distachyon
  Intron number 13 from transcript Bradi3g37880.2 (locus Bra di3g37880) derived from phytozome v7.0 (chr-ID Bd3; pos 40 410252 to 40411249)
agatctagctcaatttggagtggaccctagtaaatgtaaaaaaataatcattttcctctgcagattacgaccagagttctcatttattttccctaaatggttttgttatatgtaggcagcatccttctagtttcttatttaaaaaatgcagaataaagtaacgaccttacagttgtatgtaacatgaacttcacctacagtcatcccaccatttacttgtgaaagtaaggttaggaagttcttatgtaaaatccgttttcttagcatagtatccccgtaaattatcaccataatatcccaaagaaaatttataatagaatttgggatggggtggatatagtacatactacatatttttagtttgaatagattttgaaccatgtccttgttatttttctaatttccgctgctcccacttgtttggtgattagtagatgatgggtgaagtgaatgcaaaatgcataattagttatttattactccctccaatcctaaattcttgtcgtggttttaattcaaatttgtactaaaaccacgacaagaatttaggatcggagggagtatatacgcatgtatgacagttacctcctttgaataatttttgcaagatttcaagaaacaccgttaccttgatgagcggggatggttatcatgtagcagttcctgtctatggttatgtgtagcttatgctggaagtgactcttgctcagaatatcggtgttatttcactggcagatgccaaacatccgtgatgcttgttcctgggcttttaaagtgattttgtagttgtaaattcagaattggagttagatctcccttgtccgaggtgttaaatctagttactttttggggatggatgaacttgagctttgaatacatatttctagtttttggaacataagtggtactggttcagatatccaccaaatttgcttctctaaaaactagttcttgttttttcagataaattcacagttgcttcattcctggacgctttg

SEQ ID NO: 2028 - DNA, 5413 bp, Brachypodium distachyon
  Intron number 4 from transcript Bradi3g12250.2 (locus Brad i3g12250) derived from phytozome v7.0 (chr-ID Bd3; pos 109 46741 to 10952153)
gttaacattaggttcactaccaccaacatttcaaggttagctctcttctgaagttttagttaccaatcttttgggctatttgtttcaaaagaaccgttattctctagaaaagtagcactcaccttccaaagagtcttttcagaatttcttcctagctgataagagtaggtactgaaaattaaaattctcagcttctcactgaaaaatatatttatgtacctctttctttttttctcaaacatgccgagcggcgtgtcttttccattaagaagaagggcgcaagaagcgcaagtacaggcaacaaaacaaaggaaaaggtcaaaaaacaaaacaaaagaaaagaaaagaaaagaagaagagaaagaaaaacgctaaacactatatttatgtacctctttctgctcccagatgtgaaaagacatagttgtcttgagaataataagcagttaagtgtgaaaagaatgctgccaagaaagagagaatgggaaacaagaaagggaaggcatggatggcctgtttggcctatcttgttgcgtgagtcccttgttgacttgccttattggcattatgcaaaacaagttcttttagttaataaacgtagtcagttgttacagtgtataatcctttaaatttttagtcctgtttttcatggtctggcttaagcttctgtagctctatgatgattcggggtcatcatttatcagttgaacccacacatataccaactctttggcttgagtgtttcatttaagggtataatctgaaatactgaagcttattttgaacacaaacagtcatgtgttccgctctcttgtggcaacaattaaatagctatgtacttctctgaaatatatctatttgccctagcttaatctgtatgctatatttgtgttagatttttggacttatacatgcaagacaagtgatgtcggttatttatacaagtctcttaacttatgtaccctaatatatacgaaacagtggtttaaggtctattttgaagcaggggtttagcttttcagattaaaatcgccaatatattgattatttaggcttgccataaatttatagaggcctaaaaattcctaatgttaagctcgcgtaaacaagcccacgataattcatcagccaaagatagtatcttaagtcagtacatttgtctttatgccatgtgatggctttatgccatgtgatggcatccatagaagtgacatgttacggcttgagttgggcattcaagtaggattcggagtgacatattagattgaggtgtcaccattcagtgttgagcctagctacactagcgtgtttttttgcttagccttaacagatggcacagacagttacaccctcccgtgttatgcacttttttgtccgaaagcgcatctgcgctcggtgtacaagtgtcggagcccgaaactcaggcaccggggataccgagcacccccgttttggttcagtggttggcgatgcggagttctccggcctcgccggcgtggttctaaacacgaagtgtagcacacggatttttaccaaggttcgggcaactcggaagcataataccttacgtcctgcttgtttgtattgttttgagtgtacgtgtgtttacaggttgccgggagctagaagtgggcttcccgggcttgccagttctctctaggacctaatctctaaggaggcgaatccactttcactgtggcttcggtcctccttttatagcttatgggataccacagtggcatggttacacggttgacacgaagcctaactacgtgttgacggggaggtgagttggcttggggctccacctcggtgtcctgcatgcagcccatggtagctgtacttgatgggactagacgggctgtcttggcttgccgccctagctttagctttgacagtgcatttaatgccaccgccgttactcaggctccccgcaccaccccgttgcttccaaggtggggttgctggggacgaggcgttgccgcggccagagtgttgccagtaagggtcttgacgaagatctgcataccaccgtggagactcagtacaaggtgaaggatggactccttctgaatgttgtagtcagcatggatcgccaggtgtgttgccggggcaacacacttatggtgttccggggagaaacctgactcgggcctgcaacaccgcggctgtttctgtgcgggaacccgttgagtcgacccacgccagcatcagtgggacccagaggccactggtgcgacaacatgagacgagtgtgcgctgcaagatccaactgttttttccagcccatgaaactgttacttgacctttttatcagcatacagttaacatgttctgtcaagcttcatgcactagccaacacaatgaaaagttcgatctaatggaaaggactaggcaatccacctatacactaaaacaccccccttgcgtgtggtgggaaagacaagacaacaagtgtaaactcagagatatgactcaacaggccaatacgtggagggagggggtaacaacattttttatttttttaagtaagacaaattgtgaaagccaggacttgaatttgagacctttggctctgataccatgtcaaccttcatgcactagtcaacgcaaccaaaagacttatctgatggaaaggactaggcaatccacttatacacttcaacatgttcaaacttatagttgaattataattcaaatgtaggcatatagtgcatacttcaaaacatttatattcttttaaaaacgaaaatttatcacccccggcctctgcctataaatattatgtaattttattacgaccacaaaacttgtgaccaaataaaaaactagggcgtaaactcccggctaatccaccctagctgcttggcgccacactccatctcttccttgttctgcaccgactgtaacaaactcataaccgcagcctgctgatacatgagagcaacacatgtataggtgactgcagttttttatggtcaaactgaatatcgttcggcataactgtatggaccaaacctgctgccgccccaactaaaattagagagcggaatgacttatgcacactttataaccaatacaacgaggcaggataatgttaaaagccaaatgaacagcacgccaaacaattcgtgtcatcgcattatcgaaaagtaaatgttgacgctttccggtttgaagcaaaagctgcaatgtgcaccccttgcacattcttttaaataaattatctttattgaggataataccctgcataggaatcacatgaacacttggattttcagttgtcattttagttttcattaatattttgatctaaaccaaataccgcatccattaaagccaaataccggtaacgtgtaaatccaccgataagaataccgatcctgtgatagttcaacatcagccactctattaactatcctgtgccaagcaacaagatggtagccacctcaatgagacgacagaggcatattttgaagttaaataacgtaggcatggtgctcaaagtgtggtcaccgagcctcttagcttcctagaatcactctgattcgccctctctgacttgaaaatagtcaaaccgaaagaaggattctttgacctgcattggacccttaaaaaattgagaatctataggtttaccaagaaagttgtttttgtcataagtacttgttttgcagaagcaattgccaaatcctgtctcgggagagtaatttaaatagccatttactcaataagcatttgttttgcacctttaaatcttggatactcagacagccttggcccttggagtacgcaaaatatcccattgggctattgccaaacaaaagtgatctataaaagtccaatctcttccagactcctttcggtatctccaagagtggcatcatgaaaatagccaggctactcaacacagagttaataagggccaaacgtctgccgtagtttttcttgacactactcaaggacttctcaaaatggtcttcaatatttttccaatctcagtagggagtttgtggtagtgtacttaaaagggaaggagcccaaactgcagctaaacagctgcatataaccagtttgtgtctcttagtcttcccaaaacaatacaagacaattttattaaggtgatcctcatactctcgaacatattgaaagtacgttctaaattcacagcttgtgccaagtcatgatccataaaaagtcattagcatattgtaaaatggggaagccatcatccgaattgcctgattctatgttatacacgctcgtaaatactcatactagactgtacgtctcatttgtaaaaaaaaacctcttttatgggcaagtatgatattttatatggctggtgtggcatagtggacaagctttttacttgcgggccaggataccattttgcttatttgtactcatatcaggatgcttgtctgcaccactttttctagctaatgtatggtactatacaagcaggtgcagtaacattagccattacatacaaaaaccatccacccctgctaactgagacaagttacgtacttacgttagaatttaggatcctgaaatacttttatggatgtacctttctttgttttatgctgtaattgataattgttagaggtattagattctgtagttgatgaggacattttgtgtctaaacaaaatatttaaaccggtcacagggtgagagagctcttctcccctggggcattaactgcagacatcaatgaattcagtactcattttaccgtcagattatggaaccaacaatccaaagtattctagcatacagccttttgtgaatagtagagtagttgttttctcagtaaaccattcctttgtcttatccattcagttatgcacctgtgataaatttctaaccacagtacaaaaccttcaaaatgcccctatttcatgaagaaaaggtgcaacagcgtgctgctccgttatgcttccttttagttattgaaggtccgtaacatctcaacggcaaccaaattgctctatgttcctatattttatatattttctgttccgttcgatttgaatggtatggaaatcaatctaaactgtctatgtgcgattaagccaaccccattacacacttgggcagtcacccctaatttgcaaggatgctacaagatcagaactcaaaacaagtagctgaatttttcactgcttgttatccaatccttgcatgataatctgattaccttgacttgcgtatcaccatcatcctaaaacccaatttctcattatttagacattttcagcatatttttttccaccttcgttcattatactaacgtatttgtgctacaatgttttatgccaatcagaatgcatgcaagcttataccatagattgttttatgtgcagaatagctgatattgtttttgcgtaaccacaatataggg

SEQ ID NO: 2029 - DNA, 314 bp, Brachypodium distachyon
  Intron number 21 from transcript Bradi2g61780.1 (locus Bra di2g61780) derived from phytozome v7.0 (chr-ID Bd2; pos 58 740926 to 58741239)
gtttcgttggtcaaaacaagtaagtgccacctactctgcaaaggcaaacatctagctattctgtatatttaacctacggatgtaaatttgtaaaacctcctctagtaaattggaaggatacgccaattttttatttgtttttgaagctttaacgtgaagttgcttctgctagttaatgggatttgtagcaatcttttttagtatgttgaccttattcagtattgctatgagcagggtttatattgatccgtagtgacatgacactataaaacttggtgatgtaggtgacaggtttaccacttccgggtcgctgg

SEQ ID NO: 2030 - DNA, 14867 bp, Brachypodium distachyon
  Intron number 2 from transcript Bradi5g13640.1 (locus Brad i5g13640) derived from phytozome v7.0 (chr-ID Bd5; pos 171 44197 to 17159063)
gcgggagcagcatcaagaagtggaacgtcatctacccggtgtacctcaactccaagaagactgtcgccgagggccgccgcatcgccgccgccaaggcttgcgccgacccaacctgcaacgagatcttggacagctgcacctacctcaagatcccttgcaaaattgaggtacccatatttgtccccttctttttgttgaaattttgcagttcgagaccgccagttcccttggttcttccttagatttttctaggtgttgttgtttggactgcttatggtgtatatgcagcaggataaggcgtatccgcgagatttcttccagagggggagggtgagggtgcagctccaaaatgaagacggatccccagtcaatcctgcaattagaacaagtatgtcctataactgctgattgatcctggaagctaccttgacttccatctatattcaccatgcactgcgaatagaggttacgattttattatgaattataccatccatactgtttcaagctataccaaatcctattagtgcagttactagagctgtcaggaataaatatatgatatgccaattacgtgatcgcttcgatgaaatatggattccacaaaaacctaatgatgatacttgtcatgggctattgttaaaatgcacccgtttaatttgttagaaggaactaaatttggtcccatgcaaatcttgtctcctttccaaggttccaccagatcagcgtttttgtggtaagttgagttgttgaatatccagatatttgtgcaccatatgcttgtcaagaaagagatgcatggtaggaggtgaagtgttacattttctgtttgattctcccttcatttagcgagcacagtattgtgaatacagatcaagttcttagtcatcataagtagcaaacgattagttccttaattaggtatgtactgctacctgacactgacagctcacatagatatggttatcttgacttgcttgcatatggtttgtggtggtttatcctattggctattgtatgcagataatgatgctgtgatagtatgattaagctatggatgttgtattctgtagttttgtactccctccgatccataataggtgtctcagatttagtacaaagttgtactatgtcagggagtacagtgcaatgtcatacttcagaacaagtgtagcacccaaaagatttcatgtatgccaatttaattttcagatttgcctgattaattagttctgctcctagtacacccaccaaacacatgatcaatcttttcccaaaataaagaatataatttcccagaatcagaaatctatgtggccaattcatctcaacaccctgatgcttatttccatttgatccaattaacaaataacaacatatgaccatattgagaaagtgaatcgtggataaaacggggcatagtaggtgacataggagtatgcaagacattattttgaactgaaatagataactatatcatattgtaacataatagtggtcgaacaaagttacttaccgatacatactactgcaccgatagagaactggagagttccaaaagactgacgttctccccatccatgtagtcttagtatggagacgacaaggctctgtaatctcataaacaaccatgtgaatattcaatacacaaagttgatgtttgcacccagctctcagggcttgaaccattatggtgcacggacatgaaaaaaattcgaaggttgtagcttgaccccttttgatgtgtacatgaattcttgtgaagccttgttccacataccatgttctttactctcatagaggagcccatcagtggcggagatccgtcacctccttttattgtataaaaaaccctcatccttctattgtcaaaaaataaaaaatccccatccccttctaatgcgatcaattaaatctactgcaaaagattgacatggtgatgatgtctgtcaccaaagttagaataaaattagacagtgccacttatatataatagtgatttcttagtagtctaatttgttttatccatagcaacgcatgggtatttagctagttaagtaaacagaagatatgtttggggaatggagatagaacaaaatgggtcaaggttgtcatggaatacatgaaccagttccttttcttcctcatttatgctccataaagttggttggaaaaacaatataatgggtccatcagatcattcaactcaattttccctgtccaactggacttctttttgctggtaacgagtcctagagcacaactgaataaagcaatgcataaataatggataagagaccatgcttgcaaatgatctaagggaagtgcttgatatgactccaaatctggcaccagataaagactagtataaggagaactgctgtagtcctggatcttgtatcaaatgttccctatttgcattattaagaaagcaagttttcatcttcacattgattttcaatattggcaacatagctggtaactcatggccccaactcagattgcaaggacaatttgtcacttggcatgacgaatgggtaacttatatcatttatcattatgggtaaatatcaccgggatatgataatgacatttttgttgatttttcttaattccaaatagaatgtgacgatccattatatagatgcgactcctcctaacgaatgaactagtctatcaaatccgtacgaataggcaccagctactaacttcctaagaatagcatcctttgagaacctcccctcgtgcattacagtgcgcatacatacttctccacctggatgttttgtggcatcaaaaatcttggggacaaattgcacatgttgcctcatttggaccacgtagttcgtgttgcgtcatattatttcatcttgttatagacagtagtatattgagttcagtaatttagtcatgatcacttatccttgatgctgtatggctaagttgatttatgttagctgcaacccagcaccattgtaatgatgttgtttatctgaaaatttggttcaattttgctcagtagagttagatgcatgatgattatgaatgttgagttcctttcctccaaattaagcttgtttttcaattttgctcagtatagagtagatgcatgatgattatgaatgttgaaatggctcctagaagcatgtgcatgcttctggaatgaacagcaattcataaagaagtacttcaaatgttcaggtcttctatgtgcttctaacttcccatcagagagaaggcttttttggagcccgagagaaaataaattcaatattctaaaaatgcataatgttgagcactatttgtttttgtgctggatgtaaaactagtcctatttccatgaacatttgtatatctagttgtttcagattttttttttgacgtttggattttttttccactttggagcacgtgctctgatgcaactttgaatctctcgatccacctggatgttgactcgactcctgtatcatgttgcatatctagatcttctgtgatctgtaacatttttcctgtgcctcactatcggtgtgcattactaggggaatattcatgttcctgtactttagcaacatatttctttaatgctgaagtttctgttactagggcataattcctagttctaatctttgtgttttatggctggcaattcttgaaatcttagtgtatattctcttgcatgccgttgcacatgttttgtcaatcccactgacgccgttccttctcgtcacagagaaacagttgatgatccaaatagcagagctggtacccaagcaccaagggagaactaagaagcaggaaccatcggctagttcgtcagctgccccgacttccaagtcaaaaggcgggaagaagaagaagtgatgaaagcagcatcttgtgttgtttttcttcttctgtttatagatttccatagaaaattccttgagggagttctgtgtctcctctgatgaatttttcggggttctgaattcctgatccatttggaccgtctttctggtggcctttgagaggttacaagcagccaagcaagagcgacctagtgttagtttgggactgcggtagtcaaagtttgcagatgctttcagtttagtgtcaccttggccttgcatacaaaatataatgtgaagtcccctgcccaggctatgacggcaccttcgcctggcggtgccctggcccgcagaggtcatagggcggcggagttcctgagcggaagcgagcaggcagcgaggagagacggaggtcgcgagcaggcggcatggagagagggaggtggaggcacatatcctagaggaggtcccgagcggcgggaagggtcaacgagcagagatggatgagggggagcgacgcgcgggcggtggcatggagattgggcggtgcgagagcaccagagaaggtgcaagatggcggcaggggtcgcggcgcgagatgagggtgacagattccggagcggcgttagggagaaaaactgcatccctctgctcgattggtttccagaggcggcaatgaggtggagcagggctcttcgaggcgtccgacaacggtgcggtgagtcgggaggggctgtgcggttgcgatggcactgctcaagcgggtggcggaggatggcagcggcggatagggttagcatgagcgccggaggagagcgagacaacgactggagagtttaggccggctccggtgccggacgacgaggttgggcagtggcgtgaaatttctagttcatggtagttctccttcttggcagtgcgttgatgtttttttttgggggtctcgtggattggaatacccatatttgggggtggtggcgcaaaatatgggtaactacccatgatttatgggtattcggtaaatgggtatgctgttggatagctttttgggcaaaatatccatattggtagtttttaggtattcacggtaaacatgagtagggtgttggaaatgctctaattaaggtcgactcctagcggctagtgtgcaaggtcgactttaagggttataaatagatggcgcgctcccaagatgttataaaataatcggttaataacaatagatccgactctactatctcctaaatataagaagttctaactttgttcaattcaaatttcttaaggtatgactaagtttgtaattttcttatcaacatctagaatcttaaagtatattatgaaaatatgtattatgatggattcatttaatgaaaccaatttagagttgtaaaatgttggtagattttcttatagacttgatcaaaatttaagtaaattgacttgtacgtagctagccttaccttgactatgaagagttgagcatttctggagtaaattactccgagacgacattcgcaagtttctgttactcaaattgtattcattgtacaagagtgaacaatagttccgacgacatcatgctgtcatgtatactagtgtatgcatcatccatttttaagtacaatgagagcaataaacacttgcagctactccctccgatccatattaattatcgaaatcttacatgtatcgacacgttttttagtcttagatacatttatatttatatttgggcaaattatggatcagagggagcatgacgtttgatgtttctgtagttaatgtgtaatcaaacatagccctgcgccctgctgcggcgtccggcggcaagaagcgtcgggggcgtcaggtcaccgctgcagctcgactccgggctgtacccctccctgatctattgcggcgcaccgttgttactcgtgctccagcccgagcttgctgtagagcccccaggcccggcggcgccaagcgccaccgagccggaccggctccggacgtgagccctcggagcaggagacgccatgcgggccttggcgcgcgcggactgcgtcgccgccatgtagctcgggacctcggcgcgcaccaccgggtagaggtccttgggtgggctgatcttgggtcttctgctcgggtctatctccaccgaaacgcctccttgggccggcggcccaatactgggcggcgtgcagggttccagcggccagtgccagcctgcagcgccgttgggtttgtcctgctcgtcgcacacagaaaagaaaagaaaaacgtcctctcaaaaatagaaaaaggaaaaaacgttggttggttcagctagcaggaattacagatatatagctagaacatggaaggaagcaaacgccggcacctggtacccaaatgctgtgtaggccggctccgtggtggctccggaccggatgacggcgtcccagcctcggtggaacgggctcgcattattatcgttgatgctgtttcttggtggtcgccgcaccacgtggtcgtccaagaagaggaggcggtgggtttgggttctgcggacgcgggcctgagcgcggacgagagcctgcatgcagcgcatggtgagatggacctggcgacgcacctggtggccgcgcaccagcgcctgcagccgcaccagaccgcgcagcgcgcgcagggctctcctcgcctgaaacacacaaacaaccaattgcacgcgcgcgtctccagatgttaatttcctggaacaagtctggtgctacgtacgtaccaagtagccccggtagaatgcctggatgcgcacggcggctcgctcctccctgccgcgcaaggccgcgatcctcgccaccctcgacgccatggcgcggcgcgccctcctggcttccgcctccacaccaccgtggtggaactccctccgcctcgtgacgacgacctcattcgttgttgcgtccggcgacgtgtcagcgggcgggaagtgctcgtcggacactatctccgccgcctcctgctcttcttcgcctcctcccgttccctgcttgaacgtataatcaacaaacgtctgtgactgtcaagatatataggaataattgaaagccggcctctcgacgcatgcaacaagggcggaccggaccttgttggagtagttcttgttggtagggcaggaggggctggtcttgaagaccttcctcacggtggccagccagccaccgcctccgggtttcttccccatgtatatgcgtgccggccggcgatggatcgcccggtcaagggaggagatggacgtgccgtacgtaccctttatgaggcggccgggagtaaagtggggcttgcacgcgagtgccccgtgaaggcgcggtgggtagatagctggatgcatgggtaccgtgcggaagtcacggggatcgcgctgtacgtacgtacatcgtcgatcggcgagggaggcctatagccgtactctgccttgacagccgcggctctcgcgacatcagccttgctacctcaaaacctttcaaaccgcggtcaaaatattgggttggtgacggtgatcacgcccgccaccaactccgtgccacgtgtttttatccccggtggcgggtcaaatcgcggccactgcagatcatagtgcatcaatggcgggcaaagtcgctgccaccgtcggttcctaacctgccattggagatgctttcggcaccttccgaaaggtgcgtagaggacatcaatggcggactcaacacccgtcactggtgatttccagtggcggtgactaaatatccgccattggtgatttccagtggtggtggtgcatcaccgccattgggttctgtaccagtggtggtggttaaacaccgccactgggttctggtacgtttttctactgaaaataaataaataaattatttaattattgaaatattcttgtagcacagtatagcagcaacatatatacacagtggccgtgtgtacccaccgccactgggcactaccagtggccgtgatgacgcaccggcactggtatgtaacagtggctgtcctttccacggccaccggtgcattttctgaagctccctacgaattaccagtgacggttgtgcgaaccgccactggtgctggttagcacccgtggcggtgattgtacccgccatcggtgctccttagcaccagtggcgcaggcttagtggcgggccgcgttaccgccacagctgctaagattttccggagcagtgatttatcacgccgctctatctaaaattttctatcctgctatggaaatgaatgtagctctttcttctagctctttgaaaaataagattcaactcatcgttgaagatcttccggcatttgaaaagagagggcctgatattattcaagatgtagttattacaaacacgccagatgctccaacagaccagaccagggcagtgatttccgtacgaaatggctcatgaatctgtttacgcaattccatggattagaaagttataatcacttgttgtactagatcaagtttaatatggattttactcttcaaaataatttgatgaacaacgcagcaaagcgcgcacaattggccagtgctactgctggtattttagattgacataaataggagtatacgtggcttacacaggagccaagctcgcttagcaaacgggctgacggtaccatctagaccaagcaaacaaatcaagcaccggacgaccgcggcttcacaaggtggcgcaaacatacgtttatttagtaccacaaccacaaacttatttggcaccggcacaaccacgcagacgatgatgtccttgatgatcctactaacatcttaataacagttacaaataacatacgtttattttgtatgtcagagacaagagtgaaggcctaggcctcctcgacgccgacttcaactcgtaccatatggggcccgtgtttccggaccatgtgccgatcagcagaagttcgtaccattgccgggacccaaacaagcgcatacatggtgagatcccaagcacgaactacatcgccctaacaagcgcacacatggtggttgaatattacttacttcacatgaatggttttgattgcctctctcgcgagatctggcgactccattggcgattctgagtcttcacccaccttcgcccatgatccctccgacgttgagctggatcatgaagattgggacggatcagaatcgcagtggaaagttcctcatctcaagatgcggcagcgaatcgatgtctctctggaagtttcggtaaaggagaaagcaacctctggaaaggggacttgagggttgcagcacgaggaagggtgaacggaggtgccatcctcgccgtccacgtgtggttcgcccccaccgtccgatcaacctttggaggcgagcggtagtgttttttggggagatccggtgacttcggaggcttcacctcttgattcgcttttccagcatctgtggacgcaggagccgccgcagcgacagtaccgaggcaggtggcttgtggatcaaaggcgggcgactgcaaatctgatctcagattggccacgggtggggagtggtggaggtgagttctctcggattttcagttcttccttctcgcaagttgcagcggcggcgatggcgcggagattcctgggtaggggtgagccttttgggcgtggatacggagatggccgaggtcgtggtttgggtggaggctggatgggctggcagaacgggcaggggagaggctggcagggtccaccgtactgggattactagggaggggagggcttcttcccgccgggagggccggagtatccaccgctgcctaatcagttccaggggcaggcgcaaggcccttaccagagtgggatgcctcctcgagttcagttccaagaacacatgcatcagggcaacttccaatagcagcaagctagcgggcagggggcaccgaagcaacctagtgcttcagggtctggtgatactggtgggggagcaaaagccagtgacagtgggaagtctgctagttcagttcaacagattgggcctaggaaattcatctgtcagaagtgtgatgtggaagggcacgtcagcaaagattgcaaggtggaagtggtttgtgagaactgtgtgaaggccagtcatgctaccaaataagtgtgtatggccttttcagatcaagccagtggctaagctagtggctaagctagttggatattcagctaaaggttcaggctcagaatgttaagaggggaggaggtggatctgctttgagttctctggcaattctggtggtggaaaagggggagttaattgctgatcaatcctctttaggtctagcagagacttatccttggaagtgggaatggcaagtgaaagatatgggcaatgggaggatgatggttaaattcccttcagctgctaaggtggaggaagcaagatgttaccaagcttttacccttcaagggactaatgcttttgtttctgtgaaaagatggtcttctgaagccatggctaagggcaagctccatactgtttgggtgagagcaggaggtgtccttgatgaacttaggcattactttgccgcaaaagtatctatctatgattggtgtggtcagtgaggtggatatgagcatttttcgaaagcatgatattgtaaggctgaaggtgggtgtgaaggatgttgatcttattccctcagtggctgagttaatagcggacttgatgttatttgatatcttctttgatcttgagcaagtggttgaagttggtggcttgtttgaatctagtttaacaaggggagaggataaagatggtgaggagaaagacaacaagaacactggggacaaaaatttgaagaggcacaaaaatgggggtggactcacggaaaagaatggcagtggaggtgctgcaggaaatgtgggacagagctcaggacaggggggacatcaaggggctataggtggagcttctgaccagctgtgtctgtttggggcagagagggaggcctttgagagattagttcagcttgaggtggacagtaaattgaatgctatcttgcaaataagggaggaggctgcaatgagagagaaactcttattggctaagtcgaatcaggttcaggtgcagaggagaggtgctttcacaggcaggtaggctgagatgggggctagtgagactgggaataacttttctgaatttcatggtgatggacatgctctgcagggaggcagtcaagatgataatgatgtggtctctgaggagatgtcctttgctactaaagtctagcgagtgcaaggtaccaagtagatgcttcaggaacttgacccaaaagatgtggaggatgttttgcttgatggatcagaagaaatgcctggtgagattgctgatgggaataacacagaggtgaactacaggaggagtgccaggctatagaatcaagggtaagctgatgcaaaggtggaagacagagccattcatcaagcaaaagtgaagaacctggagattccaaaaggtaatacttctgctgctactgttttatcctccacttatgctgatcttgtgttgactgagaaattaaatgttagattaggtagcaatgctaacgagccttatcagccctgaagtagtcgcttagggcctaaggccctgttaggttgggtttaaaactgtttttttttcttttggcttataagtcacaaaaacgcctatttaggtgtttttcctatttagatgattttgacttggtttttacttataccatcatctaaaaatattaagtaagatgtgaaaagtcaaaggtgaaagcatccaaatagatacttttgtggcagaaaaaccaaaagtcaaaaagcggttttaagcctaaccaaacaaggtctaagcgatgcgttttccgaccgatgagaacttttgcgcgcttaagtgatgcttttttgaaccatgttcatgttgtgaactaaactgttaaattactgcatttacagatgtactccatccgttaattattgtcttagattacggaacggagccacggagggaacttgtcgtggtggtgtcacggcagatgtcataggatggcttatgttgggaccgatggatgaaggagaaaccgtaggagggaggaggtgatgagaaacacgcacaaacacacgagcacacacagattttacctaggttcggagccctcttgtcgaggtaagactcctactcctgctttgttgtataagccgagacaccaatatctacaatggcgctccttgagcagtattcttgaggaagaagaagaaaaggaaggggaaaatcctagatgtctaagtgatggatccatctccagggatgggtagtgctcctatttatggaccgcccatgtcacactgacatgttggtcaagggctaacgttatcttctatgggccctgctgggcacgcgtcttggttccctccaggtggcaccgcaggggacaagacaactttacttttcatggcgtcctgcaacaagtactgctgccacctgccggcttctgtcactgattttctttcggtgcttctttgcgcagtcgcctggcaccgcaacgtaagcagcgactgctttcccgtgataaagataacgctgttttactatgcgccatgcgatgaggataagaccattgagacatcttggcactggccgagatcagagtattcgtccttatcctgcaatcacataagacaagatagatttgccggcatacacttagtatgccggcttagtattagttcggcttaaggcttccaacgtacatgcctgtgccggctttgccttcgtcacctcggctaatgtgtgtcgtcctgatcctacccggggtcatccccacgacataactatacctgggcatgggcagcccggcccgaaaatcccgagccgggctcgggccttgattttcagctcgacacagttttcgggccgggctcgggctttgatttgcagcccgaaaaaaacccggcccggcccggtatgacactagactcactagcggaaaaggcccagcctcaggaagcccagcaagccacagtgcccgtttcgtatacaacccagtaaatctcccgaaccggtgaaccctagattcaatcccccgtccctcccgctgagatccccttccctggcggcgcatccatggcccccttcctctcgtccgatggctcggcgccgccacagccggccccttcctcctccattcacgcgccaacaccaacgccagcctcccatcccctacttcgacagtgctgcgctggcgggcctcctgtactgaagcttgagggcgacgtcttccctaccgcatccgtgatatcttgacggtgtctcccgcctcaggtgctgactgctgaagatttgaagccatacgacgaagcccgcatctgtgctataatatagtctgtgccatctcgccggtaggaaactgagatgtatacccagatctgtaccttcgtgttctcctccattgcaaaatgtatactgttgctagtctgagatgtatattgacgctggcaaaaatctgtgattacttgagttctcttagccgagatcaagttattatgacatgtcgagtcggcgtgcttattcaaccctgagccgagattcctttctcctccatggccgacagtagaaaactcgcttctgccgacactggtgccacctgtcacttgtactctgtgctctgcttaagtaactggaagataagacccaaagtactgccggcgcgccttttgaggccagcgtgtcgtcccatcggacagtaaagccgacagaccattaagagaggaatatcggttcccacgcggatccttatcctgaaggatttgacgggatttactgcgccacgccgcgcagtaaccgagcgcgtgcgcgttaatggggttgattgcccccatgatcgtgcgcggcctttccgttggccacagggatcgtgggcgcggaagatccgcgccccattagtgcgctgcgggtataaatagagggagggggcgagggtgaaaacccttcgcactcccccaaccttctcgctctcctctgcttttctctgctcctcgcgcgctccgccattgctgctagctctgagctcttccgacgccgtgcttcctaactctcagcaaccgagctcgccaccgcatcttcgcgcgcgctagctcggttgtccgccgccgcttttcttgcccgttcaaggctttcgccaccgcctcttcgctgtaaaacctaaccctagatctattctccgagcgatggcctcttcgtcccgcgactattctgtacaatttttgtatctgatttagtatcatttttgtgcatgagtatgactattctgttgcaggttatgtcaatggccgggcttcgggccgggcctcgggctttcgggcttttggtcgggccgggttcaggcttaagttttaagaaaaaatcggacttgggcacggctcgggctttgtatttgaaggtcgggctttcacaagcccggaccaaaacccggctcggccccagacggctcaggtacaggagtaactgtgtcagcgagctcgtttacacctcctccctctctgccggtctgcctcgtcagtagtcggctactgtaccccctcggcccctccctccctctgccgagcgacccagtcccctcgctcctggatcttcttcctcttcggccgagcgccgccacccatcacgttgccgagcgcccatcgtcttcctcctcgcccgagcgcctccaccgcaagttgatctccccttcgattctctcgctcccgaccgtttctcctcccatcacaccacgaacggattccgccctttagctccccgtttcataatcttccacaatccgtaactgaggcaaaaatcaaggtagggcagccgcccttgccctactgggtcctccgcccatgtgcccgaccactacaagaactgcattaacctcgcgttctctgttctttctttgcttcttggaccaggatccgctccgcgcctgacccgattcacgcgaagatggacgtcggcggcagcgatggcgggagcagcatcaagaagtggaacgtcatctacccggtgtacctcaactccaa

SEQ ID NO: 2031 - DNA, 11534 bp, Brachypodium distachyon
  Intron number 1 from transcript Bradi2g12150.1 (locus Brad i2g12150) derived from phytozome v7.0 (chr-ID Bd2; pos 104 78937 to 10490470 reverse strand)
tagattccgttgcgtgtatcaatcatccattcaatgtgaaataaccatgttcttattccccaaatgagatttctttaaacggcactgtccatttcttgttcttggtaatcagcatcgatcattttggccatcgattttgtccgcttcacgcagagcatttggtactagtgcaaaactacaaacgtgcgaactaccttccgtcttgagcactgagtgatgggcaccgtgtccgtaggtgttgggccgtcgtttctgtgagcgccattacgcgacaacagtcgacaggtgatgccatgactgctcgtcttgaggaggagaagattttaatcacaccatgtgatcgatctggaggacggacgggtgtctggtgaagaaccaaccaccaggcaaggcgtcggtgtgcgcatccatcatcatcatccagcataaatatcagccgggatcatcgtgatcttgtgctcttgtcggcaatccaacggccaagcgcccactcgttgtgtgacaaagcataggagcattactttgagcgcagcctgcctaagtaaccactaactgaaaaaaatggttcacctaaagttgttgcgtggctccacctgccaggatcccgacccaacgtcatatcgtcctagtgccggcgatcgaaaggctgatgccgacttaaccggggttggtgttgtcgtgatggcgcgttgattccactgagctgtggccctggctccattctacctgccgttaccaaacccaacaacagcaaccttcgccatcgcttgcaattgcagctgtaggtgggtggtgagtgaggtaggtccatttctccggaaaaaagaaagaagaagagtgaggtaggtccatgaacaacaactcgacgacctcatcactttaactgccatcgctcgtcgtcgtcgtcagtgcattttgttctgcccggaagtgcagacatatcggtattgttcaggcatggtagatcgtctactccttgtccattcctcggggaaatgaatttctagctccctcgtggtgctcgcgtattattattttttttcaggcgaaggcgatggatggatgtcagcacggtcctacgttgcgtcaaagggtaccatttttgtacgcttaaatgatttgccaaacaaaaaaaatctgtatgaactgctacctccgtccaacaataagggacgtattagttttcttttgaccaatgctttgaccataaattactttattaatatataattatataacatagattcatttccgttatattcctactaagtatatttgcttatggttatcatttcgatcacattagtcacatattcatgaagtaatttgtggtcaaaggcttgttcaaccgaatcctaatgtgccccgtatttttggacggagggagtactccgtaagaagtagcaaaagaagtcgtatactgatataagatcatgatagaaacacatattttgtcttgaattgccataagatacaacttgatcgtctggtaacagcggctcctaagctttctaattttttttaggggtaagacgggtcgattcccatcattcaactggatgaaatgtactgtacaaaggacccctgagtcaatggagcatgccggagtcctaccaaggataggcaatttcgagggccggcaaatcctcctgtttcgtttcttcaagatgccccaccaagcgtaaatgacctgcccactaacgcttctattttccttctcagggagccctagaaggagctcccaatgctcggaatgacctaagtccattgctgaataagccctttcacctccttggtgaagctacaatccatactgaggtggaggatggtctccgagtggatctgcaaaggttgtgggcccaaccctggatggtcaaattgtccgtggtgaggattttgccatgggccactgaaggattctaaaaaatgcaacgccactcttattatttgacatacacttcaagcagggccaggccggcaaaatccgtggccctatgccaaatttgaaaatgggccctatctcacaaaaagaaattaaaccgatttaaacccgaatgcccaatttatatgataacgtaggtattgattcttgaaatactaggcacatcatcaatctaattgggtattaatagagaattgggaaaaaaattagtgattaggcaaacaacggaacttagctcgtgtcctcatcaaactgctacggcactgctctagaatgaaaagacctggggaccgatccttgctgatgtacagagtacaagcactgtatactagtttttctttagtaggaaaaaaagtttatcaaaacctatcaacatgagatctagtttcgacgatcaacgcgagaaacacaaagggctcgagcgatgctattgacttgatcatgcatgtgtgtcccaaattggtttgtaattcaaacgcaccattataaagttattttagttcaacattcagatctttgaataattgtacatgcaacgaaatcaccatgcaaaagtaagaaacgcagtgaaatccctacatgttgcacttgcacattggacaacccttcccaaaggcgagccttttctcacgaacacatacgcctaggcaggtaggcctgtctaacatcttttcaccaagtcagatgcttttataaaaacaaagtgctgatcgattacatgcttttataacagaaactcgagactttaggccctccagattttggggccctgtgcggccgcactcccgtcggcccggccttgacttcaagaatgagcagtaaagacttgatgtatttatttgtttatctatttaatttggacatttgtactcaaagttgtattaaattaacaacacttaattatgaatcggaggaagtattttacattgaatgtttccttttgcaactttgtacatccatgttgcaccgctagaacctgccacccaaaatcactcaaaattgcattgttacctacacatgttttgaagaattcatcgtggtgctgtctgcctgtccaaatcaaacgtttttggatttagtttttagcataaatccttacttgtttcttgctcttttcctgctctattgacatgaggtctttctccttgtcgaaattttctcactacaaatactcctttcgtcacgtattaaatgacgaaatattacatgtatctagacgtattttggatatagatacatatgtatttaagcaaatttgagataattagtatgtgacctaggagtaaaaaaaatgaactagcagtagaatgtttcttaattcaattcattgattgtgaccactttttgtttattaggggaactgtactgagcactttttgtttattaggggaactgatgccagatgctgttaagggtaggcacgaaagctttgactacatcctgcagcgcgtgctgccaagtgccaaccagcaacctctagtacaaagaaagatccttgtacctggacaggtcagggcgacgacgttgaccaaatgatggtcgacacgaatttaagaaacaagggagctcaacggtccggaatggaagaagggaagtgcaagctgaactgtctcgggtcagaatcgagctgaagtgaagtactgaactaacatacgtgcaaagatccatgagcaggtcgtttggctctctccaggcgtgggtgcaaattccacaaccatttctctgttccacctttccggtgaagttgggacacgtgtgtactttcgagaaaagaagaagaagttggagtaagctgcggcggatggctgagcctgacggtacgcaccaaaagccggtcaaataaggcttgccgtgtgaagaatcggcccacgcagtttggcgataactgccagtgccggtgccagggactttggcccagagtggatcgggtttccggacattcggcgcgtaactgacaagcgcctagtctgtacaccaaattcatggagttaaattttacagcaaaactataagctgactgccattacacacacaatataaactgtttttgcgttcagatccgtaagcttagccgcggagccaagccttaacggtccataaatagtctagtcaactaaagaaaatggtaaacccgggaagacaattttctacgtcacgtgctaaaatttctatgggatgaccaggaccgttttgataatggacactagaataatgcatcaagtgatacaccctccgtaagtgagatatacatacagggagctcagatagtacatctctggcaaatcaagaatcccttgtccctcttttcaagcaccaatgcacaacactgccacaactgcatgcacaaagctttatatttagttctccctccggtcggaattacttgtcgaaatattacatgcatctagacgctttttaaacatacatatttgggcaatttgagaatatgggtcggagggagtattgattatagaaattgatcggttttctttacataaaaggatgcgcttgcagactacaatcaggtcccttttcatggttctccgtggcacatcgctggcaatcttcaaatcctctggcactatgatcatttagactacaactggatgaaggctaaagcggctatacagtgcgagcacacgattccaggtgcgttactatcatcgctcgatgcttcaataggcttcattagcttgaaacctcaatttcctgatcatatgttcactcactgttcaactggtctacgacggaatcgattggcaatgatcccaatggtgctgatgactccaaacgctcaagcatgtcgtattcaaagggatcatcctcgctcacatcaggtgattgctcaaactgattcacttgggggttacctgtttcatcttcagactcatcttccatgtatccagcatttacaacttcagggctattgcccacaagcaaagctggaaatgaatgctccacagcctgagatgtgatactgaactcctccaccctggcgagaagcgcgtcaggtgtaagtgcatcggcttcattgtcatctagcgacaatgctatggatgactcaattgcacgcttccatagtttaaacatcctgggtctcaatacttctcttattgccacattatcgctggcatcagtggattcatctgcatcaaaaaacaagtcgtcttcttatgtttcgtcaaaaagttaacttgttatgtccagccagagagtacaaagctctttaaaagaggtcagaggctggagaaagcgatcttattgaagtgcataaacaaggaacagtgttatccacataacacttgacacctgagagtgtaaaatgtaaagttgaataaacagcatgatgtgaacaaaaactgcaaactgtaaataaaaataaacgtgcaatattcaaaaagaaataagcattaatttttaaatcagtgagaccaagattgcatcgtttccagtcgatcttgtactgattgaaacagaattgtcttaaaatttactggaccttgtgtataataatcaatgtgaactcaaagatacacacctgagctactcgcaaaagatgaaactgacaaatcactcttttgaacttttggaatgagagtcagaggcttcgagtatctggatttccattctttgcctctgtagattaatatctgctcattgtcgaatgacaaaagaatacaaggaacaagatcctgtgtatttagaaccataactttagtctaggggacaagaaagcatatgaaggataaacttcaatcctctaaaatggcacggaaacaaagaaatgtgtggggggataaataccctcaactttgctccgatctttttgtaatcgcttggttctaaaccctcgcagttaatcttcaccagatcatttccctcaaaagcatcccgaacatcttttacaagattgagatatattccattttttgctgcaagattaaggtattagaaatgcatctatttattcacatgtcctcttcaatatggagtaagaagcacataatatctagtctaatttatgtaccagaaatttctgtaaataaaaatatgtaccctttaacataattctgagagaggtaaatacaaattatagcactagtaacatttctataatctgatgtgttcggtataagatcttgcaaacaaatgcaaagtgaaagccaaatacagaaccatgggctagaaaagcacttaacaattacctctgactaatgagatttagtgaaccttttaaaataatgcattaaatggtttttgtagaaggttcaggttccacactgaaagcaaccacttaaccagaataaatcatgaaccgttttgtgtgtttctgaccagaattgatacctattgtcactatttcaagcaaagtatgtgcacagcgcgctggtgtttatccacttttgtttagataatgggagctttattatctctggcttctgcatcatatatgcacacagctttgtccctagtgtttatacactaagaaacatgtaatatttaaaaacacaggaaaaaaacagaaaactaagagtcggttaatttcaaaagaagccagattccaggattgatcccagttcaactgttcaaggaacctgaacaatggcgcagaatacaaatccgcatccagacccataagatcatacctaatttaaaaattggcaataaattctgccctctgattctcatttcagcagcttcctctattgtaagcccttctggagctagctggatgagttttggatagacaggagtggctggtttccaaagcatgagtggataacgaggacgagtgcgtgggttgtaatttcttccacgatataagaaaacaacaccccctactcggtgaatgacctttccacctgatttttcctgaaaaagcagatgatatgtacttgtatgtctgagagcgcaccctaataaagccacgatgcttgtgctgggaaaaaaaaatgcaagcatgcatagatgatgatagtagtcttattccatgagctgctaagaaacacaaaggcctaacagcaaacatataaacaacttctcctgatgaatttagtcataactggtgatgaattctatgtcggaagataccacgagagtggcactaacacatgcacatgagtgcagctgaattcttatataagtaaagatgcatacctcaaggtgataacaaaggtttttcatatcaacagtcggtactcctcggcatcttactttgcagatttcctggcgcctccaatggcaatgtatcatttccaacatgttgtgggtcaaaccatccctccctacagtaaattaatcagaaaaatgcattattagctctagacttcaacaaagttcagctctgcagaacagcagaagcttatcaaggaaaacgtcaagttgcgctattctcaaagtgtcctaatgttgtctcaatacctcgatctgttgaaatgaaacctatcagcggttgccagagcaagttattttctttaattatgtcaagtaccaccatgggcggatctagggggaggggggggggggtgccatggcaccccctaaaattttgcaaaaaactcataccatgttatatttgtacattaatatagcaaattagctgcccatagcctcaaaatgctttctagccaaagttttcatgactttgaaaataataccgatgtagttgacgataaaattgtacctttatgtactactattttgatgttatgtgatctaaacaatcaaaggtggcacccccagcgttagcatcctagatccgccactgagtaccacctaggtctgccctcgatctgcagtatttcagggcagcttttctatccaatttgttacccagattccaatctgaataaaaaacttgattcttaatgtgcaagcaacagtactagaactttgtcactcttcggtgtggcattttagaaaatgctacttcattgcaaatgaaatgtggcctcaagacatacatgtcagtgaaataagaaatgacaattcctaaaatgtcattctccagagtgtaaaactatatgaatcgcctggctctattccaaactcagtgttcaagaagtgaagtaggatcatatggtggacttcgtatcctagatctggtagacctggcatggtagtttttttcgagaaaccggcaggagccctgcctattcattatggcatggcagttatgctgctgcaagaagagtgacttcgaattaaaaattggctaggatctttagaaataacttcagagtatgcatgctattttttttaatggtgggttcattgtaacaaaactactagctactcaatccaacactgagaaaacagcaaatcttccagctttcaacgatctttcggcatcaccctgttagttactttgaatttcataaaattaagaccaacagcaaagagtattattaatgcatgcatgatatgagaatctagcatgcatatataattctccttaagatttgatgtcactttaatctgaagtctgaactaatagcagaaggatattaaatttctgttgttgttcttgaaaactgcagcgtagtagctaattaccaatgttcagttgccggttatgggacatgtgaggcttgacaagcgcgcgcacctccgcgggggtgagcggttcccctagaacctcctctcgcctcctgccgtcgccggggctgaccctgcccaggtccagctgcctcctccccctcacctccatcatgatcccgtgagggctcaccgtttgcggcgactcctggccgagcggcgtgtgcagccgcacgcccttccgccgcgccttctcctccttggtcagcagaggcgccttccccgtccacggccgcggcatggtcggcggcgcgaagggcaggaacgggggctcccggatggccagcggcgctgcacggggcgcctcggagtagctgaactggaagtcgaagggcgctccggggagacggaaggtgacaccggaagggccgacgacgacggagcgcccggcggcggcgtcggtggggttcgctgcgaggagggcctcgcccttgccggccgggggcacgggcttgcggtaggcggtgcggaggtggggtgagcggaaggcggggttggtgtccctggctcttggagccggcattggtggctcttgttctcgcgaaggttgctgtgggtggctcttggggtggcggcggcggcgaggggggaggggagggagagggagagggagggagcggttcttggggttgtggcggttagggaggggagcgggaggagaggagaagaggttggtgcggccaagacgggaggggaatgggcgctgcggcggcggcgccatggcgggaagtggttgcgcggtggcggaggcagaacggaaggagataacgaatagattttcaggaacactggatttttcgtttttctatctatggtggcgcatatttccgctggtcatcgtcgattttgtctgccgtccgatttgaactcaacgtgcgtgctttttcttcgaaatccttcgtctggctttatctttttccaccccctactgcatcacccgccaaaacgtcctcactgaagagctaccactatccgtcctgcagtagtgtagctgcccttcgcaactccagcggcgcgacccatttcggccggagcggttcggacggaccaaataacggtccagcggacgactcatttccgtccattttggctggacggtacatttcgatacatcgagacgcatttccaatcttccccccactgcccatctcggacgccctggccatggcggacgaaattattggcgccactcttcccgcgaccggccccctaccctcccctgccaccagtggtctagccccagctcccggccctgcccccgctcaggagaatctcaagaagccgaagaaagagatgtccccggaggcgaggggcatggagtcccagaagaaggggcaacggcggatgcatagcaaagcccggaggcgagctttgttcaagcccaggaggaagatgatacaagatcgagatgcgacctagcaggatcgagatgcggcatcgtcctctagttgatcgccctcatttggtgccaaagctaggtttttttaatgaactatacttgtctgctagtgaggcctaaacattgatatgttaatttgcttgctaatttggccatcgattggactcaattgttgccggtggcaaataaacaggggatcgacccacgaacagagaggaggcatttgaattcgggcgttaaatatgggtcgcccaaaatgggtcgcaacactagaaaggtgggcgatccaaacggatgaagaccgggcacggaagagatttgcgttcggcccgcgacccaaacggacacaaaacgtggtccgtttgggtcgcgttgttggagttgccctcatggggagtacatttgggcatgggtcgtccggtacaaccggaccggggtccatggttgtgcttcagttttcagttcaaacttgcgatctccttggaacctagccactcctctgagcaaatacctttgccgcaaccgaagccagcgtcatgacctccgagttcggcggcagcatccacaccaccgcatcacatccatgggcatctagccccatcctactaccatttgggtccaccgggcagatacaatcgtgcaaagccggccgcgcaccaccccaagtcgatccctcgtcgccacatcggtgctgattcagcgacaacaagtgtggcagagtggccgcggcctcctgcgagaagatggagagcagcggtagcatctgcgcgagcctgaacgcctcgccatacacgtggccgccagggaccccataaagtctctggcctctagccccgtcctcgccttcttcaacggacgaccgttcacacaccatctctccttccccttccccttccccttccgtcagatcctctcaaatctggtgccccacaagagcacctcgattcaggcccccgggcaatgcccgacggcgccctccggtggcagcaagcagggggttgcggtggctaatggtgagtgagggaggtggcattatatccgtagctgaatcctggatcttgctcttctatttgtgtgaatcaacgaggcgaccttattttttaaaaataacatacacaataaatgtgagacaggggatctcacgtgaagtaaatttcacatgccacgattttggggcagtcgtgttgctacgaaaaccgtttgcaaaaccacaccttttgagtcaagtagtatcagttagcctggaactggctgtttaagccgttttacttgaatccttacatgtggggcccacctatcggatgccacgtcggccttgaaaacttgcgggaatgaaaaagatgtcaggggtttaatcgtgggctatcgggtgggcggacgtggcatccgacgggtgggtccgacctgtaagaaataaagcaaaaccacaaaacagttttgcaaacagtttccgttcactgtgtttcagtgacacaactgcccaaaaactgcagttttcttaaatttaccctctcacatgagagctgccctatatgctgcactccatcgtcctcgagaagctaaccggccgaggaaggaacagaataaccattgtgt

SEQ ID NO: 2032 - DNA, 1289 bp, Brachypodium distachyon
  Intron number 2 from transcript Bradi2g36320.1 (locus Brad i2g36320) derived from phytozome v7.0 (chr-ID Bd2; pos 366 84056 to 36685344)
tcggccaggcttgcgggatctgcgtcggcaccccggtgaggatccgcgggcgcggggtgacggtgggcaatgttgtcagcctgtcagggtcgactcttctctgaaccgcatcgacgccgtcgtcgaggtatgcttatcctcttcagcaacagttcctccatttctagaggcaaaccaaatctgtcatgtaagtttgcttttgtgacgtgtaaaaacggtatgtaagaatagacacaaactactagcgataatgctgctttagtctgcactctgaagctatgattagtagttcttgacagcttaacacacgaatgacatcatgataattccatccaattggatctacagaccatagtcttcaacatgctggcacctggaaacttagttatatatatatatatatatatatatatatatatatatatatatatatatgatccgcttcccacaccctcagttggtccactcgatccagattgcagcaaagaaggactaattctcgtcgacagagagagggtgaaagggcatgaagggtaagcttggatgccctggttggaatatgtacccgtctggcgagaggtatgcaggaaataggtgttgataaaggctataaattggttgaaaaggttgtacatgtaatggagaaagcacgacctcttatttcaaaggtatataccatttcttgtatgctctttttaacattcatgatctgtcactgaaccattgttttttactccctccaatccataataagtgtcattgattactaaaccagcgacacttataatggatcggagggagtacttattaagattttttaatatatgtattagttttttttttcctggcaactttctagatctcgacagagcaaactgtatttatatgttgagtataagtttgtgtggtatgcaaacagattctgcaatcttttaattgcttctgaatcacacaccgggagtggcaaaaggcaagaaaatcacggcctacttttaagacttttatgatagtttctgccgagatgagattgatcagccttctaaagttaacacataaaatatgttcacattagtggattagctgatttacatcttggaaccgcaagaattttaaatgctccaaacatgcaccttttaccttacctctgtttattgaacataaagtggagattctgttgttgttcaacacttgttctgcagttaaccatcacatttcagaatgttaaataatacctatggaacatattgaaggtttatctgaagaaattcaaccttcgctatcttaggtcc

SEQ ID NO: 2033 - DNA, 6451 bp, Brachypodium distachyon
  Intron number 1 from transcript Bradi5g05090.1 (locus Brad i5g05090) derived from phytozome v7.0 (chr-ID Bd5; pos 649 7070 to 6503520)
aactgaagcagtattctctgtaagttttctgcactaatatgtgcttttcaatcattacatttctcgcatagatagaaaattatctgatcattcatctgcaacagttttctcttcagtattgtttagaaactatttatcagtaatatgcagaaaacagtcataatgctgtctgataatatttgttttagtttggaactggtgtgaactattcaagtatcgaggcactgaaatctaaaacagacagtggaaatacccttttgttagatgattagatcgccttatgtcttgggttctcagcctccattttgttagatctgtgtattgttcttctatttaatagagtttatttagttttgagtgctatacattgcagttttgcttgtatgattttgcagttggcacttggccattttgattttctgattaggccgaattggcttaagtaaaaaagaagaatgctctttgagacattttgaaattagagacaagggagcatcaaatgtggagcaaaatgttttttctacaggatcaaaatcagcaaaattgtacaaaacctacataaaattgatagcacaaaattaaaattggaaactattgtagtagtgggaacgtaaaacttgatatttgcaactcattaggttgaaagtgcatatgtctgtatgcatatgatttactaaatgtgtaacagatatgtgtgtatccatctgctcttcctggtttgctaaagatcaaagtcaaaattgcgaatcttaatattatgtaacttaccacataccaaatattcaaccgataggtcatcttacaagttacagtatctacacaatcatctaacaaaaaatttcaatcattcgagatttcacagatgcttaggtttcttaactaaaggaactacctagtaaagaattgaagagtactgaaaaattagaactaaattatctgatgaaaaaactagggggaaaagaagactacacactttgatttcaggttgaaatatgagatacttaaacttctgcaaatatgaacatcgaaatggaacctttttttcatgcctaaattctactattccaatcaattatcaaaagagtaattgtataccacatgcatatcataacaatattgaaatagtgaaaggtaaattgtagtttaggcgagcaccctgctgtgttaacatgtcatgatatgggtcgagtgctcgatgttctgaactggatgataactagcgaagcaaattcgtgatagcaagtccaacaacaaaatcaaatgagaaggcttttggaattgaactcaaatcaacttatgctcttgatgaaaccgtagccagtccaatggtcgatggaattccccaatcctcacaaaggaagaaagtagcatcaaagatgtacttagggttcatcagcatgaatggtggccttgggtcttggaggaggagcaaagccgaactaaacatcataatagttataaccgtaactagagcagggatggggtatgtatagtcctaaagttagataaacaagatgtggcctagcttaaccgtccgtggatggggcttttgaccgaatgtgagatggctaaggcatgcatggcgggtcggaggcaatttggttggcagtatcgaccattccagcttcctactcagtgtagctttggtagtactaaccatcatcatgctggaggtactgaaggggaacggaggcttcggtcttctcgggctccagtcagtactcagtagtaccgaccatcatcgtgtcggaggtatgggtaccgattggagctgttgagctttcttggcgatgagtgctgctccagtggtcctgacatagatttggtctgtcggtcagtgttttcaactgggatctgcaacttgtgccccttgttcttccttgtatctatgcacacatatcgtccatgaattaggtagcacactatccttggttgtaaagagagaacaacgattagattgacctcttgttgtattgcctttgctttgcgagtacccttaggcctaatcatggtgtcccttgagccaagtggcgtgacagtgccttgccgtagcctcactgcagtgatagattcttgctttaggattatcagcatcttctcttatatggggtgctagaatgcgaaatatcaaacttcataaaaggaaatatgtatgataacaatgaaccgaaaggaaatatgtaatatgaaaccaattatcataatatctaaattgtgaattaatgttgccaccatatactctggtgtgctaccactgtggcctaatcgggtctccgtgtgcgtgcaatagcttctccgtacccgtagacaacctgtcctcagactacaacggttgttaagacttatttggtaaatcaaagatgtcgagttcaggttgcgttagagatcaacagacattagtattcctttggctcttgggggcaactctgtacatacttcagcatggctcttgtcgaggagtgctttgacggcacctaaagagaagtgattatattgcaagcctttgttgacagttgtttgttccatgttgtcattgtcacaatatcggctagaagatcgatagaacattcaagttatttgtcttgataaagcgagtctgtagagcaattgagcgctgatagccagacgaggaggcgacaagatgagcacatgcgcagggaacgatctgcttatgttgatctgcaggctgcagctatccttgtggcgttgtttttgtgatgtgggctgtggccaacgggctactgtcccaatccccaggctgcagctaggattgttgtttattcgaccaattttagttgcaagtttgaggcttaagttgggcttcagctgggcctgggagggcgaaattacttggcctagttgtgtctaacgacctacttactagttactaaccactatggattaacgacaaactgtttggatctcaagcacggctagcacaaaggatgtgcgatggtgttggaaccaccattacatgaagggtattgcctactactgctagaggtggtccctcgtatagcttgatcaagtcaacattgaaaacatttgtaaatacgagcatcagtggtatttccaggttgtaagccaccttattaatttcagtgctgatgcgagagggtcgccctggaaggcaacttcttgatggtggaaatatgaaggggaagccacacctagtcatccactttaaccttcatgtcgcatcatgacgcttgtcatcttagtactgcttcatgtgtagatgtgcatgaacgttggagataaacgactgtgtgatgtaccgtgcttctggggcagaccacctaagccatgcacgacccatagcagcatatgacctgcgggtgctgtccatagatgatcttcagtgtggcgtcttctttaatgccgagtggaggaatatatcgtagcaaaactcaaggcagccaacacatctatgtcaaggacgatcacgagtcatactgtgcaagtacgtggcagtggttttgttaaccaccttagagtggtcatctaatgagggatgaaaaggacatctaattgggatacaaagttgagctcatatcgagctaagtgttgcacatcgaacatgtcctttcggaagtttgatgtgaatatgggattatggtgaatgcagagatttcctgaaggcgcacaatatcaacaaagaaagcgtgtaccacggtaattgccggatatgtatgtgccaagcgatggtgcccgtacttggagaagcaatccacttcttcaagatgatgggacttgccaccaaccatggggaggccctcgacgaagtgtatggagatgcctgcccacgtgctcaagggagcctccaagaagcgtcgcaggctggcaatattcattttgtaggtctcgttgcgttacgaaattgtgcatgcccgcacaaattcctcgacaacaatgtggtcctcgaggatctggaagtcatgatgtaggctgtggatgatcttttggatacatttgtggccgtgccgtgagtcgtggtgagcaacatgggcaagaagtggagtctacatgcatgtatgtgcgcatggccatcaatgaatgcccatggcattgttagctcgcccaccatgatgcgtgcaatctacgtggccaggtcgatgcccctgtctatgctcctcaagggtgtttactcaaggggtagatataatgaatagaaccctccgctcgacatcacaatcacaggggatcggccacgacgttcgagtgccccagatttttattcacttaaaaaaattgaacataaaagacttgcttgcctattgatcatgggaaattgtttatggtggagacgctgatcaagttggaacttggaagcatagtgattggcgaggaataataggtgcgaccgaattagccaaaatagaactcgtgcatggcttaggtggtctgcccaagaagcatacatcaaactgtcatttcgccgttgcttgaaaggtagcaggtgtatttgtcaggctgaacgacataaccaagaactctaagcagcccttggtgtaacgatgtcttctcgacacaggtggattcaggcagacttggtcaagcctagattgctgaagaatttggcagtctttcagctcatcaagcagttcctcaaccacatgaaccgggaactttctttgactatcttctcgtcaagtgcgcggtaatccatgcctattgactcttacacatcttgctttttaacaagcaatacgggggtggagaatgttgacttcttgcacgtatcaacttgtggccaacaaatggagcatcgtgagaatcttgtggcagcagtttgttgactcatccaacaggctaccgtacgttagctcaatttaggtcctgtacttaagccatgtgaaggtgggcgagcggaagcgaggagtcataccatgccacaccaactggtggtcgctgcattgtaatgatttggtgagctagtgtttttttttttttttttgaaactatgtagtgcgctagttgaactcccatatgatgggactcaacgtacccaactatttggatccactaagcgggatgttgtagaagtcgacgacgggttcttcgtccctgttgttgtggactgctggctctgataccaaacttgtatgtggcgtggatagtgcgttagaagatcgtagtgttctctgatgggagattatggcttatagccatggagccctagaccttgggtccatgcaaggagagacatgcagatggttggttttctttctttctttgttgagatatactgcaaaggattacatagcaggcttacacattatattgggaaataaccaacttaaggatcaacagatcaagcaattaatcttatctctaagagatcaatcaaatccaaacatactaaataagtcaatttactctagtaagtcattgtgttagagccatagcccctcttggtttgtgcgcttcctcgggccatacgtgcaactccatatatatggtataagccacctattgtgtgactaaaggtagcattgctgggcaatcattgaaggtgggccgatagtactgaaacgtaaaagaaagacattgtttcaaatgaattatgaaagatagtggtcaaaatggaatttctgagaataattatatactaaaacctggttaatgctgctcccatatgcactgttttactgttgtcggggcatggttggcgccgtatgtgcacagcacatggtatcgcagttggcaatacctaaaaagaggcaatgtctgggctgggcctcagaattctaatttttatctgcccttttccctgttaatagtaggtgtaggttttgaattgtactcttttctgttcattgaggttagtcattatcgtaatgtgctgttttcttatagtaatgtcctaaacttgggtgtatttttaccatctttattatggagatgcagtaatgtgctgttttcttatagtagtcctaaacttgggtgtatttttaccatctttattatggtgatgcagttcatatttcatttttagttttacatgatgatgatgattgattgtgttagtatctattttagtgttttggggttgctacaactgaagattgcaatgttgtctgttcaattttgaagttgcatacttgggatgacattattatccttttaggcatgtagtcttatgttgttattaaaaacaagtgtcagtatgatatttggaaaagaaaagaatcaattattgagacaagttatttattatgcattttcttgagattcgtgaaattgactgaataaagggctgctgaaggattaaatcgttgtttgcatgcccttgctctgctttatgtgatgtacaatatatgtaaggttatgttttctgatcttttgggtctgaattggtaaagaacttagcttgcgaagcctaattagttgccgacattctttgaatctgtcaggagcccgtgcttgcgagccaggatctgcaaaatat

SEQ ID NO: 2034 - DNA, 8021 bp, Brachypodium distachyon
  Intron number 1 from transcript Bradi1g05760.1 (locus Brad i1g05760) derived from phytozome v7.0 (chr-ID Bd1; pos 390 4577 to 3912597)
attacccaacaggtaaaaagagcttttgtttcctctcatagagatagaggtaggcaaaagagggattttcgccgtttgtggatcactcggataaacgcagcaacgcggatatttaaagtattcgatagttatagtaaattaatacacaacctatataagaagaaattgattcttaaccgtaaaatgcttgcacaagtcgctgtatcaaatccaaataacctttacacgatttccaagaaaatcaagatcatcaattaaaaggataaataaagtaatatactggaataataaaaaccgaattcccggagaggggactccgggaagacacaataatttaagattaagtggtaggaatcaacgagctggattactttctttataatatatataggcctggccctttcgaataaaacatcaacaatcggaacttaagttccgattgttgtttcttaaattttggttatagtttcttacgtttcgattggaactgtacttttgcgttaattgaggaatatgtctattttttctgggtctagaacctgtaattattgaaattgactgggcttgaaattgcttttcgttctcatagttacgaaatggtaagaaagataaaatacgagcctgttttatagcaagagtaattaatcgttgttgtttcaaggttaatcgatttattcgtctcgataatatttttccctgttcactaataaatcgattaatcaaactcatgtttctataatcaattcgatctcccgggccaatccgaggacgcctacgaaaaggttgtttggatttacgaaaagtttgcttggatttacgaaagggttgcttggatttattaaaagtttgcttggatttacgaaagggttgcttagatttaagaaaaggttgtttagatgtatacatgatttattccttatttaaaattttaaaattaataaaagaaatgaaattctttattttattaatttaggatcgagaagaagtagtctttctttgatccatatcttaatcttatttgattcatattcttaatcttatttgattcatattatagtatatgaataccctctagacatatgaaataatatctacctaaaataatatgagttgatttttattttgtattgtatctatgttttatttatatattaaataaaataggaagttcttactctttctgttctttggaaagatcgaacacacgatcttcctatttctttatttcgtgatgagtcgtgtgcttgcgacaataacgacaaaattttttgaattctaattgtccgggtgtattgtggcgattcttttcagtactatatctagaaattcccgtcgattcctcattggcaccttttcgaacacaactgatgcattccaaaataactctgattctaacatctttccccttggccatgaacctccttttctttttggttggattgacttaacttaattcttctacttatttattcttttattcttctattttgaatccgaagaagaagaataaaatccattagaatataatttttttgaaattcttaaattaagtaataaaaatagagaaataattaaagaatacaatccttgtcgaattagcaaagattttgtttcgaaatcctttcatttaattagtcagccgggccttttctatgctctgatttctttggatatcgcttttaattgaatttccgttttccaaaatgggatttaccaaaatttttcatgactctgaggttcagcccaatccagcatttcgttctttttccttccgggatcctccagttggaaatgataacagaatgcataagtcattagaaggaattctaataaacaaatggatatagtataccacctaacgattttgtttcccctatgaggtaaaaagaaaattaatcaataaacctgctaaagcagcaaaccatagagtacttagcacaggtgctacagagagatatgtttttatatacgttttgcccacaaaagcccgtgctcgattatttcgagcacaggcttcttcggtaaagaggaatcagacgattcaagtggagttttttgtaacgtatcaataagatagagccatgctacgggttgtttcaggccctaaataaacgcggacgcttaaaaaatctgtcgaacaggcggattcgcatctcttgcaacccacacaatcttcggttcttggcgcggaagcaatttgcttggctttacatccatcccagggtatcatttctaatacatctgttggacaagctcgtacacattgagtgcatcctatacatgtatcataaatttttacagaatgtgacattggatctataaatttttcttttcaacataaattttttccgatctggtaaattagtactgtatgagtcatatgtattgtagacaccagacgaagcaatggtttgtccaaacttcaaaaaaaaatctattttttaatctgtttgtgagaaagcgtgaaaagagccaagagacttaaattttggacttcaacaatcataattatacgaatttagaattcgccaataaattggctaccgtcttttcaatataaattattgcaatattcaaattgcaatatcaatgaattagaaaaattcatttaagtaaaaaagaatactatgcaataacctactaaaaaaaggatattctcaaataataataagaaaatcgtattcgatttctattcatcttacatattagagattattattatatgtactcctttgtttagagtattctatgtctaattattcaagaaattagattgattgatacaagttgatttcctattacgatggatggaagaaagaatggatagtccaatagcggcttcagcagccgcaagggctataacaaaaattgcgaaaatgtctccttttaattggcgactatcaaatagatcagaaaatgttacgagattcagtataagttcaagacatattagagctctaaccatgtttcggcttgtgatcaatccatagataccaatcgaaaataaatagacactcaaaaaaagtacatgctcaaacatcattaacgaactccttatcaatctcgattcatttcaatatgaggacaagaattgaatcgattcaattaattacaataaaacaattacacaagaaaagagaaaagaaggtatttgttggcagtagatggattttactaaatcaaaattgagattctttagttattttttttagatttgtaattcttataatttttactctttctaagttttcttattgccgagccatagtaatagcacctattaaagaaactagaagaattatggaaatgagttcaaacggaagataaaaatcggttgctaaatgaatcccaatttattgaacattatttatgagaccctgctctactatttggttggatcttgtagtccaaagaattccataccatgatgtatctgggatagtagtcattcgtgaaaaaacaatagttatacaaacgagtgaagtgaacccatctccaatagtccaataattcttatctttagaccattctgaaccatttacgaacattacagcgaatatgatcaagacatttatggctcctacataaataagaagttgtgcgacagctacaaagtaggaattcaataaaaaatagaataaggatatacaaacaagaactaatcccagcgaaaaggcagaataaatggggttggtaagtaatactagtcctagaccccctagtagaagaacaaatcccaaaaatagcacaagaatctcgtgtattggtccgggtaaatccattatggataaaaataaattaatagtataaattttttcatgaattgactaaaactaaaggattcaagggaggaaaaagggattaggatatttttttgtgtataagctgtatagttagaaattctatcacgaaaatctagtatgatttaaaataagaaataatttgcaataaaataagcggtagttattagcttttctttatagttagtaaagaattgttcgatttttataacaaaaaagaaaaaatcctagtttagtaatcagtaatcgttcttgaatttgaagataaatcttcgtctatttgactttcagccgaatttcgaattgtttgaattgtgtaatcccccattatggagattggtaaccggcttaaagcaatttgattataattcaattcatgccgatcataagtagatagttcatattcttccgtcattgataaacagcttgttggacagtactcaacacaattaccacaaaatatacaaactccgaaatcaatactataattaagcaattgtttccttttaacagccttttcaaatctccaatccacaatggggagatctatcggacatacgcgaacacaaacttcacaagcaatacatttatcaaattcaaagtggattcgtccccgaaaacgctccggtgtaattgatttttcgtaagggtagtgaatcgttataggtaaacgatttgtgtgggataaggtagttatgaaactttgaccaatgtaccttgtagcacgtattgtttgttggccataactcatgaacccagttaccatagggaacatattctaaatatctatgaaaaaggtatgtttctttctcttgtttgagagagcttttgtgttgaaaatattcttactgttattctattatcttatttagagtgaaacaagttgggaagaggttgttaataagagattacccagggaaataggtaaaagaaatttccatccaagatttaataactgatcgattctcatcctgggtaaagtccatcttattgtgatagaaatgaagagaaataaataagctttagttaatgtaataaagatacccattgtcatttctaaaatcccaactgcccaactgctttattcatttggaaaaaatcaaaaaaggatatatagggaatagataaatcccacccgcctaagtagagataaagaggaaactaataaatttaggtaagaaacaagataaaataaaccatattttataccggaatatttggtttgataacctgctactaattcttcttctgcttctggtaaatcaaagggtaatctttcacattctgccaaagaagaaattagaaaaaccagaaaacctataggctggcgccaaatattccacccaaaaaaaccatatttggactgtgcttcaactatatcaactgtacttgaactgttagataatcatagtcgatgataacatcacagttcccaccgctattccaaaaccgtacatgaaaccttagcttcatacggcttctctatgatcagaaaaagggaagggctgtttcctttcggtatgagcctctggggcgtggatagaattattttctaggcaaaataaaatcgattggaaagccctaaattagaccaaagaaattctgtctgctagaataagagcgcttccgaatggactaatggaagtttaacccctaaggaagcgctttatgaggcttctcgtaatttgattgatttatttcttccttttctacacgcagaggaagagggaactggtttcgaagaggaagaattctgtatgaatatggatagagtcaaaaaagattgactaatcgaaagaaaaacaaaaaaggaattccattgaattttatttttattgatcaattagaattgccttctagaacgtataattatctcaaaagggccaatatacatacactattggaccttttgagtaagactgaagaagatcttatgagaattgacagttttcgtatggaagatggaaaacagatatgggacactctagagaagcatctcccagttgatttacttaagaataagctctcgttttaaatccattgcaatttttggctcttcttctttttcgagttaggataaaaagaaaaaaacaagtttgcatcttcaggagaatctatattttcgcgaaatggatcataataaaatggattttaggtatctagggaaaattcacttcgaagtaactatttcctagatacctatgcacggtacttcacggttgaatgaatcaacctgaaaaatacctaaaaaaggcctaaagttaaggatttatcaatgggtaatgttgctccaatacctaaccaaagagctactgcagtaccgattaaaaaaacggtcgtagctaccgggcgacgaaatggattttggaatttgttgacattctctagaaaaggtactgtcaataagcctgttggcacagaaaccattaagagaacgcccaataacttattgggtaccgtacggagtatttgaaacacgggaaagaagtaccactcgggtaatatttccaaaggagttgcaaacggatccgcgggttcaccaatcattgatggctcgagaacagctaaacctacattacatgcaatagtacctagaattactactggaaaaatatataaaagatcgttgggccacgcgggttcgccgtaataattatgtcccatccctttagctaattttgctcttaatacaggatcatttaagtctggtttctttgttattgggataggtgaactctttaggatccatcccccaaaggaaccggacatgagaatttatcatcatccggctcgagcaataaagaaagaaataagaccgcggaagatccataataataatagaataaggtatataattactcaatgactctaggcaagaaaagctttatcaaattatctttccgaagttccacctacaactactcattgaaaataatcctattcttatgggtaaatgctcaatatccaagtgggcttacaaatttgatcatgatcaattgctttgtggattgtctcatgtctcttgattagttggtctttatcccctcactatcgcaagtttcttacgcccaaacaaagtatttacttgttactaataaaaaaatcaaaaagtttagcctatgctcttccttagatcccttcttttactccgatagtattgcgaatcacaatcgatgcaaagaaaatgaatgcatttccataccataataaaaaaaggtaagtgtaataaatagagaattggatcatgtcacatgacttattccatttctactctatgggatcttacggagccttttcatggatgacatggttggggtatgatcatagaaaatattctcctcaagtgaaccagcctatccttcctaggtaggggacttacgtgttgattggatgcggagacacctttggttgtgaattctaatgtggcagatccaattctttatctgcatggccaaatctataattcaagtcacacactcccataatccgcctttttttattttgtaaaattaacttcaactatttgtattatatcaaaatacttcggagttgaagagaagtatccaaatgacatgtgttattttacaataacccatgtttgtagcaatgaaataccacaacctacccaatattatatacgagaattctaattctctatgatatgccttccctataaaggacccgaaataccttgcttacgtatcattggaaagtgcattaacataaatacggcagtaagcagaggaagtacaaaggtatgtaaactataaaaacgagtcaaagtggattggcccacactagcacttccacgtaataactccactagaggcgatcctattaccggaatcgcatcaggtacacctgtcacaattttgactgcccaataaccaatttgatcccaaggcaaagaataacccgttacaccaaacgatgcagtcaaaacagccaaaaccacacctgtgacccaagttaattcgcggggttttttaaatccacctgtgagatacacacgaaatacatgtaggatcatcattagaaccatcatacttgctgaccatcgatgaactgatcggattaaccaaccaaagttggcctcggtcattatgtattgaacccaggaaaaagcctctgtaacagttgtgcgatagtaaaaagtcatagcaaaaccggtagcgacttgtactagaaagcaagtaagtgtaattccccctaaacaataaa

SEQ ID NO: 2035 - DNA, 4544 bp, Brachypodium distachyon
  Intron number 1 from transcript Bradi1g71800.1 (locus Brad i1g71800) derived from phytozome v7.0 (chr-ID Bd1; pos 697 30048 to 69734591)
gtctcgaggtatagccgctttgtgccttttcatttggttgggactggtgatgttagttatgaacatatgatcactttctcattccgaagtatgattgctgaaaatccactgcatttgaagttgcgttgtttggacggacaagctgaaaaacaccatgctacctctccgatgcaattaaatcgatctgaaacttactgtttgtgtaatgctgtttgctctcggggaatgaattgagcttttgctgggatcagcaattgccggtctactacattgttgcagtacgatcctatagaacagatcctgttcaagtaaggtcgtggtctacagtatgtctactacattgttgatacgaggttttgagcggcacgaaagactgttttatttgattcaggttcattacttccatttaagcgccataggactctgggaggaacaaacatgagtcatgagtgtcagatactgatgaattagccaagctgtgtgttgtgggctcaggttaaggggtatgctaaatgttagcatatgattgagatgttagccttccagtgtcctattgctcagggttttgtgatagaccatgcataagttgggcacttgtgcatcattttactaggagggtagatgctctttgcggagccggtggaaaggacataacaaaattcagaaatgcatgaacaatgcaagttttagcattgaattatttgccattaaatttcggtccatgctttcttagataaatgacaaagtaataacttctcatgtattaataaaatgtgcatcggtaactcctaatgtggctaaacataatataaacatcaaagttgagtaaaattatgttgcatccaatttgagctgcggaagcaaaccctgctggagccaacttgagctgccgcaagcaaaccttgctgtcgcgcccctagcttcagcggaggtgacatctgaaacagaatcgaaccaaccgcagcatgtaccaataaaacaaccttcttgttaatggtaaacattatgcatctcaacataacatgagcttacttgctgcagggtaaaggaaacatatatgtcaaaaaggcaataataaactgcacttgaatatcaaggcacacaggagcattgtaattaggccaaatcctaaaatattgactatgattataatatggcctcatattccctacttactcccacatgtccacatatatagaccatcctacacgggaattatggcaggttgataacatgattggcacatatttcctatgattgctaagtgttaatgaactgatactgcaactattgaagcagtgattaaagggaagcacgttcatgttagaaaagtttgggatacaaccaccaagttataataagatctaagagttcgatgtggaagccacaaagaaagcaaaacgtttgtgccaactgctaaactcaaattaggatgtatattgtggtagttgctgaaaaagattgcactgctaatgttagctactaaatagaatggaaatgctagtatcacatcaaatcaaggtgaagtaaaaatttactccctccgatccataataagtgtctcagatttagtacaactttgtacagtactaactttgtactaaatctgagacacgtattatggatcagagggagtaattattagcacatcaccccctgtacagcctgatccacaattggcaacacataagcatgtctggttactaatagtctagcagctaaatctggagtgtacataatctgctgggactgacaaaccatggttcagagctcgaagagcataaccacatgagtaaataggaagggcacctcacctttgtctgaacaacgactatttcagactgcatttcagcctgaggtagtgatatcagcctgcttcacaacagaataatataggtttatgcgtggtagtttgtaaatcgaatagttttgcacctattggtaatgaggaggccaagaatgaaattgaaaggaaactgtgacatgaaaattttgaataagaagaaaaattcccaaatcatcagtgttttctctgggcttgcctaacaagatagaaccaaatagcaaaacagtcccaacagttttgacatttcagtgaagacttgggggcagagtaatgcaatcacatcctaaaaggaaataaaatgacccgcagaacctcaccatcctcaatacccttaactgatttgtacattctgtaggtgaaactcctgatcctccaaagaataaaagtagcgtatgttcctacagagaaattggttgtgaaagcacacattgtaagaggaagtgtgagcatggagtactctgcagggagattaaggaaaagtttaagagcgagtgacggtaagcatgctgttttgtgctggctgatgaaaaggtaaggagcccaggaagggagggcaacgaaacagggcttgggctggggcttgggggagtctggagagggatggaaggagaaggattaggaggggagaagcttctgtacctccaaaggcggcgctgggaggaagggctcgggagcgaaggggcagtctggcggtagagtagttagtgtcgctttgagttaatagagatcgacctttagatgtagctgatttgatttgattgaaattgaccttctgacttaacaattattcagtactccctttagctctctatagcttgttgcttaggggcatatctgaagtcaaacttttgaaatttctagtacgtcagcatcctgattatttaaatgagatacatgataatcatataggtaaaaaatttctttaaaaaacactttggtaatatattgtaaatactgtcggtttaataaatacattgaagcagaaaattgtgttcattgttgtgctttgtagacagcgttgatgtccaaaatggcaaggtttagggaattggaggttactacgtcagtagcatttggacaggatatgtttgtgtgaatacacgggctatgtagttaggcagtgtattttacactgggggcctgaaggtgactacagttctgtattgtggcacatgcccctgttccatcatccaccatggggaaactggatctgctccaaatcacagccaaaagaatagagatcttggaaatagaaaatctaatatatcaatatctctttggttaagatcaaggttgcacaaatgggtcatgaccccactacttgagattctagaggaacttctactttgcttttctgccctaatgggtcatggtcttgcataaatgcccttctcctgggagtatattgtatacttcagtactgttgtaaatttcttgaaaactttaaaaataatcacctagttgttaaatttggcgtctttagttttcatcgtttgcctctttggagcatccgatctctattttccacttgttttaggtgtttgatttgatctaattggactctgccatctgtcatgttttgggtcgaagaaagaccgggacctctatccacaaactaggattctgagttatttcgttgatatgacatgttccggtgaaagaactggttatgtttcactttctatcataccattttatctcatactgttgatggtcccaattgtgctttaatttgcacgaatttggttggctttgtgctcagtgggttcaaccttagctgcttccatttatttgtaatagttttgatttgtggtttgttgcattgttattggctcatggttgataggaacatcatccatttggaatgctgctttttggcaagagctcggtgtaattctatttattttttattttgatcgtatctaagatccttttctatctgggttgctaactcaatggtagagtgctcgccttttaagcctaactgtcttgatatgaaagttctgaccatttgcatcagttttctaagcaccgattgtttacttgtattttcaagatccctttgcaaattagctaactccatgtaacctgtatctaagccttacctgtatcccacctgggttgctatatctagtcggagttgtattctttggaacttttcctcttctggctgtttgatttgtgttacagcccataatttttttcccctacagattcctttgcactatgtatttcatagaaaagtttcagatgactcaacctattggaaatattcctatgtttttcctgtggtgcaatcaaacactttttggtgcaaactcttgtagtatttgatgctgtatgattcatggtattgcaatcatgcattcttttctattcctgcattttcaaaactgctcaattgcaagggattctatgtaggtaattgttttctcatgctaagatgtatagacttcaaaagaaatacaaataaaaggcaatctgaaaaataaatctgatgttccatgacctcactggtttctggcctgttactgccaacaggacgaaacccaggattcagccagtatcagtaactcaaactgtgataagtatatgcagaatgggcctatgtttccatttctcctacttaaacattttttccctaatttttatatatcttgcagaacagttgttgctcctcttgagaggttaaagttgg

SEQ ID NO: 2036 - DNA, 5595 bp, Brachypodium distachyon; identical to SEQ ID NO: 2017
  Intron number 8 from transcript Bradi1g54300.5 (locus Brad i1g54300) derived from phytozome v7.0 (chr-ID Bd1; pos 526 94220 to 52699814)

SEQ ID NO: 2037 - DNA, 1672 bp, Brachypodium distachyon
  Intron number 4 from transcript Bradi1g12010.3 (locus Brad i1g12010) derived from phytozome v7.0 (chr-ID Bd1; pos 892 8014 to 8929685)
gtgcttaaacggtcttcttcctacaacgcagaaaggtaagtttcggcacttcccataatattaaagtttttcttagataaaggaagccctggcttctgcattgaggatgcataaagcctaccataatgttcaactgtgcttataaaactagaattcagaaattgcactttttatcttttgactttgccgtacatgtaaatgtattgtgataattttgtgtcactggctctatggcactggttgaggaaatgtatcatcacttatcggtacaaatcttgtgccaattctgcaattgttttctttgcggaaagtcctcagtgacttcatactttgccttacattgaacaagtttgtccttgtgcttacattgaacgagttagtcttaccatagatttgataatcagatggtgcattattttccaaatcatttggtagtcatcatttgaaggaagtacttatgagcatttcagttgcacgtaatatctgtagaaaggaagtacttaagtagcaataagatgttagtgtttgaaatatggacattcaaggtaaaatgttccaccgattgttcatttaagagcattgcagttgcacataatatctgtagaaaggggttaggttaggtcagggtcagagaattaagagatggaaaagaaccacgtacccgatagatttgattaacggaaggaccatcgtcctttggttttccatcattccgtgatgcccacactctagccgagacaaattgcagttaggttgatgccagtgacacttcacgctcatgtcctgtgttgccagcatgctacatgtagctggcgcggcatggcatacatgtaaacaaacaaaatagcaaactataaggaatctactgaagaaaaccgaggctgggagattgcaaaatcggtaaatatgctggataagagagcgaatattaaatccaaaacaagatgatgagggtgtatatcttttgctttgcccattttgcatgagtagttttgttttgaataatgccatacatagtatgcctgctacaaattctggttagaagataaagaacatgagtagattggtgcactgagaagttactgatagggtgaatattttcttctgaagattttggtacccactgtcccaaacaaagccctcctgttattctttttgtcactacttgaattctacagttttaattctatgccagtagcttcacttctactacattgccaacaacaggagccacttgtcagatgtagaggaccacactgcacagttggctggcaagattcttcagttgcacaactgaaaatttagcagctaccctgtttcttcatactgttgaatagagctgtcgttgtaatagagggaccagtctgtgaactgctactgcaaaaaagccagccaagttcatatactgataccaatcccgactggaccatggtttccatcatcctgttaaatccaaaacattacctagcatacgtctgaacctaacagaaatgcagaatattaggccattggcacaataatcatgtcatatgcagtcgctctcccttgttaattgcataggatccttacttgccttgccatgctgagttgttgattttcctttgaaacatatcctaacccatgaacaaattaacctgcaggggtggcgagacccttgactgtgcaagacccg

SEQ ID NO: 2038 - DNA, 3847 bp, Brachypodium distachyon
  Intron number 4 from transcript Bradi2g13400.2 (locus Brad i2g13400) derived from phytozome v7.0 (chr-ID Bd2; pos 118 61867 to 11865713)
ggcccagctggtgaacttcgagaagtctctgcaaggtaaagttcagatagctcttgtttaactatgacattttatcttttttgtctcagagcctcggaggaaggtatatatgtgcccttgcttcatgagaatttagtataggttactaggttgtccgaccagtatcagctcggtctgttccttcatacctttcctgcttcgttctgttcatttcagttggaaactgtactatggatcccaaccttggtatttgactaccaatttgtgataaaataatcgttggaatgacgttggaagatggaacagcagacttgaactttcaacaatagcacatcagtaagcgcaatgcgatgatcttcatctaatcgtgtaggtgcaacacacaaattctgcacctacacggtatattcaattcattaggcttgtttggacaggaagagattagagcacatccctttggattactaagttcttggcaatctgaaatgactaggcctatcccccatcatccagactaagccctttatgggttttctaaatgatctttccttgtatgactgcttatagtcaagccacttttttctcaggaaagatgccaatgtactcatggaatttctgctcttctgttagtagttttcaatatgcagttgctgttttgttactggttccatgactagtttatgtagatcatcctggtgggagacttttgttgataaaacttctggtactttgactcatgttttcatctttttgattcctcgtagtaatcagtaaacacatacagtaaataagaagtaaaaaaaaaataaagagaccagggggaagacatccccttgactttttaattatgtgggcgagtcctcgaatctgggtggctgggttcacaaccatgtgcaccattgcatttgcaccccaagagacttctcaatcagtaaataagaagttacatgtatgttgtcaagtttccatggcacgccattgaaacattgctgtacatcttagagcttctgtgcagaactgcttccagggcatcgtgtccatatatacacaaaagtaaataaagagcaaaatgtgttggatcctaattctattttaaaggcgacaacttggtccaaaatctttcaaaatgcacatccgagtccaattctatgtttaatggttcatcaggggtcctaaactcgtttcgtctagtctgaccggttggcgtgggacatactctgccacgtcgacgtgattgcacttggcgggagttatcccgccaattgcggttgcaacattttgcaaaaaaaccccccccatataaacgggtttcttctcaccccttgcccgtgctctctctactcaacttccctggttcttctcaaccctaactggcgccatgagtggatccgccagctcattgacaatgaagcatggtaagaagactagctcaacaacgacagcgccaccagcagcgcttcctccggcagtgtagatcccactggggtattgcctctggtgaggtgctcagcagcggcgccgtcaacattttgccacaccagggccatctagatggacacccccctcccccacgcaatgattagtcgctgtccatcgttcaccgcccagctctctcgccggagtgccgttcatcgcccttgcaggcccctcagcgtcaccagtacaatggagaacggagagagggatgtcgaatgagaaagaccatatcagggaggttagtgcaaaaattcccttcagcaaattatcccccatgtgcaacccaccaatgtggaaaatgtcaacatgccacgcaagtcagtccgacgagcttgaacgagtttagaacctctgatgaactattaaacatagaattgggactcagatgtgcatttaaaaagatttgggactaagttggcacttttaaaatagaattaggacctccaatgcattttactacccgaccactactttgcccaaagtttcgtacaaattctaatgaaaaaaaatttggcggcacaagataacctcattagaagtttatgcgcatctggactcttatatttcgctgtaggtatcttaataacttcatataaataacctggttaatgagacggggcggtaccaattaatcacctagcaaaaatcaaggctctcaatttgagtaatctttactcctataaatatgtcaatcttgatggtggtccattcatgtcctcctctcatcccaatgtgaaccttcacatttgtggcaaagtgttgtgacgatgttcctgcttgccagcgatgttgggttaaaattacccacaagtgccactaatatacttcctccgatccataataagtctcagatttagtataaagttagtacaaagttgtactaattctgagacacttattatggatcagagggagtataatgcagtgaaggtttgacataggctatgcttggtagcaactcatgggtatcgagctagttcttgatttacttttatgtacataacacgtggttacgacatgaacatctgcatatatgttgggaaagtatagctttatgtgtgagacatgtgcatgcagaactatttgattttgtaaggcttagtttctggtttctaaaccgtgtcgcactgaacttattttataatttgctgcagaaaaaataggcatgaatgcaggaaaaagttggtaggccaaacaattaaataataaaaagtgggtgagataaacggaaaatccaccgcaacatcaaaggagccttagtcagtcctaacattctaataaaaatagttaaccaactagtcatacaaccctaaaatttaagttgactggagtgcgcaaataaggcagaactgtgccatgtgcctcaaggtgttgaaggcaaaatgggcttttaccctttgccccacaaatccattcaattcaacttcaaccatgcacactgattcccatcatgactcaccatagacacagccaaatgctcagccaatccccttgagctcagttgcctgcccgcgtggatttggagcttctggatggcgatccaagctcagttgttctcccatgtctagctgccttgtgtttctggtgggcatggcctgttgctggctcgatctatttctatctgtatacgtgagaatagttgtcctgctgtgcttgagttcttctgaaattcattgccgtttgattaaggtgaagaagaatggtatctcaagattttttacttggagaagagacacaggaatcctgattaatcttgtgccttggcaaagcaagagcaggtcttgttttctctgtagcctatcagatggataggctggttcaggagcatgccctttagctggctagaggagattggagggctgaggcaaaagctaaaggcaaggtttgctcttaacacattaaggcagagaacagggctccaaacaagctgcacatatgggatgaccaagatttttttgggttgcgataccaaactttgggacagtaggaagtgttttagtactaattttcctttataatgtggagatgtctagctcgtcagaaaatatgctattttgcttgtgaacacaacattttaatagcaaagtagcatgctgaaaatcgttctggaactttgttaagtttgctaatgctatatttctccttttccgtccacatctcaagtcttattctgtaactctcagtcttcatcactgtctgttcaatttctctgatgctcaattaaacaactttctcttaacctacatggttttaagtataaggtgtcatttgacccattttcattttcaccgttttcttggtttatcaccagtggaagtaatttcacatgccaaatttctgttgttgtgcagtggggcagggacgaagaatt

SEQ ID NO: 2039 - DNA, 602 bp, Brachypodium distachyon
  Intron number 5 from transcript Bradi3g54070.1 (locus Brad i3g54070) derived from phytozome v7.0 (chr-ID Bd3; pos 546 19058 to 54619659)
tcaccagaggttcatatattacactatcttccattccgtaaaacttaattttgaaacgaaaaaaccagaaaactagatcgtcgataacaactagtagccacagacggtagtttgcgttggcagaatttgttgagccctgaaatctgctaatgatgtccattagatcacaaagtgtacaacaaaagcattagccttttgaccatcggttcggcgcaaataggtacaaataattctgtcgactttaaagttggtgtattgattgtgagtcacttagcttttagttttctaagaagaaaatgactatttttgtctaaaggtggatccatgttgaagtctacgtgatagaatatataaagtatgtaaaatcctatcaaagattctaacattggcatctggagaactggaagccaccaaaagagctactagtactagcttaccaaggatgtacggtgctaacttctgaacatatcccatctactataagagtataagttaaccaccccagcactttaacaaaatgcatgtcggtttcttttctatacttcaatcatttgctcaattgcaagcgtcatcaaattttaaaacttgtgtcttgtaggata

SEQ ID NO: 2040 - DNA, 15006 bp, Brachypodium distachyon
  Intron number 1 from transcript Bradi5g13640.6 (locus Brad i5g13640) derived from phytozome v7.0 (chr-ID Bd5; pos 171 44329 to 17159334)
gctgcacctacctcaagatcccttgcaaaattgaggtacccatatttgtccccttctttttgttgaaattttgcagttcgagaccgccagttcccttggttcttccttagatttttctaggtgttgttgtttggactgcttatggtgtatatgcagcaggataaggcgtatccgcgagatttcttccagagggggagggtgagggtgcagctccaaaatgaagacggatccccagtcaatcctgcaattagaacaagtatgtcctataactgctgattgatcctggaagctaccttgacttccatctatattcaccatgcactgcgaatagaggttacgattttattatgaattataccatccatactgtttcaagctataccaaatcctattagtgcagttactagagctgtcaggaataaatatatgatatgccaattacgtgatcgcttcgatgaaatatggattccacaaaaacctaatgatgatacttgtcatgggctattgttaaaatgcacccgtttaatttgttagaaggaactaaatttggtcccatgcaaatcttgtctcctttccaaggttccaccagatcagcgtttttgtggtaagttgagttgttgaatatccagatatttgtgcaccatatgcttgtcaagaaagagatgcatggtaggaggtgaagtgttacattttctgtttgattctcccttcatttagcgagcacagtattgtgaatacagatcaagttcttagtcatcataagtagcaaacgattagttccttaattaggtatgtactgctacctgacactgacagctcacatagatatggttatcttgacttgcttgcatatggtttgtggtggtttatcctattggctattgtatgcagataatgatgctgtgatagtatgattaagctatggatgttgtattctgtagttttgtactccctccgatccataataggtgtctcagatttagtacaaagttgtactatgtcagggagtacagtgcaatgtcatacttcagaacaagtgtagcacccaaaagatttcatgtatgccaatttaattttcagatttgcctgattaattagttctgctcctagtacacccaccaaacacatgatcaatcttttcccaaaataaagaatataatttcccagaatcagaaatctatgtggccaattcatctcaacaccctgatgcttatttccatttgatccaattaacaaataacaacatatgaccatattgagaaagtgaatcgtggataaaacggggcatagtaggtgacataggagtatgcaagacattattttgaactgaaatagataactatatcatattgtaacataatagtggtcgaacaaagttacttaccgatacatactactgcaccgatagagaactggagagttccaaaagactgacgttctccccatccatgtagtcttagtatggagacgacaaggctctgtaatctcataaacaaccatgtgaatattcaatacacaaagttgatgtttgcacccagctctcagggcttgaaccattatggtgcacggacatgaaaaaaattcgaaggttgtagcttgaccccttttgatgtgtacatgaattcttgtgaagccttgttccacataccatgttctttactctcatagaggagcccatcagtggcggagatccgtcacctccttttattgtataaaaaaccctcatccttctattgtcaaaaaataaaaaatccccatccccttctaatgcgatcaattaaatctactgcaaaagattgacatggtgatgatgtctgtcaccaaagttagaataaaattagacagtgccacttatatataatagtgatttcttagtagtctaatttgttttatccatagcaacgcatgggtatttagctagttaagtaaacagaagatatgtttggggaatggagatagaacaaaatgggtcaaggttgtcatggaatacatgaaccagttccttttcttcctcatttatgctccataaagttggttggaaaaacaatataatgggtccatcagatcattcaactcaattttccctgtccaactggacttctttttgctggtaacgagtcctagagcacaactgaataaagcaatgcataaataatggataagagaccatgcttgcaaatgatctaagggaagtgcttgatatgactccaaatctggcaccagataaagactagtataaggagaactgctgtagtcctggatcttgtatcaaatgttccctatttgcattattaagaaagcaagttttcatcttcacattgattttcaatattggcaacatagctggtaactcatggccccaactcagattgcaaggacaatttgtcacttggcatgacgaatgggtaacttatatcatttatcattatgggtaaatatcaccgggatatgataatgacatttttgttgatttttcttaattccaaatagaatgtgacgatccattatatagatgcgactcctcctaacgaatgaactagtctatcaaatccgtacgaataggcaccagctactaacttcctaagaatagcatcctttgagaacctcccctcgtgcattacagtgcgcatacatacttctccacctggatgttttgtggcatcaaaaatcttggggacaaattgcacatgttgcctcatttggaccacgtagttcgtgttgcgtcatattatttcatcttgttatagacagtagtatattgagttcagtaatttagtcatgatcacttatccttgatgctgtatggctaagttgatttatgttagctgcaacccagcaccattgtaatgatgttgtttatctgaaaatttggttcaattttgctcagtagagttagatgcatgatgattatgaatgttgagttcctttcctccaaattaagcttgtttttcaattttgctcagtatagagtagatgcatgatgattatgaatgttgaaatggctcctagaagcatgtgcatgcttctggaatgaacagcaattcataaagaagtacttcaaatgttcaggtcttctatgtgcttctaacttcccatcagagagaaggcttttttggagcccgagagaaaataaattcaatattctaaaaatgcataatgttgagcactatttgtttttgtgctggatgtaaaactagtcctatttccatgaacatttgtatatctagttgtttcagattttttttttgacgtttggattttttttccactttggagcacgtgctctgatgcaactttgaatctctcgatccacctggatgttgactcgactcctgtatcatgttgcatatctagatcttctgtgatctgtaacatttttcctgtgcctcactatcggtgtgcattactaggggaatattcatgttcctgtactttagcaacatatttctttaatgctgaagtttctgttactagggcataattcctagttctaatctttgtgttttatggctggcaattcttgaaatcttagtgtatattctcttgcatgccgttgcacatgttttgtcaatcccactgacgccgttccttctcgtcacagagaaacagttgatgatccaaatagcagagctggtacccaagcaccaagggagaactaagaagcaggaaccatcggctagttcgtcagctgccccgacttccaagtcaaaaggcgggaagaagaagaagtgatgaaagcagcatcttgtgttgtttttcttcttctgtttatagatttccatagaaaattccttgagggagttctgtgtctcctctgatgaatttttcggggttctgaattcctgatccatttggaccgtctttctggtggcctttgagaggttacaagcagccaagcaagagcgacctagtgttagtttgggactgcggtagtcaaagtttgcagatgctttcagtttagtgtcaccttggccttgcatacaaaatataatgtgaagtcccctgcccaggctatgacggcaccttcgcctggcggtgccctggcccgcagaggtcatagggcggcggagttcctgagcggaagcgagcaggcagcgaggagagacggaggtcgcgagcaggcggcatggagagagggaggtggaggcacatatcctagaggaggtcccgagcggcgggaagggtcaacgagcagagatggatgagggggagcgacgcgcgggcggtggcatggagattgggcggtgcgagagcaccagagaaggtgcaagatggcggcaggggtcgcggcgcgagatgagggtgacagattccggagcggcgttagggagaaaaactgcatccctctgctcgattggtttccagaggcggcaatgaggtggagcagggctcttcgaggcgtccgacaacggtgcggtgagtcgggaggggctgtgcggttgcgatggcactgctcaagcgggtggcggaggatggcagcggcggatagggttagcatgagcgccggaggagagcgagacaacgactggagagtttaggccggctccggtgccggacgacgaggttgggcagtggcgtgaaatttctagttcatggtagttctccttcttggcagtgcgttgatgtttttttttgggggtctcgtggattggaatacccatatttgggggtggtggcgcaaaatatgggtaactacccatgatttatgggtattcggtaaatgggtatgctgttggatagctttttgggcaaaatatccatattggtagtttttaggtattcacggtaaacatgagtagggtgttggaaatgctctaattaaggtcgactcctagcggctagtgtgcaaggtcgactttaagggttataaatagatggcgcgctcccaagatgttataaaataatcggttaataacaatagatccgactctactatctcctaaatataagaagttctaactttgttcaattcaaatttcttaaggtatgactaagtttgtaattttcttatcaacatctagaatcttaaagtatattatgaaaatatgtattatgatggattcatttaatgaaaccaatttagagttgtaaaatgttggtagattttcttatagacttgatcaaaatttaagtaaattgacttgtacgtagctagccttaccttgactatgaagagttgagcatttctggagtaaattactccgagacgacattcgcaagtttctgttactcaaattgtattcattgtacaagagtgaacaatagttccgacgacatcatgctgtcatgtatactagtgtatgcatcatccatttttaagtacaatgagagcaataaacacttgcagctactccctccgatccatattaattatcgaaatcttacatgtatcgacacgttttttagtcttagatacatttatatttatatttgggcaaattatggatcagagggagcatgacgtttgatgtttctgtagttaatgtgtaatcaaacatagccctgcgccctgctgcggcgtccggcggcaagaagcgtcgggggcgtcaggtcaccgctgcagctcgactccgggctgtacccctccctgatctattgcggcgcaccgttgttactcgtgctccagcccgagcttgctgtagagcccccaggcccggcggcgccaagcgccaccgagccggaccggctccggacgtgagccctcggagcaggagacgccatgcgggccttggcgcgcgcggactgcgtcgccgccatgtagctcgggacctcggcgcgcaccaccgggtagaggtccttgggtgggctgatcttgggtcttctgctcgggtctatctccaccgaaacgcctccttgggccggcggcccaatactgggcggcgtgcagggttccagcggccagtgccagcctgcagcgccgttgggtttgtcctgctcgtcgcacacagaaaagaaaagaaaaacgtcctctcaaaaatagaaaaaggaaaaaacgttggttggttcagctagcaggaattacagatatatagctagaacatggaaggaagcaaacgccggcacctggtacccaaatgctgtgtaggccggctccgtggtggctccggaccggatgacggcgtcccagcctcggtggaacgggctcgcattattatcgttgatgctgtttcttggtggtcgccgcaccacgtggtcgtccaagaagaggaggcggtgggtttgggttctgcggacgcgggcctgagcgcggacgagagcctgcatgcagcgcatggtgagatggacctggcgacgcacctggtggccgcgcaccagcgcctgcagccgcaccagaccgcgcagcgcgcgcagggctctcctcgcctgaaacacacaaacaaccaattgcacgcgcgcgtctccagatgttaatttcctggaacaagtctggtgctacgtacgtaccaagtagccccggtagaatgcctggatgcgcacggcggctcgctcctccctgccgcgcaaggccgcgatcctcgccaccctcgacgccatggcgcggcgcgccctcctggcttccgcctccacaccaccgtggtggaactccctccgcctcgtgacgacgacctcattcgttgttgcgtccggcgacgtgtcagcgggcgggaagtgctcgtcggacactatctccgccgcctcctgctcttcttcgcctcctcccgttccctgcttgaacgtataatcaacaaacgtctgtgactgtcaagatatataggaataattgaaagccggcctctcgacgcatgcaacaagggcggaccggaccttgttggagtagttcttgttggtagggcaggaggggctggtcttgaagaccttcctcacggtggccagccagccaccgcctccgggtttcttccccatgtatatgcgtgccggccggcgatggatcgcccggtcaagggaggagatggacgtgccgtacgtaccctttatgaggcggccgggagtaaagtggggcttgcacgcgagtgccccgtgaaggcgcggtgggtagatagctggatgcatgggtaccgtgcggaagtcacggggatcgcgctgtacgtacgtacatcgtcgatcggcgagggaggcctatagccgtactctgccttgacagccgcggctctcgcgacatcagccttgctacctcaaaacctttcaaaccgcggtcaaaatattgggttggtgacggtgatcacgcccgccaccaactccgtgccacgtgtttttatccccggtggcgggtcaaatcgcggccactgcagatcatagtgcatcaatggcgggcaaagtcgctgccaccgtcggttcctaacctgccattggagatgctttcggcaccttccgaaaggtgcgtagaggacatcaatggcggactcaacacccgtcactggtgatttccagtggcggtgactaaatatccgccattggtgatttccagtggtggtggtgcatcaccgccattgggttctgtaccagtggtggtggttaaacaccgccactgggttctggtacgtttttctactgaaaataaataaataaattatttaattattgaaatattcttgtagcacagtatagcagcaacatatatacacagtggccgtgtgtacccaccgccactgggcactaccagtggccgtgatgacgcaccggcactggtatgtaacagtggctgtcctttccacggccaccggtgcattttctgaagctccctacgaattaccagtgacggttgtgcgaaccgccactggtgctggttagcacccgtggcggtgattgtacccgccatcggtgctccttagcaccagtggcgcaggcttagtggcgggccgcgttaccgccacagctgctaagattttccggagcagtgatttatcacgccgctctatctaaaattttctatcctgctatggaaatgaatgtagctctttcttctagctctttgaaaaataagattcaactcatcgttgaagatcttccggcatttgaaaagagagggcctgatattattcaagatgtagttattacaaacacgccagatgctccaacagaccagaccagggcagtgatttccgtacgaaatggctcatgaatctgtttacgcaattccatggattagaaagttataatcacttgttgtactagatcaagtttaatatggattttactcttcaaaataatttgatgaacaacgcagcaaagcgcgcacaattggccagtgctactgctggtattttagattgacataaataggagtatacgtggcttacacaggagccaagctcgcttagcaaacgggctgacggtaccatctagaccaagcaaacaaatcaagcaccggacgaccgcggcttcacaaggtggcgcaaacatacgtttatttagtaccacaaccacaaacttatttggcaccggcacaaccacgcagacgatgatgtccttgatgatcctactaacatcttaataacagttacaaataacatacgtttattttgtatgtcagagacaagagtgaaggcctaggcctcctcgacgccgacttcaactcgtaccatatggggcccgtgtttccggaccatgtgccgatcagcagaagttcgtaccattgccgggacccaaacaagcgcatacatggtgagatcccaagcacgaactacatcgccctaacaagcgcacacatggtggttgaatattacttacttcacatgaatggttttgattgcctctctcgcgagatctggcgactccattggcgattctgagtcttcacccaccttcgcccatgatccctccgacgttgagctggatcatgaagattgggacggatcagaatcgcagtggaaagttcctcatctcaagatgcggcagcgaatcgatgtctctctggaagtttcggtaaaggagaaagcaacctctggaaaggggacttgagggttgcagcacgaggaagggtgaacggaggtgccatcctcgccgtccacgtgtggttcgcccccaccgtccgatcaacctttggaggcgagcggtagtgttttttggggagatccggtgacttcggaggcttcacctcttgattcgcttttccagcatctgtggacgcaggagccgccgcagcgacagtaccgaggcaggtggcttgtggatcaaaggcgggcgactgcaaatctgatctcagattggccacgggtggggagtggtggaggtgagttctctcggattttcagttcttccttctcgcaagttgcagcggcggcgatggcgcggagattcctgggtaggggtgagccttttgggcgtggatacggagatggccgaggtcgtggtttgggtggaggctggatgggctggcagaacgggcaggggagaggctggcagggtccaccgtactgggattactagggaggggagggcttcttcccgccgggagggccggagtatccaccgctgcctaatcagttccaggggcaggcgcaaggcccttaccagagtgggatgcctcctcgagttcagttccaagaacacatgcatcagggcaacttccaatagcagcaagctagcgggcagggggcaccgaagcaacctagtgcttcagggtctggtgatactggtgggggagcaaaagccagtgacagtgggaagtctgctagttcagttcaacagattgggcctaggaaattcatctgtcagaagtgtgatgtggaagggcacgtcagcaaagattgcaaggtggaagtggtttgtgagaactgtgtgaaggccagtcatgctaccaaataagtgtgtatggccttttcagatcaagccagtggctaagctagtggctaagctagttggatattcagctaaaggttcaggctcagaatgttaagaggggaggaggtggatctgctttgagttctctggcaattctggtggtggaaaagggggagttaattgctgatcaatcctctttaggtctagcagagacttatccttggaagtgggaatggcaagtgaaagatatgggcaatgggaggatgatggttaaattcccttcagctgctaaggtggaggaagcaagatgttaccaagcttttacccttcaagggactaatgcttttgtttctgtgaaaagatggtcttctgaagccatggctaagggcaagctccatactgtttgggtgagagcaggaggtgtccttgatgaacttaggcattactttgccgcaaaagtatctatctatgattggtgtggtcagtgaggtggatatgagcatttttcgaaagcatgatattgtaaggctgaaggtgggtgtgaaggatgttgatcttattccctcagtggctgagttaatagcggacttgatgttatttgatatcttctttgatcttgagcaagtggttgaagttggtggcttgtttgaatctagtttaacaaggggagaggataaagatggtgaggagaaagacaacaagaacactggggacaaaaatttgaagaggcacaaaaatgggggtggactcacggaaaagaatggcagtggaggtgctgcaggaaatgtgggacagagctcaggacaggggggacatcaaggggctataggtggagcttctgaccagctgtgtctgtttggggcagagagggaggcctttgagagattagttcagcttgaggtggacagtaaattgaatgctatcttgcaaataagggaggaggctgcaatgagagagaaactcttattggctaagtcgaatcaggttcaggtgcagaggagaggtgctttcacaggcaggtaggctgagatgggggctagtgagactgggaataacttttctgaatttcatggtgatggacatgctctgcagggaggcagtcaagatgataatgatgtggtctctgaggagatgtcctttgctactaaagtctagcgagtgcaaggtaccaagtagatgcttcaggaacttgacccaaaagatgtggaggatgttttgcttgatggatcagaagaaatgcctggtgagattgctgatgggaataacacagaggtgaactacaggaggagtgccaggctatagaatcaagggtaagctgatgcaaaggtggaagacagagccattcatcaagcaaaagtgaagaacctggagattccaaaaggtaatacttctgctgctactgttttatcctccacttatgctgatcttgtgttgactgagaaattaaatgttagattaggtagcaatgctaacgagccttatcagccctgaagtagtcgcttagggcctaaggccctgttaggttgggtttaaaactgtttttttttcttttggcttataagtcacaaaaacgcctatttaggtgtttttcctatttagatgattttgacttggtttttacttataccatcatctaaaaatattaagtaagatgtgaaaagtcaaaggtgaaagcatccaaatagatacttttgtggcagaaaaaccaaaagtcaaaaagcggttttaagcctaaccaaacaaggtctaagcgatgcgttttccgaccgatgagaacttttgcgcgcttaagtgatgcttttttgaaccatgttcatgttgtgaactaaactgttaaattactgcatttacagatgtactccatccgttaattattgtcttagattacggaacggagccacggagggaacttgtcgtggtggtgtcacggcagatgtcataggatggcttatgttgggaccgatggatgaaggagaaaccgtaggagggaggaggtgatgagaaacacgcacaaacacacgagcacacacagattttacctaggttcggagccctcttgtcgaggtaagactcctactcctgctttgttgtataagccgagacaccaatatctacaatggcgctccttgagcagtattcttgaggaagaagaagaaaaggaaggggaaaatcctagatgtctaagtgatggatccatctccagggatgggtagtgctcctatttatggaccgcccatgtcacactgacatgttggtcaagggctaacgttatcttctatgggccctgctgggcacgcgtcttggttccctccaggtggcaccgcaggggacaagacaactttacttttcatggcgtcctgcaacaagtactgctgccacctgccggcttctgtcactgattttctttcggtgcttctttgcgcagtcgcctggcaccgcaacgtaagcagcgactgctttcccgtgataaagataacgctgttttactatgcgccatgcgatgaggataagaccattgagacatcttggcactggccgagatcagagtattcgtccttatcctgcaatcacataagacaagatagatttgccggcatacacttagtatgccggcttagtattagttcggcttaaggcttccaacgtacatgcctgtgccggctttgccttcgtcacctcggctaatgtgtgtcgtcctgatcctacccggggtcatccccacgacataactatacctgggcatgggcagcccggcccgaaaatcccgagccgggctcgggccttgattttcagctcgacacagttttcgggccgggctcgggctttgatttgcagcccgaaaaaaacccggcccggcccggtatgacactagactcactagcggaaaaggcccagcctcaggaagcccagcaagccacagtgcccgtttcgtatacaacccagtaaatctcccgaaccggtgaaccctagattcaatcccccgtccctcccgctgagatccccttccctggcggcgcatccatggcccccttcctctcgtccgatggctcggcgccgccacagccggccccttcctcctccattcacgcgccaacaccaacgccagcctcccatcccctacttcgacagtgctgcgctggcgggcctcctgtactgaagcttgagggcgacgtcttccctaccgcatccgtgatatcttgacggtgtctcccgcctcaggtgctgactgctgaagatttgaagccatacgacgaagcccgcatctgtgctataatatagtctgtgccatctcgccggtaggaaactgagatgtatacccagatctgtaccttcgtgttctcctccattgcaaaatgtatactgttgctagtctgagatgtatattgacgctggcaaaaatctgtgattacttgagttctcttagccgagatcaagttattatgacatgtcgagtcggcgtgcttattcaaccctgagccgagattcctttctcctccatggccgacagtagaaaactcgcttctgccgacactggtgccacctgtcacttgtactctgtgctctgcttaagtaactggaagataagacccaaagtactgccggcgcgccttttgaggccagcgtgtcgtcccatcggacagtaaagccgacagaccattaagagaggaatatcggttcccacgcggatccttatcctgaaggatttgacgggatttactgcgccacgccgcgcagtaaccgagcgcgtgcgcgttaatggggttgattgcccccatgatcgtgcgcggcctttccgttggccacagggatcgtgggcgcggaagatccgcgccccattagtgcgctgcgggtataaatagagggagggggcgagggtgaaaacccttcgcactcccccaaccttctcgctctcctctgcttttctctgctcctcgcgcgctccgccattgctgctagctctgagctcttccgacgccgtgcttcctaactctcagcaaccgagctcgccaccgcatcttcgcgcgcgctagctcggttgtccgccgccgcttttcttgcccgttcaaggctttcgccaccgcctcttcgctgtaaaacctaaccctagatctattctccgagcgatggcctcttcgtcccgcgactattctgtacaatttttgtatctgatttagtatcatttttgtgcatgagtatgactattctgttgcaggttatgtcaatggccgggcttcgggccgggcctcgggctttcgggcttttggtcgggccgggttcaggcttaagttttaagaaaaaatcggacttgggcacggctcgggctttgtatttgaaggtcgggctttcacaagcccggaccaaaacccggctcggccccagacggctcaggtacaggagtaactgtgtcagcgagctcgtttacacctcctccctctctgccggtctgcctcgtcagtagtcggctactgtaccccctcggcccctccctccctctgccgagcgacccagtcccctcgctcctggatcttcttcctcttcggccgagcgccgccacccatcacgttgccgagcgcccatcgtcttcctcctcgcccgagcgcctccaccgcaagttgatctccccttcgattctctcgctcccgaccgtttctcctcccatcacaccacgaacggattccgccctttagctccccgtttcataatcttccacaatccgtaactgaggcaaaaatcaaggtagggcagccgcccttgccctactgggtcctccgcccatgtgcccgaccactacaagaactgcattaacctcgcgttctctgttctttctttgcttcttggaccaggatccgctccgcgcctgacccgattcacgcgaagatggacgtcggcggcagcgatggcgggagcagcatcaagaagtggaacgtcatctacccggtgtacctcaactccaagaagactgtcgccgagggccgccgtatcgccgccgccaaggcttgcgccgacccaacctgcagcgagatcttggacagctgcacctacctcaagatcccttgcaagattgaggtacccatatttgtccccttctttttgttgaaattttgcagttcgagaccgccagttcccttggttcttccttagatttttctaggtgttgttgtttggactgcttatggtgtatatgcagcaggataaggcgtatccgcgagatttcttccagagggg

SEQ ID NO: 2041 - DNA, 909 bp, Brachypodium distachyon
  Intron number 5 from transcript Bradi1g46180.1 (locus Brad i1g46180) derived from phytozome v7.0 (chr-ID Bd1; pos 444 95861 to 44496769)
acaccacaaggtaacaaattgtatgcatttgtgtgtatgactgcttctaactaactttgatgtttttcacctggttaattctgaactccatgatgtatcactgctcttctctggttgactgccaaatgaactacgaaaacttattgttcgcaatactaatgctgtgctatttattttcttttatctggataaggtattaaaaattgctatctgggactgtgacatgctatcatgaggtgtattccttccacttcaaaatataaggcatagtttgagttgggacaaggatagtgtataaaaccaagagaaaaaacaaaaggatcttcatatctttctttaaatacgttggaaatggaagagagattagtttgtgttttgatcatataaaatgtgatagttgatgacaaacgatgaaaaagctcaacaattgcgctagtgtgccttgttttcttttttgactgaaagtgccttatattctggaacgatgctggaaagactataggccttacaatacaagcacacagaatagtaattatacagaaatttcactttttcatgagttgcaatcagtatggtgtgtaactatctacacccagtgtgctaatatttcacaaaaattgtatcgtcaggtgtataacctgtagactatgatatttgacatgccacaaataaaaatccaacagttctgcttgttttaacttttgtaaattccttgatagttgggcttgttttcgaactcggttgtcagagcatataactagtccccgaggattggaaggccgattctgaaatctgaaatcataaaaaatcttctcaactacgggtatctgttttgatgtaggctcaaatgatatatattttgtattatcaacaggtacattgcctagaattgaaagcaagaacttaact

SEQ ID NO: 2042 - DNA, 16116 bp, Brachypodium distachyon
  Intron number 1 from transcript Bradi2g24890.1 (locus Brad i2g24890) derived from phytozome v7.0 (chr-ID Bd2; pos 226 83227 to 22699342)
agctgagtagggacgtcatcaagtcgctcttggcggtatgttcttcgccacacttttaactcgctctctgacgggcgtgccggcgcgctagaggtaggagctgtgaacgcggtggtgctcaccgaatcactaggtcggggtttttttcgactcggtctctaaaatataatacccggactttacggagaaattttgctatctgaaatttcggttacccgaagtttcggtctttagtttggtcacgaccgaaatttacaaagatgggtgataattccaaaacaaaacatgatccggtacaaattttaacaacgtttcacttatatttccaacgatattttcatatcaacgtgggcgccaggggtttgcaaagtgaaattgtcgattgtccctgttttgtcgtgattttgcatagggagtggtttggcgcctaggttcggttaggagaatgggttggtttttatgaagttcggtcctattcggtctttcggtctttgtgaattgatacctgaattactatgataaaattcggtctataaaattttctacccaaacatctaattggtctttcggtctcggtctttcggtttcagtctcggtctattcggtttcggttttcggtcatcggtttttattatagtaattcaggtatcaattcacaaaagatgccgatctagctgccctatgatcggtttttgtttcgaaccaaaaccaaaacctagtgctagcacgtgtcgaactaggtgccctatgagcactaggtgctgaactgaacatcagttggggctacctcgtcatacccaaactaagggttttcgactagggagagcacgggtgtgtgttggcgatctcgtcggctaacaaggacacaggggacacgatttacccaggttcagagccctcgaaagataatacccctagtcctgcttgtctgatctggtattgatggaaagattacaaggttgccatggaggcgtgcatgagagatgagatctgtggatccatcctccccagctccccccctagtgctttatataggaggcgtgtatgagagatgagatctgtgcccaccgtgccgcgctcgccgcgcccgcatgccgcacctcacggagcgtcgggcctcgttgcaccctgccgcgctccagcgtgcccccgcgcccgctccgtcgcgccttgccacacgcgtctgggccacccgcgccgtgcctcgcgcacccgcgtcaacaccaagggtgcccgcggtcgcgcccgagccacgtcgggccacgtaggtcctcaatcgtgctccgcacgcgtccttaccacggcgccggcggcacgctccgaaggtgctcgacaaaatgaccaaggggccggccggcatcaaagaaagggaaattcgccacggtggagctcctctcaccttcgcacaagcagggagaatggcgaagccggcgtgggtctccctggaagacttgaaggcaccgcctacaccttgctccaagcggcctcgtccacgcgcctcgtccccataatgcctcaacaacgacgagcttccgcaatggctccttggctgccaagaccacctccgtcgcaaccaagaagtggccaatgcccctgcaaaacgcccaagaacaccaagtcccgaagaagtttcgggcgccgccaaacgaggcttcggcgccggaaaaatcaaacaagaccggtgtgaagctccaccacgagccttgagctctatttcatagaccacagggagctctttggcgtccgggccggcgaatgcaaggccgacacctcgccgtccttcctactgcccaagactagcaaaaatagaagggagaagaggcgcctttttcgaaaaggaggaaagagaggtggggggagcacccctgcgcagtctcgaccagggctgagcccctcccgtcacccatggtgacgacggcgccgctggaaaggtggtcggtttgaccacctcttccctggaccgtaccaaggaagaagatgaaggagagccgtccgatctagggcggggaacccaccctggccgtcagatcttcttcactaaagcgaaccggtatcgggcccaaccaggcctcggtcccgaaaacgacccaaaataggcccaggtaaaaaaaaggagacggcgcgcccaatagcggcccaaaacaaccggtccaactcgcgcccgcacgtggccggcccagctggcccacacggtcggctcggatcggaaaaattgcggaaaagcccaggaactttcggggaggccctcggggcccctgatttttgcaaaatagtccttcgggacaccggttttttcgcagcgagacccccgggtcccggtttttgctaaataacccccgaaatctgatttctcgcaaggaagatcaccgaagacatgtaattttcccaccaaggctcctatttttcgcaggaaagctatcaaatacctcagcctcacgcaaaggaagaactcggaagtctctcgccgaaggttgacccgaaggcattctcaatgcctccagctcaagggggctactgttgtagtaaataaaaaccactatatggacggggccgtaaatcctacgtggcgacgactaggtcaacatttcccaacgtaagtcaaggcgccaacgtggtgtagtcaatcctacattgcaacggaagacaagtcaacaagtaaagcctcttataccatggtcaaagggaaagatgagcttcagtagggggcaaaaaaggtgtgggaaggggacccttggtccatggtggaccatggaccaaccttactttccgcacttggtgcacacaaaagttatggaccaaggagttacttttaccattttgcccccacttttctctctccctcgagggtagccatggtcttttgtcatgtactcctaggctataaatacccccccaaggaggcatgtaccattcactctcaacttgaataaactcaaggggaaagagctagacagcctctttgagaggagctctggtttcgggatctcggaaagcctcgttcggcccgagcccgaaggagagggaatcgggttagagtcctaagggcatctcaacctcgctacttgggaagcctcgctcggcccaagtacgaggcggcccctttcgacctctagctaagtgattcggggagcctcgatcgacccgaaacactttgaccaacgatttcctcgaagcctctcctaacataggattaggtcgcacccgcagggtcgactgaacctatttaaaaaatatcgacatgtcaacttgtccaagtgtacggcgaccttcgctataaggccggcgtacacgtcctacttttatgcacttgtgccatcgagctttggcaccccttactctaattgttgttgagaacaacaacagtggtgccgaccgtggggaaccctcgccgcaattgaagatttaatggccccgacaaagcctactttatcgggccccaaacttgccacggagtctacaaggttgcaaacgaagaaagcaagcgcctcgggggctcccgaggaagaaggaatcctccccaatccagacgtcaccgcatgcatggtcgctacgacagaagtcgtggtggctccttcgctcccggccgtccctgaaggaaccgaggtgctcgaaaccatcataggcggttcctcgacactcaccgacgtagtggcaaggttcggcgagcttcctacagttgccgaccctgcaggggatacggaactcggcatgcctcgctcgatgggcttcgcgccgccttccctacaaccggtaatgaccctaccatcggaacctacaagaagaaacaatgtggcgtcaggaggatccatgccagaaaaccaaggagtcccggcttacgacccctccaacccgggactgcctccactggcgctcgccgccatcgcccatggagctccttggtatcatccttattggggcttccgccgcaaggcgctctccaagtcacgcacgttcaacaccaacctcgctttgcgagcgccccttgcaaggtggcaaccaggtaccgcctcaggctgcacctcgtagggaatgagaccccagcgtgcatggcaacgagcaagtggcggagtccggagaccgtgccgacggcgaaagaaattcccgtggacgctccgaccccccaagaaaactacgagatcattctccaaacgccccttctagcagcgaaagcgtctccgacaagggaggacctcgccgtcgaaggaaccggaaggaccggccgacttgtaacccgctcacgcgggagattcaagacgcgctttttccgccaaggttcaagctacctacaatacggccgtacgatggggagtcgaatcctcttcagttcctggatgtctactccaccgccatacgggccgccgggggaggtcccgtctagatgtgcaacctttttccgctcgcgctcaccgggatggcgcaaaccgtgttttataacctgcggaagaactccgtgcactcgttggagcgcctccaagaggtgttcatcgccaactttcaggtaaatttcaaagaacccgtgcaggctcacgagctatacgccgtgaaacaaaatccggcggaatccctccgaagtttcttccatcgctttgcgaagatacgaagccaaatcgccaacccatcgtcgaccaccatgattgacgcatgcatgcaaggccttctccaagaagaagtgaatcgggccctaggttgcaaccccccaaagatgaccgaggagctctatcgaatcttacatcaagctggtaaagcaaaagcttcggaagctctccaccgagcgaagcgaagtcatcaagcgagaaatcgccaaactcttcgacaccgggctcattcgagaagtttgcaccccgaatggttagccaatccagtcttgctgaagaaagccaacggcaagtgacgaatgtgtgtcgactttacagacttgaacaaggcgtgcttcagggacgactacccgctccctcggatcgaccaactggtcgactccacggcgggatgcgaaaggttgagtttcttggatgcctattcaggatatcaccaagtccacatggcaaaggaagacgaggaaaaacccagcttcatcactcccatcgtcagccttctgctatcgcaggatgccttttggtttgaggtacgccgccgcaactttccaacgcctcgtcagcctcatcctcaaagaacaattggggaggaacgccgaagtatacgttgacgatgccgtcatcaaaagtcaaattgcgaagacccatcccgaggacctgcaagaaaccttcgacaatctacgcaagtatggcgtgaagctcaatccggagaagtgcgcattcagagtttgaggaggaaaactcttaggcttccttgtctctcaacgagggatcgaggccaacccgtaaaaatcatggtgccaactatcttcccactcaaggaaggcttcggcaacaaggaggtcaccggaagaatcgccaaatgggcaacggaattggctcctttctcgttggaactcatggcaagaacggccataaaatcccaagtcccggctgattccgtgaccgagtggcacactccactagtaccgcccaaagaaatcacatccaagaccgacccccccgaaccacattggataatgagatttgatggctctaagcgcctcgacggtgcaagggttggagtcatactcatcagccccgaaggcaagatcttggagtacgccgcccatcttgacttcaatgccaccaacaatatggcagaatatgaggtgctccttctcggacttcaattggccaaggccatgggagttcgacaccttctcatccaaggagactcccaactggtaataaaccaaatggacaggtttggtcaaaaaaaaaatggacaagtcatatcaatgccttgatgaaaggatgaagaagtatatcgaagaagttcgcaagatggaacggtatttcctgggcatggaggcgcgacgcattccacaaggagaaaatcacctggctgacaggttagcccgaatggccggttccaaagaaccggtgccacccggtgcatttttcgaagtaattcacgccccatccataaagtaagaagccgacgcccttaacgaagtttcaaagaccagcatggtcatcgacactccacccttttggatgacaccgattatccgcgccttgaaaggcgatctggatgaagaagcagaacgcccgggtgccgaaactctgcctgcaaaaaccgagatgtacgtcccactcaacggcatcccacacaagaaaggcgtcgtcgctttgcttaagtgcatgttccttgaccaaggagccaaattcctacccaaggtccacatgggaatatgcgacgaattttttcgccaagtgcgaccgtgacaaaagctttgcaccgggggctctattggccaacgatgatgcaaagctcaaactgaaggggagagggctaaagagcctctttaaggagctctagtttcgggatctcaggaagactcgttcggcccgagcccgaaggaaaggaagtcgggttagagtcctaagggtatctcgacctcgctacttgggaagcctcgttcggcccaagaacgaggcggcccctttcgatctctcactaagtgattcggggagccgcgatcgacccgaaacactttagctaacgatttcctcgaagcctctcctaacataggactaagtcgtgcccgcagggtcgaccgaacctattcaaaaaaatatagcccgacgaaatggctatttgcccgcaagggaacggaccttctcgggccctccccttgcatgcaacgggggctggggacatgttatggtgacaggataatcaatttccacttctccgagaagatcaaggcataaacacttccctgaaggatttgcgtcgcaagtcatccaaaagtttcgggaaaaacgtcatttcaccaaaatgatgtcccgcaagaattagactccacggaattcacaaaattatgtgaccatctggaagataaaagtacacttcacctccatggcttatctaaagacaaacggcatagtcaaaagagccaacagactcaccctctatggggctttgccaagcagtcaaaattatgataagcaaagaggaatgagaaccaataggcccgtcaagggtgtttaacgagtacacgcctctgcaagccactccacaggccgaacaccgtcatttttggtgcataggagcaaaagcaatgctctcggtcgacgtcgagcgccatgcgtcacatcaagaggaaaaggctcccaaaaaccactgccctcgccttcgcaaaaaatgaagagcaacaaattcaggaaactgccgacagagacctcaagaagcatgccacttataagcatagtgcaactcgcttatacaaaacaagggtacgagaacgattctcctccgagaagacctcaacccgaagctctggcacaagctcggcccttagtgggaagtaccttaccgcatcgcggccaagagggacataaagagagcacgcgtgccatcgtgaaagcataaagggataactcctcatcaatgtatggagccgacaacaagctgccacttctatgcctaaaaaaggccgaagtaaccaaggacgcgcctccgacccttcgggcgagtataagtgccaagccagccatcttcgccaagggattataagcgccctcgaggccatctcctcaaaaagaagggaaagggatgtgagcacaatcatccttggaaaaaataaggtagcacattatcatatgtgttaccttggtatgtgtgagcactctaaagaggctcaccgtcaccgaaaggaaaaccttgtcacttggcatcaccgcgaaaggttaatccccccagtggagagttgctacccaagtgccgctctccaaacttatcatgggaagcctacaccggcctaggtacgtatttcccgcgcggcatcacctcaaaggagaaccttatcaagcggcacccccgcgaaaggaaaatcctcctcaaacagagttgctgccccaagcgccgctcgccaaggaatgctaggaggcctacgttggcccaaagcatctcccaaaatgtctccggacataattgcctcattggcaacccgttccttggtggatcctagtgtgccccgaggccatccaccaagcagaaccaagtccctcaaggaccggaagctccttaaaacgcatttaaggagaaccgtaaataagcgagttatgcatgagtttacttacctcggagaaccatgctacccgtgtgcgagacgtcacgcacgggcctgcgtgatagtaaccgagttaaggctccataataatcgcgggaaagcatagcttcctgaagtccgaagagggaaaattccgcatgaaatttcccgaacggcaggtcgaaatgtccggatcactaccggcatatcgatagcgaccctcacaagggtaccaagatccatggctcataaccatgacctaaggcaccgaagccgagtcgtatcccaacggcgacagcaattgaaagcacaatgtgcaagtaatagcgatcgatcgtgagctgtataaactcgaggaaacataatattctgcaaaggaagaaatgtagtattcacaaacacatgttgagctaaagtagacatttccgttaatgttaaaaacatagcgatacatggaacaaaacaaatggatgcattgcaggcatatggctagctacacgcaagtcaaaaggctatgtcaaaaggacaatatgcaaagcacatacgcaagcatcagaggtgacttgccgactccaagggcgacagaagctcatacctcacaaacaccctccggaagggtgaggtcggaaacccatcataaagtgaggaattttggaccactgagtaccaccgtgctcccgaggaacttccttgcccaacaaggtcatcacaaccttagggctcgccatgttggcctgactgacaaaagtgcgacgaggttaacaacctccagcaagcctcgaacctttcgaaggttaaaggcgcatgctaagactttatggctcaacaacaagagtttgaagcaagaaagccgctcaccaagtctcaatcttggagtgggtagcccacggcaacctacatggcttggagagagcccgaggcctcctccttttttcgtcggcaccaatgtcaactccagaaacaccggatacaactatcacggtacctggaaaagaagacaagtatggtgtcaaaataatcaccaacggtgaacgaagcaagaaaaggcaaaaatgctcaccaaagataggcaaatgagctcgagttttgtgcccaagagcgccaataactcgaacgccacaaagggcgtcgcctgcttgcaaaagcttcggtgacatggttgaaacagcatctttgactggattgccaatcgcaaacaaaacccgtcacatggtgcgtaaccaagttgcgatggaaacatttagaactagggaatctcgccaagattcgctagggggctcacctccaagattgccagacaatcaaggtccatgcttcgatgcgattggactccgctgaacaaatacctcggcaaacaagacctcgattcctttgaggcaaaataccaccaagaatgtggtcaacgaaagtttgcatcccgagaggattggactatatcgagatggtccttgagcaaaaggaaaccctaacctccgccaagtcaaggtgccatcatctcggtgataaaaaatccacaccttctatcttacctgcaacatgggtaatgaggcgcgtgagcaacactaaagaacccaaggttcaaggtttgttgctgcaaaaaatcttcaagagttagggcccaaggctcgaaggccgtcgcaaagtaccatagcttcaagacccatggtcgcgacaaagagcctaaggtacgaaagtaccacttaaagtctagctccaagagctagcacggtgaacccgaggttcggggccgtcgcgaagcagcatcgctccaagagccatggtcgcggaaaagtctagcttcaatagctagcattgcgaaccggcaaagggactaaggtacaaaagtaccactaaaaagtctagcttcaagagtccaaggctcaagggtcatcacaaagtacctaactccaagagttatggtcgcagcaactccgtaagttttcgcaaatgtatcctggctccaagagctagggttactagtataaacccaaaagctcgaggattgtcgctaagagtactaagggtatctcaacctcgctacttgggaagcctcgctcggcccaagtacgagacggcccctttcgacctctcgctaagtgattcggggagcctcgatcgacccaaaacactttggctaacgatttcctggaagcctctcctaacataggactaggtcgcacccgcagggtcgaccgaacctatttaaaaaatatcgacgtgtcaacttgtccaagtgtacggcgactttcgctataaggccggcatacacgccctacttttatgcacttgtgccatcgagttttggcacctcttagtctaattgttgtcgagaacaacaacagtggcaccgaccatggggaacccttgctgcaattgaagatttaatggccccgacgaagcctacttcatcgggcgcccaacttgccgcgaagtctacacggttacaaacgaagaaagcaagcgtctcaggggctcctgaggaagaaggaatcctcgccaatccggacgtcaccgcatgcatggtcgctacgacagaagtcgtggtggctccttcgctcccggccgtccctgaaggaaccgaggtgctcgaaaccgttgtaggcggtccctcgacactcaccgacgtagtggcaaggttcggcgagctgcctccagttgccgcccccgcaggggatacggaactcggcatgcctcgctcgatgggctttgcgctgccttccctacaaccggtaatgaccctgccgtcgaaacctacaagaggaaacaatgtggcgtcaggaggatccgcgccagaaaaccaagcagtcccggcttaggacccctccaacccgggactgcctccgctggcgctcgccgccatcgcccatggagctccttggtatcatccttattggaggcttccgccgcaaggcgctctccaagtcgcgcacgctcaacaccaacctcgctttgcgagcgccccttgctccccccgtcggggtcgagcaaggtggcaaccaggtaccgccccaagctgcacctcgtagggaatgagaccccagcgtgcatggcaacgagcaagtggcagagtccggagcccgtgccggcggcgaaagaaattcccgtcgacgctccgacccccccaagaaaacgccgagatcattctccaagcgccccttctagcagcgaaagcgactccgacaagggaggacctcaccgccgaaggaaccggaaggaccggccgacttgtaacccgctcacgcgggagattcaagacgcgttttttccgtcaaggttcaagccgcctacgatacggccgtacgatggggagtcgaatcctcttcagttcctggatgtctactccaccgccatacgggccgccgggggaggtcccgtctagatgtgcaacctttttccgctcgcgctcaccgggatggcacaacttggttttataacctgcggaagaactccgtgcactcgttggagcgactccaagaggtgttcatcgccaaatttcagggaaatttcaaagaacccgtgcaggctcacgagctatacgccgtgaaacaaaagccgggggaatccctccgaagcttcttccatcgctttgcgaagatacgaaggcaaatcgccaacccatcgtcgaccaccatgatcgacgcatgcatgcagggccttctccaaggagaagtgaatcgggccctaagtcgtaacaccccaaaaacgaccaaggagctctattgaatcttacgtcaagccggtggacccgaagggtggcggggtcgacttacccgaagagcgatgctgccaaagtaccgggtgcgtggccagcgctccgggtgggagtagcccccgagtgtctagccgagtcgtagactcggatagagattcgaagtcacgggccacatatcgtgtagtcgtagttggcgtgtcggcggagtcgcgttggacgtagctgcgcagcggatggcgtcgatgagcgacgagtcgacgaatcggcgagccaaacagacgcgatgagcacttccggtgggagtatcccccaaggctatggttgactgctggtagtcaagcataggctcaaatcttcatggccttcgtgcctggcttgatgtaaactgcagtaattgcaaaacagtttaaagtatatagtcctggtagaatatcttattagcttatgtttattatcttaacaattattgtgttatttgatcgaactcgacgtgctatctcgtacgcaggccctttcattagcctgacgcccgtcgtctctgtcccatgccaacctgtcagttgggctgcaactgggttggaattcatgggtttgacttcgtaggcagagtcagctactcagacggcatgtttgttagcacgtggagtcgaaggtttttcgactacgaggactcggaagtgcatcaagtcgtcggagccgaagaaggtcggctattcgtagtcgattgagttttagttgtttgatcagaacgtgtcatatttaaaattagcaaataaataacaatcttatctgcagggtgtagttatagtagtgtagttttgcgcggcgcagccccgggtatcgggtacgaggaagtcgtttcgcctgcggtgcggggacggtcaaggcgttgtggcctatacgacgcagccccccctatcgggttggggctggcagcgaggccgcggacggagccgacgtcgccgcggcggactgtctcggtgcgtgtagcgtcaaattttcctggcatgtggcggcacagagtcgatgtcttttgcgcagatgatcacagtgctcgtcggtgtcgtgcacgcgttgccgtggaagaggtagacatgtcctcgagttgctgaacctccgcgaacgtgtgctgacatgctggagggacttttctttgtgttgaaatccaaacctgctctggacggctagtcttcttctggatgttgcttgatgctgatcatgctgacttctccacgtgctggtgttgctcgttggattaatcaatcaactggcatggccgtgtgttgctcggctgctttggtgttgtggtgaattgctccttggattaatcaatcaactggtatggccgtgtgttgctctgctgctttggtgttgtggtgaacgcgcaacgatacggaccgcctggctaatgggtctggacgtggccgcgtgatgtgctccgtgtatcggtttgctatgagattgctttcctttctttttcttccagcgccttcctttctttctcttcgctttccgtgactgattgatctggcgagattcccgaaaacggcttttcccttgttttgcttctggatggattcacgagtagaacggactcgctgttgccgccgcctacggtcgatggattggcaagccactgcgccatggaggccgatgtagacgcgctggatgtggccagatcggcgagttgatcgtcctgattcttcgtgaagaattcgctgtaatcttttcaggagccggtcgattcgatctgggcctggaccgcgcggatggacaaggcagggcggcttggtgcttggtgtagacgatcggtccaacggcctcgcgtgcgttaccgtgtagatgtagaagcgccgtcgcgcgcgcgttagcagccggggacagccacgagcccgcgatagacacgaaggttgctccgcgctgttttcagatcggatcggttcttgccgcaagtcgtcggacgagcatcatactccggttgatgacgatgaggccaccgaaatggtgaatccaacacacgttgtcctcacggtcggcgccaatgacgcagggctacctcggcatatccaaactaagggctttcgactagggagagcacggatgtgtgttgacgatttcgtcggctagtaaggacacaagtgacacgatttacccagtttcaaggtcctcggaagataatctcctacgttctgcttgtttgatctgatattgatggagagattacaaaattgccatggaagcgtgcatgagagatgagagatatgtggatccgtcctccccgactcctcctcctagtcctttatatagaaggttaggtctcgggcgtagagtccgggtcggttacaattagaaataaaccttgatttggtttccttaattatatgttcttatcttgagccgcaagccgaggtagttggccttcacggattgtagtgggccttcgagtggaacccctgttaggccgtagcaggtataccaaaggtgagaacccgatgggtcattccctcatcaattaccatttcgaatgattcgaagccagcaccttatcatcaaacgtcgcgttcagaatctcagatcgatttggaatgattttaccgtaaccgttcccccataaccgttcccccacagtgcaatcatagagcatctccactcagcccctccatatggtatccgcgctaggccatatgagggcgccggcatacacagttcatttgagcccgagtcgtgacacacagccccaaacagcaacctcaaaatacaattcaaacagaagttttgtctcaatttcacaggccggcccaaatctcaacaaatcgtcccaattcaaaagtctcaacgaacaaaataacatcaaattcaaataaaataaatatgttcgtcggccgtttcatcctccgccggggttgaaggcacttccgagctcgccggtggtgtagaggtggctggagttgctgtgttgggcgccgatggtgtagccgatgtcgctggcgctctcgcatctcccgtcgtaccattctttcacctcgtcgtccgtgccggaagtgtcgcacatcaagatcgccaagtcctcccgcctctttcttgcttcttgatcaccgtagcccatcgtgaggccggcgacctcttcactctgggcgggggagctcctccctctttgaggcttgtgcggcagcgtcagtcatgcacttctcgatgcatgtgtagaagcgctccgtggacggtgcggcatccctcaccgcctttgccttcttgtggccgatgtgtcggccctccgccgccgccgaaggagcggcttttgggtggtaggaggcatccttggacttggcgagagcattccgcgtctccatgcacttgtcgcacgtctcaattcttgtgaggacgtggataaacttgagctcgacgccattgttgtcctcttaataggcggtgaacatgacgaccatctacaagacgtcagcgggcaaatgtaaaatcggcgacacaacaatgaaggaaaaagaaaagtaaaagacgtcgactttacctgatagcgatgttgctgccgctttggggtcaccggcgggtcaacatctgaaactcccgatccataagccggggctcatgacgccgacgttttgggcagcagcggcggtgtcatggctttgggcggcggcgacgtctatggagaaatgccgggaaatggcatgagtagggggggggggggggggagggaaaaggaggggccaacaaaaatttggacgccgacaaggattggcccgccttgctttggtttttcagcgcagacgccctcattccaatgagatgttacccgacaaaaaaataatccaatgagatgtatatacagtgagtcagtgagtactaactactaaccagtaccacggtaacaccagtgagtcttgatcaaggatgaagctgatgaaattttgcctgccggtgaagcacgaaatcaggaaaggaaagaacctgcagctccaccacggttgttctgcggctcagcagagtgcagttatgcacgtcacgaaaagcgaaatttgctattgagaagtcgtctctttttttaactagagatcagttaatactccagggcgaggttgccccaaaattttgcttcaacattaaatgcaaaatataattaactgttaggctggaatttgggctcaatgtatgctaatatgtgtgatcctgaatttcgatcacgacgcatatgcaggac

SEQ ID NO: 2043 - DNA, 1134 bp, Brachypodium distachyon
  Intron number 9 from transcript Bradi2g28460.1 (locus Brad i2g28460) derived from phytozome v7.0 (chr-ID Bd2; pos 277 87907 to 27789040)
tttgcccttggtgcgagttacattggcttgccgtgcgttcaaagttgtggatcttcttttcatgtcgataaacattgctttttggatgtaaccaatattatagtcaagatgtgtatatttttgagctcctttatgttagctactaactattgtggatggtgccttattttcgatctaactgtcaattaactagaatttgatcatactacagcaccaagtagcaggaagtatgttttcattggtggtaaaatattgcattcagtcctatcacaactgccacttccttacccttgcaaccttaacacatgactgaacctgcaaggctgcgacaagatctcttgcttgcaggggttggcccacaaattgttaaacattcatgccagtctctgcaagtttgtgcaatggaaaggaatgcatgcattaccttaaagctcttggtagttaggcgaatgattgaaaaagtcatttacgttcataaatcttaaccaaagatcatatggtgtgtgtggcggcgaatctacttggctccaactgccacactgttatagtgattcatgacagccattggcctcaaggtgtccaccattagtactttccatctgatgtgcatgtgtggtatgaagctaactgtagttgttggctgagaatttgtgtattcggttggaacaaattattttaggttaaactatatcaaaaatacattgagaaaaattaggcagcatagaactcatataggattgaatggccagaattactctatactaggataccataaaaactagctaagtagctgctacgtactccgcaattcattatgttatttttaattttgacctaacaaatgtttttcacataaggaatgtttcttcttcaagacttttttctgtttcttgggccatattgttttgaaaaattgggtgccatgctatttgtatatatgtaagggatgtgctaatcgtattagattttaggagcataatttttgcaatcgggagattatattagatttggggacctaattttggaatgtatggggatgacataccgtcaccaccaaccttaaactaatatagatattaaagattgtcatactgtgcaggtgggctggccaggcgttatttggaactcttactc

SEQ ID NO: 2044 - DNA, 8489 bp, Brachypodium distachyon
  Intron number 4 from transcript Bradi3g51530.2 (locus Brad i3g51530) derived from phytozome v7.0 (chr-ID Bd3; pos 525 53623 to 52562111 reverse strand)
cggtaaatttttctagtttttctctttgtaatgtagaaatttatttctgaagccattgcctgcttatatcaacactttttttgaaactagtttattaaactgatttattcatcaatgttgatttcccaatcttggtatacattttttttaaggatgatatacttctcgtatgaaacttagcatctatctctgtttggtatatcagagtttcatggtccagcttagctgcggaaccatgaaatgttgccctgttgtaaggttccgaaaatcatctgattatactggaaagaaaataaccacttggttacgaactcaactcaaacacatatttgaattagaaaaggcaaaaaggtttctgccactgcctgtaaattctctagtctttctctttgtgatgtagaaatttattgtgaagccattgcctgcttacatcgggaatgtcaacattttttggaaactactttagactaatttatgcaatattgattattccagatcttgatattatttacttgtatgaaactcggcagcttctctgttttgtatatcagagagtttcgtagttgcagccagcttagctgcaaaacaccaaatatcaccaaatctcgatattatttacttgtatgaaagaaaataactgtgtggttactaactcaactgagacataactttgaattagaaaaggcaaaaatgtttctgcctgtgaatactttgcacacagttattaggatatagagatacactagattggacttttctccataaaaataatatcagtctttaaaaaaaaaaagatcagtctaaatttgataacatgaactgatgagtgcaggcttactattactcaacacgtacattttgaccaaacatgtttagtatttatatcgactacttgcacattttggtcctatctcagcaagtgctcaaccgttcgttgaatttgttgctgtatcagctcatttaatacctttatttcggaataattagttacccacttggtcgacgcaggagtgctgcatttgcctttcagcgtatgatgatggtgtagacctgcgtgaactaccttgtggtcaccatttccactgtgcctgcatcgataagtggcttcatatcaacgcgacctgtcctctgtgtaaactaaatgtccgaaaaaacagcagcagcagtggtagtgaagaagtataaatctgtattcatcaatattcagttctctttgctaccatggtaagttatttcgcgacattggtacgtttttgtatctatatatgtctatagttgtaaatatatattgaagtactcaaattgtgatgtgtatgtgttaaaactgttcgtcttgtagatgcccgatagtggaactatgcaaagactcaagtttgcccacttgctttgtgaccgtgtagttgtgttttagaattgttcggttgacttatcggatctgttcattttttgtgtgaggaaaataactatattcattaaccagtggtttaagtctgtcggttattgatatatttcttagtaaatccatttgatgtggagatgtgcagttgcgtggcattgagacgcattttagcatcctgcaacaattcccactgaagtcaagttcttttttgactgaactgaagtaaagttctcgatgacaacagcttataacaagtgccaggtgggctcgagaatagtgtgactgcaaatcctcgaattatggctgttgccgggctatgacctatggagagctggatattttgagaactgcacggtttctgttttcgtgcaatcgggccgtgccgggagatgccggtagaaattcgatggacggcgcatgtattgcgagcttgtaagggcgcgtagaggtgatccttttcttagcgatattacatagaataaaatctgaaatggaagagagagaaattaagaaaggcacaagcattctcttaattaagagatgatcacttcacaacaaggataagtcaaaaaaagacaaattcctcatcgtactagatttcatcttttcttaatatttatttatttaattttatttatctaaccgtaattgtaagataagacaataaatgacgtgaaactcataaaaaaagctgccttagctgctaaaaaaaaggacaaaactgacttatcgatcattgtatgcgacgtgccgtctgtagctttcagtccagaccttatccgtaaaagatattttcatgtgcaagagtgtgcgtttgcctttgcggctacatatggaagttgtgctgtgttttttggagcaaaagtgccccgcactttcggatgaaaattaaacgcttcttcctgaaaattcatcggatcgcctttcgtaccatcaaaggtcgggagaagtagttatgttgtaccgtgtctgtcgcgtttgtcacccctctcgaggaataaaatgtggctcgcctcgccgcccacatctcgccatattgacatgctgatatactttgacatggctgttgattgttgaattagtgcttctactgcaaaacaatgtaacggtgataacaaattaagcttcgggtggttagatattttctcagctgggcgcgatactcgtcgagagcaacgagaggagccgcacgttgctttctgggcgtgtatcggacattgacgatctgggcatgtctgggggtgctagcggccggcgcgcggcgagggctggacagaggagcggcacacggcgtacgttccttgacggcatcgagctctccgtccaagaggtgctcgtgggcgccgtcggcgtcagcgacgaaaggcaccacctccacccgccgtgcacgcgggcagctcccgctggaccgccccctccctgacagcaccgtcgactccaatcgtcggggatcctccaactcctcccgacctgcagcccgcgacgccaaatggcgggcgcgcggctatcacagaatactacagtactaaataggatctgccatgttgcatatacccggtgatcgacagaatacaggcaggctattaacgctggcagtgcttgaccgcttgagcatttgcaggtcttggctagggctgggcaatcgaggttgtcacgggccgtgctcactggaatcgtatagattagaccgtttggtatttctgacaggtgggacccacctgtcagatgccatgtttggatcctgtcagacataccatcaaaatgcctacacttcgtttggatgttgatattgggaggcttggaattgaattggactcaataccaaataagcctatgaattgaattgagatataatacaaattccgttgtttggttgagcaaaacattgatagttggaatcaggaaaatggtcaattccaaatttctgtttggatgtttaattctccaattgaatcggcatcttcttctccgctgttacgtccaccgaccactgctcgggaggggccactggagctctgcgtgcaggagggaggggcgacgccggagcacggcgtggagggtaggggcggcgctggaacacagcgcacagggggaaaggcggcgtcggagcatggcgtgcatggaaagggagatgtcggagatctgcgtgggggcggaggggccgcgccgaagatccgcgcgcagggaggaggggcgtcgccgggggatgggacgagaggaggagctcgtgcagacatgggtgatggggttaggccaagggaaaagggaccaggcacaccaaccggagatgaaggagacgagggcaatggctctccatctacatcggccttcaattttcttcctcctcctctgcctcaggaaagggccgcctggagaagaagactcccatggcgtcggtgggaagcagtgtggctcccatggtggtcgttggagaagcttcatcaatggtgccggtcagtggcggggagcctaccaaggttcgcatgcgaaggtcgccaaccccgacggtggtgccggtcaatggcctcgctcatggcagcgtaatgggcagagagccttcggggtcggggactcgtttccatccaactaggggattcccggaaaattctatatgaatatgattttataaataaatgataataatatgattttatgtaaaataaatatgaatatcgtaggacaaaacgattttatcattcataacacctatgcaacaaaacaataggtgtaattttgatgtgcataaacattaacaatctcaaagaaaccgaaaagtgaagtttcatcaacctgaatatttgcagatcttagaaaagttgacatacatatcatgaaaatatgtgtgtttggtgaaatattgtatgcaacatgaagatgaaaaatcttaggtatcaaaatattaaattcgaatggaccaccaaattagattcctagtgtacaacatgtggatggtgatgtgtaatctttgaataaccataatgtggatcatgatgtggacaccttgcatgacaaatttgcaaacattaattttacttagtggggatcaactttataggttatatagatacgaagggctacccctccgaattggagacaagcccttttagttgcccatgattccgtgtggtattggactccaatacgtcctctcaattccttggtcatccaaacagtggaattggaccggtctaatgccaattccgaatttctagcttgaatactgacatccaaacgttgtgtcatcaaaatgactattaatgacaattgtggcccgctgaaacgctatcactgaaaagtgcagttctgtgaaatttacatttgtgcttactttaacggagagacttaagtttaacttgcttcaatactacgactaacatatattactcgcttcgtttttttacaagatgtttagatatgttttaagtaaaaacttagtaaaaggtggtctataactctaaaacaaaatgaataaataaatctaatttaacaattttgatttcatccgttcacagcagtatgatgtctttacttgggccttctcccactaaaaatatgcctacgtttggtcctctaaaaacagcccacgtattctctcgctgtaagaatcgaatttaaaagtccgattgcaattttgcgtacactacttcgctgtagctcctagccaagacctttttctgagtcttcccccatctccacaggggagaaggtcagaaagaagcacacaccttcctcccgatctcgctagggttcccgcgatggcgaccccacaatcccccagcccccgcggcgacgccctccttgactcggcgccgcttctcggcggccgtgctaggcgtcgtggcgtgctgcgccggccatcgctccgtgggacagcgcggctgctgcggcagggcggtcggcgggcgatgcgggagccatccctgcttgtgcgggagaccgccgcggagcagctggaggagcggcaggccgactgggcctactcccgcccggtggtggcgctcgacctcctctggaacctcgccttcatcctcgtcgccgctgtcgtgctcgtgctcagcagcgacgagagcccgtctgtgccgctccgtgtttggatcgccgggtatgccgttcagtgcgtcctgcacatggtctgcgttgccatcgagtatcgcgtgcgccacggccagcgtggcggaccctctatggccgccgacgaggagaggggttctgatggatcgtcctcgtccaccgacgaagatgccggcgaaaacgttacccatggccgcattggcgactgtgtcaggtaatatacatgacatgatgttgagagtgatttgtacgaatactattctcatcctttaatttgggtaattttagtatcttagtcagagtaagtgactgatgccgtaggtttcgttgttccctgtaaatttgcaccgcagttcatgaatagtccctgtcctagtgttccttgcttgaattattctgtgtggttgtaatttcatctgagtggaacagaacagggagaactatatatatgagtctcaatagatgtagaatgaactgtttggcttctactggacatacaactcaatgtaagtgttggatcaatactacctctgttcctaaatgtaagaagtcctagctttatattgtgaagacttaataaaactaatttagagttgcaaatgttggtagcttttctacgaaatctggtcaaactcgaagaagtttgacttaggacaaagctaggacttcttatatttaggaacaaaggtagtattgatttgtatgctattttctgaaactgacagttgaagtggtctctcaattactactagcgagtagctttcaagttatctagagtgagtgttagaatgggaacagtaatgagagaagttgagcaagtaccttgtcttcgaagctcattagattagatttctccgctgtttcttgtgttgcatcagttttggcaatcttcttaatatcagtcatcttccacctagttgcttttggagttttggtaatccgtgctaatttagttatgccggttttatctagctatgaggaaattgttttccaaacatgagagctactacaaaattttctgaattcatttcaccatcgttgcttctgttttgccctactgcccttaaattagtaagaaacctgtgtatacttttgcagttattgttatgttaatttcccaccatgttttatttccttactgtatcttttgtttgttatataaactgttgcagtatcgcgaaacatctggagtctggcaatacaatgttttcctttatatggtggataattggattttactgggtatctgctggtggagaagttcttatccgtgatgcacctcaactctactggtacatatactttgtcaagatatgattggaattttttgtatgggtcattattttatttgtttgtcaccatgaacatatttccttgcaatttcctttgcaggctttgcatcgtctttctggcatttgatgttttctttgtcgtcttttgtgttgctttggcttgcatcattggtattgctgtttgttgctgcctcccttgtatcatagcaattttatatgcagtctccgatcaggtatggcttctcacatatgtattatataaatgtctattatttggtaatgtatccggtgcagatgtatgctagtttcactggatctcctagctcttgtgtattcttatgctgttgattttcataagactcgatacctgtcaccagataatctagaaatgttgacaaactcaactggttaagccttgtgaattgttactggccatatacgaaaataaatgtgctccagcatttcattgtgccaagtagtcagattaaaaaggttaagctaaatttatggtcggatttaggcgagcaattacccattactcagccagcattggaatactgaaatatcaagtgttttctgttgttgtgctggtccatatcttatgaagattgtttaattatactatattactccctccgatccatactaattgtctcaaatttgcccaaatatggatgtatctatgcctaaagagcgtcttgatacatgtaatatttcgacaattaatatggatcggagggagtaaattatttctgttggtattgtcaaactgttgcccactgtgcacctgcctcagctcagtgtgactgacatatgggtgcttccccaatatctgtctttatggacatatattgatgttttaaattgcagactgatactgtatttggtttcctagcttttcgtaatatttctgggtgtgtattatgttgtacagtctgtgtacgcataaataaagaatataactttcatttgagttgaggaataaaaaattctgttacaatctgatgaatattaggagggagcatctgaagatgacattcgccaaattccgagatacaaatttcggaggataaacgagcctgaaaagcaatctgtcagcatgactggatcttctggtggaatgatgatagaatgtggcaccaaccaacctattgagaaagtacttgcagctgaagatgcggtaaatcctctagatttctctttgttaacgttgaaatttatttctacagcattgcctgcttatatcaataatttttggtaactactttgttatactgattattcccgatattgatatatctatttcttgtatgaaacattgaaacctggcatctatctctgtttagtaatcagaatttcatggttgcagccagcttagctgcggaactatgttgccctgttgtaaggttctcaaatcatctgattaaactgtaaagtacataactatgtagttacaaactcagctcaaacacaaattttaattagagaaggcgaacaaggtttctgcctctataacagagtctaaatttgacatgaactgctgagtgtgggtttactattactcaacatttgcattttgaccaaacatgtttgtagtctttatagtgtctacttgtacatgttgctcctatctcagtatgtgttcagccattcgttgatttcgttatatcagctcatttaatacctttatttttgaataattcgttacccacttcattggtgcagga

SEQ ID NO: 2045 - DNA, 1257 bp, Brachypodium distachyon
  Intron number 4 from transcript Bradi1g01710.1 (locus Brad i1g01710) derived from phytozome v7.0 (chr-ID Bd1; pos 113 7484 to 1138740)
tttacaggactagccctgaacttctgctgaatccggtaagggagactcttttagcaggacctcaaattctatattggattaagttcgtaagagtaattcgcatctatatatgaattgattgttttccatgcattctccttctctcatactgattttactgcaaaagattgttccaactgcataatctggtggttatttaacagtcttgcattttttttggttaaatgcctctttctaacttccatgtgctccggaattgttcatttctcagaaaagcattactcctcaatttggagctaaagttttccattttatggattgtctagtgagtagaatatatctgtagactgctatggcggtacggcctactgtagaagaatgtgtactccgtcatgtaacaagctgacaagaaataataacgttgtcgtcattttttcattcaaagtttctaacaaacaccctctcttcactggaatacgctgggaattatcaacagctttctttgatggtgatttttcttattactttagttaacattgtgcttaagaataattctgcttcactgggtattaaatgttctttcaacatgtcatgtaattttcagcactcccttgttattactgtctttggtaggtaattacaagtatataggccagcactgaccctgacgtggtatctaaacaagagataagcaagtgcttatatctgttatatgatactttatggaagcactaaactggaacagttacattgttctcaatatgtgtgcgcatgctcatgcataactctggaatcatatcttatggctgcataactcgacatgctagactttatgatttatgcacatgcataacttattggaatctatgattgaatgttttttagaacacttgactataattatttaggcaccaattatttattctttctcagaatacttgcctttgttatttaacacgacataacaaaatttatggattgtatacccttaacgtttcctatatgaaattgatattcaccaaactctggaatctatgactcagcatatgccataaacaagaatgtggtaacaagttcaacgacccccatattgatttaacacttctgaaccctactgaatgaattgatgataacttgcatatgtagtctacactatctttttatgacgatgcttctttagatatgaatcctctggaaaaaatatttccttaaaatcgtgattcataatctagatattttccttttacaggtactcat

SEQ ID NO: 2046 - DNA, 4443 bp, Brachypodium distachyon
  Intron number 11 from transcript Bradi1g60300.1 (locus Bra di1g60300) derived from phytozome v7.0 (chr-ID Bd1; pos 59 605019 to 59609461 reverse strand)
ctgcaggcggaatagaagctgtagctgctatccaagtatgttttacttagttcttttgctttcggttgtttacttttcttattctattatttatgcaatgtcgtttttgttcctatcttgcacttccatggggcttcttgaaattttctgcactatcgcgtttttgcccaaatgttcatccaatatgatgatgtcatggccagttgatcatgctatagtaagataacctacatggcctgttagaattggggtcttggctttcctttcctttgcgacatggctctaacagagaggtgtaattactcacctttagcacccaggcttgtgatggttgtgaattcagggtgtgcattcggttttcggttcggttaatacggtttgtatacttcggtttatttggtttcatataaaaatacggttcggttcggttataaccaataaatttcggttcggtttcggttataaccaaattaaccaaagttgacgcgattttttgtgcaacacataatttttttttcatgtctttcaattttcactgtataatgtgaaacatcgattagcctacagacgtcaatctatgttcctttttgagtcagttcacaaattgcacaactaatagccttgaaaattgatctagtcattcggctgcctaggccttgctgagcacttgccaaatggttataaatgttgtacacttgcaaatggcagactacttagtattaaatgttgtagacttgtaaacagtagctctgcttttgttatagtagagcagtactagttttttgttcatgtgtacaagaaggaagaagtagaagcgtagtactagtgtactacttttctcaaaaaagaagaagcatactacttttattttgttgcgacaagtagaagtatactactagtactaccgactgctgccaaagtgctgagcagtgtgtcaggcaggccatcgatccattctcgaaaactaaatagaagaactcatcggaccaccggctatcggctacgaggccctgttcatttacctgtcggcccaaccaagtgcaaatcacaagcaggaaccacacaagcaggaacagagaacgcacatgcattagatttagtaccacctcggcttggtaaggagaaatgaagctctaccaggcctataaatataccaggtccgtgcgtcgtcggtgtccattgaacggcaggagcggcccgcgcgggtggcaaagccatctggtaggccaaaattaaatactccctccgtccaacaaaggatgtctcaactttgactaaatttgaatgtacctatacactaagtcatgtctagatagattcaaaatttgacaaatttgagacatcttttgttggacggagggagtattaaaatatttttcgcttttgttcggttaaccaagggttttttggtttctaaccgaaaaaaccgaatgcgaaacggttagcagatttggaaaccggaaccgaaaccgaaaaccggcaaaaccggaatttcggttcggttttggcttttcccggttcggttttcggttccggttcggttttgcacaccctgagttgtgatgatagataatttttaaaaaatttcgtagttgggcatcttttctactccttccgttccataattcttgtctcgaatttgaccaagaatggatgtctctattcctaaaaagtgtctagatacatgtaatatttcgacaagaattatggaatggagtatttaaatacgctcttatatgcgctaatttctaattataattcactgattcactggtgtcaccaactttgaattctatggattgtgcttttggctttgggttttggcttataccatcatgtgacaatatccagtcaaaatccaaaaaggcaaagccttatacaagccaaaaatcaaaagccacaagttatgcctatccaaacagggcctagattaataactgtatgcacaatgcctttataatcttgcagcgttatctcaccctgagttcatatgccactctacccttaagaatccttatgctgagggcaaaaacagttcaaactaacagaatatctaactaccccctccttttattttcactgaaatttaggtatatggtactgatgtatgacatttttcataaatgccagtgtagttttgatttttaaataagccgttatttagccacagaaatgtcaaggatttcgttatgtgaagaactgggtaacatactcctgtattcttcctttctcaccctctccacccatcaccgacctcctccactcccacttggcggctcaccactgaatcatgcactgactaccagctccaatggggcgagctcgccctgcaactccaacaaccctgacacccttggtcgcgttgaccttgccttggaggtcaagtactgtgacttttgaggcactgtgtcctagaggtttagtgtttagggagacggaggtggacgaggtcaaggagcatcccagcttggctgtggacgtggaggtggagaagaggcatccactccaaacttggggatttcttccccagatccattgctgggtttatgaaattaccgtagggtatggaggatgtgaaaggaagaatacatatatttatcatccaggttttgacataatggcattctccaaatttctgtacataatacttgtgtgacgcctacttgtgtatttaacaaaatttgtagtggtatttcttaaatcaggcagcttagacatgcattcatgcttcgtacttattaataactgtccaacaatcagctcaacagtatatggattatgtcacaaaggtgagaagcatcggatttatatttgaaagtgttcatataatcatgtttggcaattattaataaaatacagcaaatgaaatcaacagctctcgtttgatttaggacaccgtcaaggttgtcaggtcgttttagcaagctgtggcaaccccaagacccaggaatgcctaggtgcctacactagattatatgatgtaaataaaaatcatgaaccatgcctcatatggcttgaaattaataaataattatgaagcatatggctggtagttaggagatatagtagcacaatagcattcccagttaccatgtctctagagggagcaacagagtgagccatggagcaagaagagggagtagaaaaagaagcacagaagcaaagcaaaaagacggtgctgggaagagattggtagaagacagggcagcagagcaagtagaggcagaagcagcagagagaaagagaacagaagcaggtctgagcagaggaaggagaaggaaactaatctgaattcagctagtctcaaacttttgtggaggtggcagagtgcggaaggcaactaagactgagatggtggcaagcttgctggagtgcaaggatccctccctcacagaactcctcctagtcatctgcctaactctggttggcgaaggcaaagctccctgatgtctgcctctagctcccgggacaatttgatgtctccctccagctgcaaggatgactgtgccaagccatactgggccttatgaaaatcaagagagtttttttacctgaagttatggccatttatcaatctcaatatggacagttgctagacatattttacaaagaggcatcaagtagcatccaccttttattcattccaaggtctgcagattcttggattgataacctgcaacatgtcgtaatttcttgttgtgctactaccaacttcagagttgagagagcagctgccagggacgaaaccaggaaaaatagccaccggtgtcagccactacgccgactatgggactatgccactatggcaatatttgaacgaactaactattgtactggtataacctcacaccatctcaccttacgaatatgactttataagacataaataagaaaaatatgcaaagagggggtgagtgagggagatattttgagattttttggtgctgccgcagtagagaattggggtgcacttactgccaccgttccatttataggagggatgcgagaagccacagagccgccaattggctgaatcgtgttgtagccttgtgagctgtaggtcctagtggggctgactgttggcctgttagtgttacggttgtagttgagctgagagcccaagattgtgggcttgtgaagctgggctgggttcatctgtatgttttggttgggttcaccagcatattatagcatatatactcccagttgaaatgctcagtagcattggtgtcaggtgacaccagcgcttacatgtcatctctgttcctggcagttgcttggagcctaggatggaggatctactgtttgttttgatgcataccatttgttttgatgcaaatgataacattagactgaactcatcatgattgtcttcctcatgatattctatttcctcgtgtctatgcaggctataaggacaggttggatccatccaaatatcaa

SEQ ID NO: 2047 - DNA, 2011 bp, Brachypodium distachyon
  Intron number 1 from transcript Bradi3g01430.1 (locus Brad i3g01430) derived from phytozome v7.0 (chr-ID Bd3; pos 901 251 to 903261 reverse strand)
tcctccgtcgttgtcatcaccgagactgtcaactggtaacgttctgttgcatcctagccctcctttacttcatcaatatcacacgttttgtctgatggttggtagttcattgttgtgattggtaatttatgtttacacggtctggtagtttttgccttttctgtgcttgtggcaaagatgatccagttcaggaacataattgtgattttttgttttgtttatttttgtgtcttaattgccattttaaggtaattagacaattaagagaaaagatcatacgctgtatgagtagcattcttgagtcctcatggaatcttaagaaacactagaccgcaaccattattttgtttttatggccaagtgaatgaagaaggaatacaattttaagtcaggacgttgctgctacttcacctttggattgtctcaccttggaaacatttattcctgtcaaacaggacttatctcatccacttctctttataatagatactccatacaaagaggcagagaactcttatctggccataaaaacctttccagtttgtaccgctaatgcatctactgcatattatacgagcaaattggaagagcaagcttgattaatcctgtatatacattttttttatttgcagccataccagctacgccccccatcccccaacacacacacacacacacacacacacacttgttttttctttttttgctaagtagagtttgccattcaaatagcaagaatagtttgtactcagaaatggtttcgtttgaaataagcttctcaaaataaattaggcagggcaaccatgtgtttgtagacagttcgaacttcaacacacctgccaaatgcaagcaatcagtctttataggatggcagatgactcacatagtttgttaattgctgctatcgggacccctgagttccctaatttagaatttgttttatactagtaatttatgagtaccctaagttctttatgtactaggacccatttctgtatgttgacctttgtttctgtggctatgttttccaacttgtattacaatcacaagagtaaattccattttggaccaccttttgtaaaggggcaccacatttgagaagattgaccataccgcaccacacttaagaaaactgtttccactttgcaccggtttttgttttaaagcgtttctgatggaaagggcccacacgaatggctgacgttgccatccgaaatgagcgccaaatcagataagtcagcccgaccagacgtgtccaacatggctgggcaggttcaagccaagcgagtgtggctctgcatctaatcaaaccaacaattgtgggttggcttgcacacaggctgcacgggtcagccgtgcaggttgagtctaacatggggcatgggtgcatcacaagcatgcatatgaggcatcgctgctacctgcagtgtgcttccgatcaaagttaaggaaagaaaaaagcagcggttgaggcgtctccaccgcttcctctgccagcgtcatggccagtggcttggcttgaacctgcgcccagccgtgttggacatgcccggcggggcgactttctgatttggtgtttatttttgccaccgtaacatgccatgtcagctcgtcatgtggctctttctgtaataaacactttacaattaaacctggtgcagtgtggtgcaagggttaagacctatgcagctacgcttacaaataagtggtccaaaatggaatttactccaaaccacaatgataaacacataaatgggagtatttgtcaacattataccaatgggacaatggccaagaagaattttgacaggttgattctccacgcgtcatacgtggtttgttttgagccctagtattattctgcttcttcccattcttctctcataagcaatttaccgagtgctgcctgatgttaagacgtatgctttctttcttttcgtgcacaagctcctgaatatccactacttgaatatgaaatttgttgagacatctggcaggtattgaggaggag

SEQ ID NO: 2048 - DNA, 3517 bp, Brachypodium distachyon
  Intron number 2 from transcript Bradi2g06780.1 (locus Brad i2g06780) derived from phytozome v7.0 (chr-ID Bd2; pos 519 0792 to 5194308 reverse strand)
aagaaaggaggtgaggacgaaacttctgacaacggtggaccgacggactccttcgaggagtaccgccgggctcaatgaaaaccttgagttggaactgccatggccttttatcggacgcggtagttcgtgcacttctagacctccagaaggaagttaaggctgatgttatttttctttctgaaacgcacctaaatagagatcgggcagatgtagtccgcattaaattaggtttttatttcatgttggtagatgagagtgatggtcgtagtggtggccttgttttactttggaataaagaaaataaagtacgtttgcagtatatgtgtcccaatttcattgatgtcgtgatcggccagccgggtgctgaatggaggcttactggtttttatggggaacctagctgggagaatcgtgacaaatcctagatgtacatcaggcaacttaatgaagagcttgatcttccatggctcatgctcggagcttttaatgaaataatgtatgcttatgagaaggatggtggtaatccgcgacctttgattatgatgcaaaaattcagagaatgcattgcggactgtggcctggaggatatgggtttctttggtgatgttttcacttggagcagaaatggaatcagagagcggctagaccgagctgtctgtaacgagagatgggcggccttgtttcccatgtttggagtaattaatgaagcccctgtccattcagatcatcgtcccattgtggtggatactgaggtccatgctggggctcttgctccatggagcagtggcacaaaattctttgaagctcgctggctaaaggaggagactgttgaaactattgttaatactgcttgggccaaggctgtggctagtggcgcgagaggcattgctgctataactaagcttgttcatgaagacatgcatacttgggattgccgtgttttgaaaggtccagtgaacagaatcaagagattgaagcaggaacttgtactgctgattccattgcaaagcagaaagaattgcaagtgactattgagaacttactggagcaggaggaaatatactggatgcagagaggtcgtgctaattggctcctccatggagacaggaataatgccttcttccatcattctgctactcaaaggaagaagcggaaccacattaccaagttgattgatgagtcgggtatttggcatgaaggtacgatacctttgaataatctgatctctaattattttgtgaatttgtttcagtcggaggttcatgatcctgacccggctgtgattaataaagtcaagccgatcgtttcggctgaaatgaatgaatttcttctggcccctttctctaaagaataagttaaaaaagccctcttttcaattggggatatgaaagctcctggtccggatggacttcatgccatttttttcaaaagattttggcatattcttgaagaagatttggtccgcgaagttcttcatgctgttaatacgggtgtgattcctcctggatggaatgatacggttattgttctgatccccaaagtccagagtccggagaaagtgacacaattccgctctattagcttgtgcaatgtggtgtataaagttatatctaagatgttggctgcccgtctgaaagtcttgcttccggaagtgattagtccaacgcagagtgcttttgttctaggtcgtctgatcactgataatgtgttggttgcatatgaatgtttccacacgattaagaagaaaagagatggtaaatcagacctttgtgcagtcaagcttgatatgcataaagcatatgaccgagttgaatggacttttttagagaaaatcatgctgaagttggggtttcatgagagatgggtcaaacttatcatgtcttgtgttacttctgtcgagtactcgatcagaatcaattcccaagaaacagatggttttaagccgacacggggccttcgccaaggtgatcccttatcaccatatttattcttgctttgttcgtaaggtcttacagccttgcttgcccacgctgaaacctctggtcagttgcaaggtgttcaagtttgtagagatgctcctgccgtgtccaatcttttatttgcggacgactctctaatcttgatgaaagctgatgtccaaaatgccaattgtctgaagtctgttttagatcaatattgtgctgctttcggtcagctcgtcagtgaggctaagtcctgtatttttttcagtccatctactcccgctgaccggcgagagcaagtttgcaccatcctaaacattttgactgaatctctgacggataaatatttggggctgcctacccatgttggtgcttaaagaagtgattgttttcaatatcttgtcgacagggtcagtcaacggatcaatggatggaaggagaaaactctctcactcggagggaaagaggtgcttctcaaatctgttgcacaagccataccatcgtatgcaatgtctgtgtttaaaatccctaaaaccatttgtaaagggataaccgacacaatatcgcattactggtggggtgacgaggaaaaccagaagaagatgcattggatggcgtggtggaagctatgtgtgccaaaagagaaagggggaatgggcttccgggatatccattgttttaatttggctatgctagctaaacaagcgtggagactcattgacaatcccgagtctttgtgtgcaaagattctgaaggctaaatattatccgcataccgatctcacttcagccaaacttaagaaaggggcgtcttttacttggcagaacattatggcaggtcttcagatgctgaagcgtggctgcatttggcgagtaggcgatggcactaagattaatatttgggaggacccttggatcccacagaatcagtcgaggaagattatcaatgtccttctgtccaaagtcagcgaattaattgatccggcgaccgggcaatgggatatagagctcgtggaagatttgttctggccagtgggtgctaatagtattctgcaaattccagtgagcaactctatggaggattttgttggttggcactacaacccctcaggcacctttttcgttcgttctgcttaccatgtagaatggcaacatcaacatgggaagcgactggtacggagttctggtcaggactatgcgacacttaaccctgtgtggaaaaaactgtggcagatccgggtcccggcaaaggtgaagattttctgctcgaaagcacttcacagtacaattccggcaagagccattttggcagatcgtcacatcaaggttagcccccaatgtcctgcttgttgtaaaggaccggaggatatacgacacgccatgttcacctgtgatcgagcgcaatctgtttggaagcatctaggactgcaatcgatcattgacgaagcctgctcggtggacagatcaggttctgtgtcgctagaacatcttatttgccacaagaattccaagtctcccattctgggccatcatccgcttcaaccgcttgttgcagtc

SEQ ID NO: 2049 - DNA, 4023 bp, Brachypodium distachyon
  Intron number 1 from transcript Bradi1g26560.1 (locus Brad i1g26560) derived from phytozome v7.0 (chr-ID Bd1; pos 215 82614 to 21586636)
aagctcttgacgtccccggcctgtaccgccaccaggtctgcttcccttccgcctcccactgcgttggttaaatcggatttggttttgtgcgcgcggtgttcgcgatattgcttaggtgaggctgcgcgggagctgttcgcggtatctcctgcttgtgcccgatcgatcgatatcccgtaaaggaactttgctgttgctgcttagcgctattgcttgtacgagcttgtggcatggggctgacgaagttttaccgggttcggagtgttaagaacatgatattgcaaggttgctcagtagttgtttttgcatttgtttcgccagcttctgtgagcttgcttgctgttttcttatttactactagctttttgcccatgcgttgccacggcccctgcgctccactcgtattagctctgctctactaaattagttgctcagagaggccgctctatgtaaaaaagaataattttgtctcaataaaagatgattaacaagatggttattgcgaatttgtttcggatgcatcaattcagttgtgaaattacaatttgaaaggaataatatatctgtcgcaggaatgcaatttcaattactcactaacactgagcttccatgctcgcctacaaagacatggtcatgtagtttgcagaggaattaatgaaaatcaattggttagatgtactaaattgtcgatactctgcgcatatagaaaatcaaagagatggaaggcatgcttcggaatcactgaaaaaaccaatctacaaacaatgcagtagttatcacatctgtcggaccacatatcagatggatatttgtgtatactaatggtcatttcatgtcaaatctcatgttaattagcacatcctatgttatcaggctataaagaactggaataacaataaaagttagcttccgaggtttgttagcctagtttttggcagtcatataatttcttagatggtcttgcacgtttatgtaggttctactgggttgtttacgcctgtgcatgagtctagagcgcaaggtgttttcagccttgttcagatgggcctatgtaatctggattttagtgttccttcggtagatttgatgatcttgttgtgtatactactccctccgtctggtattaagtgtcgcaattttgtatctagacacattttagtgtgtaggtacatgtgtatctaaacaaagttgcgacacttattaccgaacggagggagtactatactgtatagtgtatgtactagtacttgtggcctgcaagctagatgcaccctcttgattgtttacgttgcttggttcaatttggtgtgtgagcatgatgcttagagtattgagcgtgcgcatgttgtttgtgtgcgtggtattattagatgtaaccatccaagatattaccagatttaagagcaatagttccccattttactagatttaaggatgagggatcctgacaaggttagcaacacatgttgggccgatgtggcaagggggaaatacagcccacctgccatgttggacttgcattctccctgcctgactccgacatggaggagctaatccaagcggtgggagtctaatccctgccctcacccacttggtgctctagcccactccaccaccacttagcagacataagggtggaggcagcgaagcaaaggtgtgggaaggggttggtgagggtcatcaccaattgtctcaactcaccatcgcctgctctactcattattttgcggagataggaatgatgactgagtgggcgagggagatgaagaggttggggattagagtccacctgctagggtcaggtcagccacctcagaggcaagagtggagaatgcgtggccaacatgacgcatggtagggacgttcgttgggttcgattcgacccgtgaaactgccctataaaaaaaaccacacttgtcctgctgctcatgtcgccttcaaggaaaaaaaatagaacttgaacacccctggagcacgggctggcatcattaccttcatcccttgccacatcagcatgatatgttggttgaccttgtcaaaccccacccttaagtctagtaggacgaggaggtattgctcctaaatctggtaaattgtgtcttttttttgcggctatctggtaaatcgtgtcacagagtttaaacctgctaaatgtcacaacgtcacagtttctttgtaaaatttggtatttactctaaacttcaaaggttggctccgcgtctccattttgtttttacaggtagctacatatgtaggcctaatttcttgaaatgttgttttgatttacttcgttcagttttacggactatagtattcgcaggatgttgtgtggtgtttgagatattgcaatttgctgtatatctatttaaaaaacaaccaattggtggaattgaatgcacctttgttttgtctggaggctataaagtcccacattatttcataaaaaagaactactacaaattctttcgctaaccagaaacctgccaccgctgctgctcctgctccctgaccttttcttaggcatgtaatctaagttcctgatgcagctccggatggcaaattctataaggcacactcggattacctaagaacagagagatgatgcagtgaatggtgagcactggcaaggacttgtatgcactccgccttttacatggaataggttgggtgggcatccaaaaagtcatgaaaagttcaaaaattactaacacatctacaacaacatttcaaatccaaattcgacccaccagtagaggaaagagtggataaattccactctgaaaaaacagctaatttatatttgagtgtccagctactattctcaatttctcatcagatttgtccttctgtttcttgatgtgtagtcaaatttggattttaatttctgtgatatggtagaccatagatgcatcaatgttgtcatttctatttgattttttcacgattttttggacatccatgtgacctgattacactggttccacctaaaggggtgagtgcacccaggccgccccccttatttttgccccgcctggctgtatttcacttgttagttgttactacttactagtatttgcaaactgtgcatttctttggatggttttgaagtatactgccctgcagcttaaacttgctagtcataattcattaaaatcaggccagagggccgagaagtgcattcatcctagaaaagtatagttaattctttttacctcttcctagtaatctccttataaatttttagattggcatatgaaaattatataagtagttttctctcgatttgtgatcataatatgtttttttttgttctacaaatatacgtcctccttttctaatataagacgtattagatttcattaggacatggctttgaccagtaattactccattaatatgtggttttttatgacacagaatcacaattatcagtatgtacatttgaaaacaaatctgacgcaaatttcatttcatataaactacatattaacaaagtagttcttgtcaaagccttgtcttaatgaatcccaatacgctttatatgatgaaaaggaggtagtgttacagtaaaaattctggtcaaggttatgttttttgcagaccagtcaatgtgcaaaacaccactttcggggaatagggctaagcaatgttccagtcaatgtgcaaagcgccacttttggggaacattgctaagcaatattccagtcaatgtgcaaactgccacttttggggaatagggctacgcaatattaaacagtctccattattttgtattacattagaatctgctggtgctgccgtgccgcgtcatggttatatattggaatctcctgcgtcatgcaatatttagaagtctccacttcaattggttgagcattgctactccagtcgctatatctgccatccacatgtcatttggatataggatgcctgttttgtgcctgattcatacatgcatgggtatcttgagttcttcacctttctgagatctcaatccttcatcctgtttcaggagtttacctt

SEQ ID NO: 2050 - DNA, 945 bp, Brachypodium distachyon
  Intron number 13 from transcript Bradi3g60830.1 (locus Bra di3g60830) derived from phytozome v7.0 (chr-ID Bd3; pos 59 647781 to 59648725)
gctgcaggcttcctgaggtgattatgcttcttgtttgttgttctattagtttgttacacctgtgcaaagcataaatgtatatatgatgttgcaggtcaatctgtttaccttttctgtgaccaaatatagtttgattctttgtaaccatagccatcaagccatgtaactgctctctcttatgtgtttgtttgctattaatttgttaaattcaaatgcatgtagttcaactatgaaattgctaatggtagtcgtagaagactaggaagtaaatgtgatatgcatgctccatttttaagtaagttatccattagttttcagggtggattttattttctggcagtgatatatgttactgccaatgtaattatggatggctgttcttttcttcttcttctgaagacatacttgtgaagcatatatctggccagattccaattcaaatattcccaaggcctatatcttttagttactgcctctcatgtaggttagagacttagagcctcatatgtgtacagtgtcttgaataagggcttatttcaaaacgccttgcatttctggctgtgatccttcagatagcatgtgaaatatctgcatacattccatagtttcatgaggttgcagtggcagagctgcagtgtaagcgttgggttcgaatgaaccgaataaaaaatgttaaattcaatagaatttagacccaatgctacacttgcacccgatagttgtaatagcatgaacccaatgcttagtttttccagctccgcccctgccaggttgaagcctggtagtagaaatttctgttatatcaattggcatttggcagtatgcgggtacctggaaaattctccattttaccaaatccaactatatggagcacactgatattttttctggatgctcttttatgttctcatatttgtgcaatcattcgacaaatctcaggttgct

SEQ ID NO: 2051 - DNA, 2934 bp, Brachypodium distachyon
  Intron number 1 from transcript Bradi4g04270.1 (locus Brad i4g04270) derived from phytozome v7.0 (chr-ID Bd4; pos 350 2145 to 3505078 reverse strand)
tccggctcggccgcgaggggagcaggatctccttggtatggcgcttgccccccctacctgcctacacgggagcggttcttaatttcgttttgattcgccctctcgagcggattggatgcatgattcgctagtattgttgatattttaaatggaaaagtgcagcttttaagcttttgttactttgtgttaaccaattagcttcagtatcctgtgatattttaaagagacaagaggctttagattcttggatcagaattgtgatttgatctgcatattgtttgtggccttgcttaactaacaagtaggatctaattctgttctgtgaacctactgttcaatttcctgagcttattacattttcttctacaatagtcttaggatgatccagtgtttttattctgtagattcttctgtgttgatgtttatttttctattcgctaaaagatgtacttttagtccaaatcgatgcattttgggagtgatcaatcagatcgttcttcctcttctgtctttggtaatatctctggaacaagcatcaaattgttgatcttgagatgcttcatcccactaggataacaattaactttctcaaaactatggcttaaatgattcggctggttgttcccacagttccggtcaattttggtggtttctttgcatgttcaaatgtgaactcttcatgtcttcattcctcgttgtatctatgtaattggtggttttacatatgatcaacgagtgcacttagctcatgtcatgtctttccaaggggaaaaagggtggttcttgtgggtttgaactgtgtcgtgaataatgtgaccattttgttgctttctgactattgcatactgttcaaacttctgaattgttctttggtcatggttgtgattgtttttgcttgaacaatctgaactttgaagtattcagctattgttaataaatcgtggtgctaaaattactacctttatattccctccgtccggaaataagtgacttggatttgtatagattcttatacaaatctgcatcacttatttccggatggagggagtatctcttttggactttgggttttgcatatctgtaaccaaatttgtgtcaggtacatacggttgcaaactcatgagtaccatgttctaccaaacttgtgatgttatcttgtatcactgtacatatggatgatgcagtagctagaatggaggtgaatgtttggtagatacaggcttctcatcactatgacaatttactttgtttgtttgaatcaaacctggtggttcctttcctttttgacatttctgctaccactcctgaaacccgttacttaatctattaattaatgatttcacctccgaatggagctagcctattacccatagagatgctactagtccttcagtattgtttccaatctgggttactgtcttactgatacatttatattttggggggtcttaggtaggttttggatcttccgagtagtaattggtttaggttcagggtttggtctttgttttgttcaaataatacattccttactacccaatagaatccctacctgatttcaaatttaaggtatttcatagtctggcaactgttcatgtctgaaggtccattcacataatttgtactgcgcctgatcgttttcataagatgttctagctttgtcctaagtcaaacttttgaaagttttaccaagtttatagaaaaatatactaatatctacaatatcaaataagtatgccaaagatatatatcatgtcggatttaataaatctaatttagagttatagatgttggtaggtttttgtgtaaacctggtcaaattttaagaattcttaggccaaagctaggacgtcttataaaaaggaacagatgcagtacattttagggggggccatggaccatggtgcttagtcatcttggcttatgcacttattatttcctgaataattcttgacaagcgcaatcggtagcgctgtatttatacagaaatactaacaaattatcaaacatcaatacagaagatactttagatgtttggactcttgcttgggtatttcattgtgtcctttaggtttgggatataatatagtacctgcgttacctcaaacagtagcatccaccaggacataagatgtgcaggagaagattatcaagtaaaaaatataaatgtgatgaccagccttttggtaaaacaagaatttgatatatgcaccatattactttgatgtttgatcgtattcccccacattacttcgtaatagctaaattggcatcttactttggcttttccttagtttcttctatttttcttctcatgggatatattaccaccacacctagaatcatttgtccagatccatccaaggaactaatgtttcatgcacaaaaagaggagaagatagagggctctaggtttggattgcccacgatacaccccgttattctttttttatgaaaaacagtagggaaatatcctactgcagtatactgtgaacttttattctactgctgatctctgacatgttttcttctgcccatctatttgcgtatggtttccctcattcaacataatcttcatggtcctgaaatgtttccttctagtttcgggcgtgaatattattgagtgacttattatgtgccgcacatttgcttttgaattgatattggacatgcaccaaaaatgtaccacacaacagtcttgttgaatcagtctttgaggcatcgaaaagtttataagcttgctggtattgttgctattttgctgcttatatctgttctcttgacctcgaatatatcatgacaacctttttaaaatatattgttatgagcatgttcttcaaagcactacttgttccagtgtcattatgtcccaaccggttgcatactgaaatcaatttttttttgtgcttgcaggtttttgagagggacagggta

SEQ ID NO: 2052 - DNA, 3546 bp, Brachypodium distachyon
  Intron number 5 from transcript Bradi2g13400.1 (locus Brad i2g13400) derived from phytozome v7.0 (chr-ID Bd2; pos 118 62168 to 11865713)
aacagcagacttgaactttcaacaatagcacatcagtaagcgcaatgcgatgatcttcatctaatcgtgtaggtgcaacacacaaattctgcacctacacggtatattcaattcattaggcttgtttggacaggaagagattagagcacatccctttggattactaagttcttggcaatctgaaatgactaggcctatcccccatcatccagactaagccctttatgggttttctaaatgatctttccttgtatgactgcttatagtcaagccacttttttctcaggaaagatgccaatgtactcatggaatttctgctcttctgttagtagttttcaatatgcagttgctgttttgttactggttccatgactagtttatgtagatcatcctggtgggagacttttgttgataaaacttctggtactttgactcatgttttcatctttttgattcctcgtagtaatcagtaaacacatacagtaaataagaagtaaaaaaaaaataaagagaccagggggaagacatccccttgactttttaattatgtgggcgagtcctcgaatctgggtggctgggttcacaaccatgtgcaccattgcatttgcaccccaagagacttctcaatcagtaaataagaagttacatgtatgttgtcaagtttccatggcacgccattgaaacattgctgtacatcttagagcttctgtgcagaactgcttccagggcatcgtgtccatatatacacaaaagtaaataaagagcaaaatgtgttggatcctaattctattttaaaggcgacaacttggtccaaaatctttcaaaatgcacatccgagtccaattctatgtttaatggttcatcaggggtcctaaactcgtttcgtctagtctgaccggttggcgtgggacatactctgccacgtcgacgtgattgcacttggcgggagttatcccgccaattgcggttgcaacattttgcaaaaaaaccccccccatataaacgggtttcttctcaccccttgcccgtgctctctctactcaacttccctggttcttctcaaccctaactggcgccatgagtggatccgccagctcattgacaatgaagcatggtaagaagactagctcaacaacgacagcgccaccagcagcgcttcctccggcagtgtagatcccactggggtattgcctctggtgaggtgctcagcagcggcgccgtcaacattttgccacaccagggccatctagatggacacccccctcccccacgcaatgattagtcgctgtccatcgttcaccgcccagctctctcgccggagtgccgttcatcgcccttgcaggcccctcagcgtcaccagtacaatggagaacggagagagggatgtcgaatgagaaagaccatatcagggaggttagtgcaaaaattcccttcagcaaattatcccccatgtgcaacccaccaatgtggaaaatgtcaacatgccacgcaagtcagtccgacgagcttgaacgagtttagaacctctgatgaactattaaacatagaattgggactcagatgtgcatttaaaaagatttgggactaagttggcacttttaaaatagaattaggacctccaatgcattttactacccgaccactactttgcccaaagtttcgtacaaattctaatgaaaaaaaatttggcggcacaagataacctcattagaagtttatgcgcatctggactcttatatttcgctgtaggtatcttaataacttcatataaataacctggttaatgagacggggcggtaccaattaatcacctagcaaaaatcaaggctctcaatttgagtaatctttactcctataaatatgtcaatcttgatggtggtccattcatgtcctcctctcatcccaatgtgaaccttcacatttgtggcaaagtgttgtgacgatgttcctgcttgccagcgatgttgggttaaaattacccacaagtgccactaatatacttcctccgatccataataagtctcagatttagtataaagttagtacaaagttgtactaattctgagacacttattatggatcagagggagtataatgcagtgaaggtttgacataggctatgcttggtagcaactcatgggtatcgagctagttcttgatttacttttatgtacataacacgtggttacgacatgaacatctgcatatatgttgggaaagtatagctttatgtgtgagacatgtgcatgcagaactatttgattttgtaaggcttagtttctggtttctaaaccgtgtcgcactgaacttattttataatttgctgcagaaaaaataggcatgaatgcaggaaaaagttggtaggccaaacaattaaataataaaaagtgggtgagataaacggaaaatccaccgcaacatcaaaggagccttagtcagtcctaacattctaataaaaatagttaaccaactagtcatacaaccctaaaatttaagttgactggagtgcgcaaataaggcagaactgtgccatgtgcctcaaggtgttgaaggcaaaatgggcttttaccctttgccccacaaatccattcaattcaacttcaaccatgcacactgattcccatcatgactcaccatagacacagccaaatgctcagccaatccccttgagctcagttgcctgcccgcgtggatttggagcttctggatggcgatccaagctcagttgttctcccatgtctagctgccttgtgtttctggtgggcatggcctgttgctggctcgatctatttctatctgtatacgtgagaatagttgtcctgctgtgcttgagttcttctgaaattcattgccgtttgattaaggtgaagaagaatggtatctcaagattttttacttggagaagagacacaggaatcctgattaatcttgtgccttggcaaagcaagagcaggtcttgttttctctgtagcctatcagatggataggctggttcaggagcatgccctttagctggctagaggagattggagggctgaggcaaaagctaaaggcaaggtttgctcttaacacattaaggcagagaacagggctccaaacaagctgcacatatgggatgaccaagatttttttgggttgcgataccaaactttgggacagtaggaagtgttttagtactaattttcctttataatgtggagatgtctagctcgtcagaaaatatgctattttgcttgtgaacacaacattttaatagcaaagtagcatgctgaaaatcgttctggaactttgttaagtttgctaatgctatatttctccttttccgtccacatctcaagtcttattctgtaactctcagtcttcatcactgtctgttcaatttctctgatgctcaattaaacaactttctcttaacctacatggttttaagtataaggtgtcatttgacccattttcattttcaccgttttcttggtttatcaccagtggaagtaatttcacatgccaaatttctgttgttgtgcagtggggcagggacgaagaatt

SEQ ID NO: 2053 - DNA, 1025 bp, Brachypodium distachyon
  Intron number 1 from transcript Bradi2g10880.5 (locus Brad i2g10880) derived from phytozome v7.0 (chr-ID Bd2; pos 909 9395 to 9100419 reverse strand)
aacaacaagaacaaccaccaacagcagagaaaaaggtttgggccactgatttgtttcctgttcttgatttgttcatctggcaattgctctatacttcgctcctcctgtcaggtttcgttcacaaggcagggtatttattttggagttctttttcttttctccaagtagctacctagcctcacgttcttcagttcttggatgcgtgaccaagagaaaattttgaaacctggaggaaaagaaactttgtaatgaaacgagaggttctttgcttcttgtagaagttctgtacgtagttgttgcagttcttgtcggtttcgtctctgtttctgatcctcctgctggaccgttcgcgcgcgcgtcctcttttgcctggccctgcaagcctttgtttggtgaattgctgatgccaaacgctgcaagttaattatggtttggggttttgattttttgctttcttcggctcagggtatcatgagatctgagcatcagagcgcttgcgtgtactgcttttctttttcttttcttgcaaatcgcctcaccttcgcaagttgatgactgcggtggtgtttgatacgctctgttaagttgtgataattccgtttcattcttgctgtgatttacttttcaaagccaaaaaaatgaagaataaaattttgtcacgttgcttcctagtacatgattgaatttcttaatcggttagagttgtgatatgtgtagcagcaggtactgtaagctcagccgcatgattggtctcctctttgcccaaaggaacacatacacggttttttgtccgtagcttaaatgaatcggccttttatgcttagcctacatgaattggccttctttgcttagattgatgctcagtatctgcaaactgattaaccctcagttacaactttgcttaaaagaaatcctgaatctatgaatcagagcttcagtaaatacccatcaatgcaaaaaaaataaaaaattgtgtgtggcatttagtttggttgatgttctaatagtgtctttactttttccag

SEQ ID NO: 2054 - DNA, 2315 bp, Brachypodium distachyon
  Intron number 2 from transcript Bradi3g14000.1 (locus Brad i3g14000) derived from phytozome v7.0 (chr-ID Bd3; pos 124 57693 to 12460007 reverse strand)
ggcgcattccgggaaggccgtcaaggttaagaaaggtgagggcgacgctcgatctggttttgccctgttgaattagtagcttccttgttgttattgtgctggtttcggagctaggcatgcttgattaggacatgataagatgtgaccatttgctgtgctgtaatcgttactttaattgttagtgctttggttgatggattgctgcttaacttgctgttcatgccttatgtggagatatctggtttagggcactgggaatgttgggttagcagctgagttcatctacctgttgatatctatttggatgttattcctgtagttctactgtgctgatgctgctagtttgtgtaccatggatgtcgggctcttgttatattgaggtggcacattgtgccctatacagcacacaacattggtgagatttaatttgaggggtcatggatttgatttgacttcttattcatctgcatatggggttttgttgcaataggctagttaagttgaagcattacattttggctacctgcacctgccgcttgctacgtagaggattggctttgcgtgcatgaaacggcggttctatttgtgtgttgattggtggtcctgagctgcctaatgcctatacgggaattatttcatcggataacgacaactctgatctggctgtgtagcatttaagttggttggattagttatccgtttctggttgcctttgttaccctttttgggattttatttttgtcgcactctgttctttcaattcataggtgtacaaagattctatggtttcttatgtggacataattttgtcggaagacagtaactgcctgatcctgatatatcacctatttgcctgcatccgtggaagatgacaactatctttgacttgatatttgcttatccaatagggcacaacagattcacctttattgtgaaagatgagcaactgagcatgcttttatgtcaaaacctgctttgtttttattcttctagttatttcagttgacaatgcacatgaagcgtgtgctggcctcatttagttatcgcattgttctagttactggtcagttaaatgatcgttatgttggattcggccaattaccattgggcttgttttatgtttgttacctgtactgttttgccttttatttttattaataactggaaaactcatttaacatcctcgttattattacttctagctgttttttgaaatcccagacagaatattagtactccagtaagctttacttcagtgttgcatttgtatctagcttcattgatatgcttgtcattgtatagaccaggtgtacttgtatggactatctacatgggcttcagtgttgcatttgtatctagcttcactgatatgcttgtcatcgtatagaccaagtgtacttgtatggactatctacgtgggcttatggttatagtgttactgtagaatatacatgtaatgcaacatgcttcgatgcagtcttctttactccttctagtggcaaattttgtctaccgactctacccgactatggatcttggttaacggtctatgctaagccatttagtttcctatcacatttgaattcttgaatttcttctgttggaatatgggttgctattttgtgtgtttaattgctgattcctttagtgcttgcctgttttgctcccacttaatttctgtgcaaattgagattggtatttttttttccaatgaaacatactatttgcttccagaactcaacagttagcagttttatattaaagcaggtgatatatcgacttcagttgctattaccagattccagctgtcgggaatacttgacctttttatgcttgtgactcctcttgtatggatccacctgtttgttaaatgttgccttgtttctgtttactactcctccgtcccaaattaactgtcgtggatttgcataggaaactatgcaaatccatgacagttaaacatgtagttgccaacttgccatctagcctggtatgaaaagcaaatatgcagcacatgaagtttaactccactgtaagatcgctgtttcttaaaaaaaaactatgtgccgagtgatatgtcacatgatagtatgatacgagtgtaagtagttaaccatttatgatctgagttcaattcatagtttagccttttcttattgtgggagttcttgaataccactctgaatttgatcaaatgcttgcactaggaaggtagctgcagtctcccgtgtttcatgcagtactagttctaatttccactattgatgtatacaaaattgctaaaatttcttattaaatgatgttttcaactgcag

SEQ ID NO: 2055 - DNA, 3875 bp, Brachypodium distachyon
  Intron number 5 from transcript Bradi1g60850.1 (locus Brad i1g60850) derived from phytozome v7.0 (chr-ID Bd1; pos 602 11404 to 60215278 reverse strand)
gccccaacccgagagttcctaggtggaccccgcaagcctccgggaggggagagcagcattgcgctggtttaacttcctgatggatgctgtcactgtccatgtttcctctatgaatgatgataggagtttgtcgagcagcagatcgaatgctcggtttatttctatggttcggtgttgagtttggtttacatccagcgatgtgtagacgacgataatgattatgtagcttaacatttggcgtgcccatcttgcttgattttgctgtggacatactcgacagaacaacattatgtgtgtgtggtatctagttcctgtggctggagatgcagtaccccatcttgagtgtcattccctttccattttgcggtttagtgctataaatagttgacagagactaattgattgagatggcacctaactttcagctacgaataatctcacgaggtcttttagttgcaaccacgttgcttcgtcttctctgaaaataggaaatggaatttgttagtatagagctttcaggttcaacctatccagtagtttagaacgaataactggtgagatattttattcgctttgagggtagtaaacatccctgctagatttcaaagggaaactattttccatagaagttgaaaaaaatactaccatttttttacccctaattcacttttatgacacaacctatcccatttaacagaatttctacaatcttaccccactaaagcaaaacttgtgacacaaattaccccatataatgtttttcccatttttccgaattatgatagatcggcacgtcaatcctatctcttccttgtcaacaccttgaccgatcgatcgagttgaaacgatccactaactaaccaaacatggcgcatcttccaagctcttgtaggctctcctcctcctagccataagttccctgagtagggtgttctcttgtttccgtgcacggcgtcatcgttcagtggccgcgacggcgagcaaccatcagcttgctccctccgacgctcttctccatccggtattcaattgctctctagtgtgtgttctctgaactctcgttcacaagcacgttgggctaaaaacaactttgctgcttgagtacatgtttcattcgattgttcagaaaaataatcgtggagcgatttattcgtttggagtctttgcttagtatgtaagggccagatgtttatccatgtctaaaaaagaactagcgaccaagaacaattctggattagttccattgtgtcactaaagtgaaactaaagggtaaataatggaattcactctataaattaacatccaactattgcataggatagatcacataacatacctctcctttttcatagattcaataagcaatgccctcatcgagataagatatatgtgttgccatatgccatcgcataaattaacatctttgtcttgttgtccatctacaatatgagcttggaaaataataacctcaatatgacatgtatttcaacaaaaactacaaccaattctaccaaagaaacatatttttattttcatggtacatacatatatagtgcctgagatttttttttttgccttcagaatgtcatggtttgcacataaccatgtagtggacttaataagaaacacgaccatgagatctagaaagtcacaaatctctgttatggggtgatttgggtgccctcgttgttgctagtactcctcatctctgtcccagccttgcatgatgtcctgcagactaaaatcaggaggaagagagaggaatcagagaaatgaaaaggtattgagagactgggagatgagagagagaaacgtagagattaatttgagtggaagagagagaccacaagatgagaaacaaagagatttaagagaaacaaagagatcgagagatgacagaaccgggagatgaaaaatggagagatcgagggatgacagaaccgggagatgaaaaatggacagaaccgggagatgaaaaatagtccaacagggctctctttggtatctgtgttgcaccggtttcatctgcaagaatccacttcatctcgttttcactacttcgctcctccacgtcaattagatgcttatgtgtcaatctttagtactccatccatttcatattaagtgaatttattcttagcgcatctccaagggcgaactctcatttgtcctccccatttgtccatttgaggggtttttggacaaatggggatgaaaaaaatataaagttgtccaatggcaacctctcatttatcttttcatgagtttttgacatatggtccaagaagacaagtggataagatttggatgagttttgcacaaatggaaactcctcgtactctcctcaaatttggacaaatagggtttccattggttttgtgtattttgctcatggacctccacatagacagatttggacaaaatggggaggatttgggtttctcttgaagatgtccttgctccgttcctctctccctccgtcccatatagacgtttttaaacatagatacattcatacttggtcaaatttgagtcactcaaccacccaaaacactcaaataacaaaaacattagtgactaaaaagttacactaatactcactctgattctattgacttaaatttgttcaaatatgaatctatctattcttaaaaaacgtctagatacatgaaatatttcgacaacaatttagaatcggaaggagtaccgatacaagccgtcaggtgtttagtggattgctgaagatgccctgagaccatcgacaatcacatgtgtcactgagctcattccagaatattaaaaaaaactactcgtactttccactgacctgccaacatttttatgaacatctctatttcgacgtgtccatgcaaccaaacgtaccttgcttagcgtgcatccgcatgacctcggcccgccgcgttgcgtcatgactcacgcgacttgcgccactgctcacagaaaaaaaaaagaaaaaaaaaggcgaaacgctacttgagccactcatcgcccgcgtccgcgttccacgagaggaggttcgaccacgcgggccgggccgggggaccaatgaggggcgagcaagtgatcggatcccggccggcgcctggcgtccactacttcccgcaccgcccctggtcccacccccgagccgctctcagccgctacttaatctaccccccgcaccccataccagccgcaaataagatataaaatctcccctgatttatttaacctttttttcccctgtccatttcgtcgccatacgcatatgcgccgccgtggctgcaatcctgctgctcccccgctcctactctactcgaaaaaacaaattgtgaggggacaaattttttaggccagagaaaaactagttaggatttctccccccggaaggctctagaggccagcagcaaaccctgaggggtggagcgaacgagcactttcgtcctcttgctacgcgcggatacgtctcgaagcttcccgcggattcgttttcccggcggcggaaacatagcggattgagaaggcggcggaagtttcagcttcttcgcggtgattttttcttctcctttgctccattcggtgtgatttgctgcttctgctttgcggtgattgttcctcagatttgtttctctgtaaaaaaaattccctggggtggcttatctgaatagctggtttcccggtgctttgttcggtttagtagctgtttatcggcttttttctcttcatttttcttttgggagcatgctcgatctgtcgtgtttgattcgaagcgccctctgcttgttatattttcatgtgacttttctagtaattttatggtattttccattcattttgcaggtttgatccaacccaaatcgtttggatttggcaag

SEQ ID NO: 2056 - DNA, 1348 bp, Brachypodium distachyon
  Intron number 1 from transcript Bradi5g14100.1 (locus Brad i5g14100) derived from phytozome v7.0 (chr-ID Bd5; pos 175 52598 to 17553945 reverse strand)
tcgccgaggacgtcgtagctcgccacgagatcagggtcagaacttctctggttgctagtttggtagatcacttctggtgggtgcatttgggggttggattcgggtacgatagaattttagcttagattcgactggtttcagcacaaacccatgagattcattgtgcatctgagagtggttaagattcagggttcctcgcaaaaaaaaaagattcagggtaatttgacctggtgttgagttgctttggtcgttgctaggaactagcttaatcgtagatggttttgatgcgattgcatttgctggtgtaattgatggaagatatcggctgccagtgctgctacaatgctgtgactttagttgagcttgcagtctggtattctcctagtgatgaaatccagtcaatgattaggtattgtggatactttaagttaagagcttaacttgatgcacaagtttgatagcactgccaagctggaaaatgttcttgagaaatcataaagtataattgaggattgtggtcccaaccttttagttgaacacacatgaatgatgcacgcgtacgatgcatatattcttatgtggtacgatcccgttaggagcttgtaagttgaatgtgatttgctcaatcatgacacgatcatttagaaataatcatatgcactgtacacttcttatttagattcatttgtcctgtcagtcagaatgaaccgatttttggattcctgcttattactgatgcacatcattacatttgattggcaactgaggttgccccaaaacctgagatctaataggatttctagcatttgcgtcgagttggttctattgctttattgagctggaggtactcgcctttctagttaaggtttaaaaaccttgaccaacaggctgtagcacctgtggcatttttattaagacaaccgtgagcactaatgctctcgttctgttctcataattaggatcagtactttgtacaagcggtactttgtaacgtcatttgtctatatcttatgtaagagttgcatgttaacaatgttttccaccaaaaccttaaagagcaatgctagcacattgagcattccctgttgagacacgtcggtggacctttgaagcaaatttatattcagttattcatgtttacattctgcctgagataataggacagagatgaagggacaaaaagggagtgctaaaggaatcgaaaccaaaacaagtattcacagtcaatgatgggatatgcacatttgttaaaatggggttgtttaacttaagttagatctgagtacagtttactttccactgatttatcgtgttgctacttttattttactgtacaggtgaggtataa

SEQ ID NO: 2057 - DNA, 2948 bp, Brachypodium distachyon
  Intron number 1 from transcript Bradi1g27420.2 (locus Brad i1g27420) derived from phytozome v7.0 (chr-ID Bd1; pos 225 35830 to 22538777)
ccgccatcgcttccggcggctcggctttgtcaaaggtgagcattcttgtgttttattgtgcttgatacatgtgtctgtgaggaatgataccttgcttttgtttgaggaatgattctgtacatatatctgtaaatgctactcacctactgttcctaacaaagaaaaaactcatcttataattcctcttccttgatttgattctcgatcagttggagatttcttggatcttgcttggtcattggtggtgaactagcatagcttagctagactgctactgctagaatatgcttactaattaatcattggtgctggtatcttgtgtatgcctgtgcttttgtaacctgtggtggtatctggagtggagtccaacgccgaacagatcgctaactccagactgtagaatcaaggagtcaggagcagagttgcagatttctatgagtggagggaaaatgaacaggctaactatctacaaaatctcattttcggaatccatagaatgcccccagccaaccaaccctgactgtgtttctctctaggcatatctgaaagctgagcgatggtttaaattttcagaattttgcgcctcctttttacggatggtttccttcagtttaggcaagaattgtcgttacaaagtagtccctccgttcctaaatgtaggaagtcctagctttgtcctagaacttcgtaaaatttgactaggttcatagaaaaattatggaacggaggtagtatatgcaagtcttatagcgttgccgttggagagtaatagggtgagcactaagggtgattttttacgaaacctcgtagtaaactcgatatattgtcttgtcttttcttactgttttttctgcccattctcttttgcggacgcttgccatgccacccgcaatgcattgcaaacctcagcgatggagaaagcacatggcgagctccaacactatgttttcattttgcatgcctctgtctttgtgttggtgaaatttcttcgatgtgattgattagatattttgtcgcctccggctgagttacaatggtttggggtacaagtacgacaggttcagaaaaaaaaacaggtttgaaaagacatttctctaatcaacatttttcaaggtttcgtcgatatttgaatttacggatgccacagagttgaaaatagtcaggttggtactatagatggccaacgagccggcccggcctggctccggcccgtcttagaataaaggggccgggtcgggccggcaccaaacggccacctcgaggcccaggcgcagcaccaagccgggccagccgggggccgttaaggcccggcagggcctgagacaagcccacatggcataaggcccagctaagtataaaaaataaaaagagtcgaggacgagcaaaaattggactgataatgggccaaattattgggctaggccagatttttgggaattaatgtgccaaatataggaaaactagaaaaaataagaaaaagtagtcgggccgggccggccggcccgtgtgcctgaggctgaggcccaagctcgacccaggttgtgcctcgggccagcgtgccccgattaaatctgtgccgggccaggcgcagtcaggctaagcctgctgggctttcaggcctcctcgggaagcatggcctggatactgcatacctcctgatacgggaacagcctccgacctgcatcgtttcattctctcccactattcctgggtgccgccgtcgaccctggccggcctgctgctgccctctccggtctccaccgttcctgctgctgcgtcgccgagggctcacctccgctgccacccggaccacctctgctgctgccctgtacgcctctctggccatcgccgtcgcctccgctgcttctccctcaccacctctccgttctccgccgttgccgccgagcagagcaggtcagctttccttcccatccctcctcctcctcctcctcctcctcctccctccggcctcttcccatactgatctcacctaaacccccttatggttcactgctgccatttttttgaaataaaaaccttaggggaggctctgacagtataactatatatataaacaactgtataaagaatagtcacaagagacccagattaagtcacagaattcagggctgcaagccattcgaaaagagctatcctggactcctctttacgcctaatactacctccgttgctaaatataagaaatcctaactttgtcccaagtcaaacttcttaaagtttgaccaatttatagaaaaatgtgtcaacatctagtatatcaaataagtatattatgaaaatatacatcgtgatggatttaataaaactaatttagagtcgcagatgctggtagatttttctatgaacctagtcaaattttacgaagttctaggacaaagctaggacttcctacatttaggaacggagggactactttgtaacgacaactcttgcctaaactgaaggaaaccatccgtaaaaaggaggcacaaaattctgaaaatttaaaccattgctcagctttcagatatgccaggctacagtgatgaacacctccatgaagaagggtcttctgaaatccaattctgacccaacatcgggcactcatgaagaattaccttccctattgcaatgccttctctctatcatgtctctagtgtttaaacgatcatgaaacaggagccaggaaaacccttcagtttaggcacacgtttactcttccaaatccatgcaaagagtctattgctagcattgataattgcatctatttctcttatctatttaattaattcatttatcaaacagtatggccatttggtaaatttcatttgttaagacaaatacaattcacctccttccctaagacaaatacaatacagagatagttgcattattcttaagtaattttgtatataattaaaacaagttgacattgtttgcagtttatc

SEQ ID NO: 2058 - DNA, 1862 bp, Brachypodium distachyon
  Intron number 2 from transcript Bradi2g21290.1 (locus Brad i2g21290) derived from phytozome v7.0 (chr-ID Bd2; pos 186 80349 to 18682210 reverse strand)
cggcaagattgctttagccgtgcctgttcttgtgtgtaagttctccacaattcttttagattatcctttaactcatttgttgttagttgcgatattcttgcaccacagcctgcatccccttttcaccaatttatattgtttaacaaaagggtttagcagttatatctgggaggtaaaacaaaaacatatgtcgcattcaccataggtctatctaactcatattttgttagaaaaggaatactttactgtttgttcttatttgaatgttggtgacaaaatatctataaaggacttcagaagtagcagtgctgactgctgaactaggagttcttttttctgttagaccaaattattctcatattcggaccaaacataggcacacttatagatatcaattgcaccttcttgacgtatacaaaacatataaaatacgtatattttgtccttgtgagaacttgagacacttgacctagttaaatcctgaattgatcttacatcatcatgtttgtttaaaagaatacatgtaatcgactatttgtggcctgtcacatatgcacctgtcactctgcaggaactaaatatatcgttatattactaaaggcccaacctcagatctgatgtgcactttgattctgatgacatcgattcagcagcatataagccagttcccatatattcatccacaattgcctcacctctttctgaacaagcgtgccaccagcacatttccatgcatgttggaccaacctctgactggcccatccaccagccacctcatctttaccctttcagttccatcatctgtccgtgcttccgttgcacgtgcagtatttggtgcctcatctcgtacgcctgtgccatacacaaggaaaaatgcaaatcatgcggttttcacaattccacattgaagaggatgcaaacacatgtgcttgttgcagcgaagtaagcctgcatgatgacaaagcagtgccgagaatttctcctggtactccttgaccgtcccatcatgagtggatcatgtagctttttttttaaaggagattatgtagctccaccaaatgctacgaccatgtcttgatgatcttgctttctctattctcctgatttacagctgagtcaatttgtttcactggtagaggtgtttgtgttgactgttagttacagtaaggaagcgctgtcagggaagatgggacacaagttatgcggggaaccacggtgagggagaaaagaggatcagggataagcttaggcatgggaattgggaagaacgtctgaaccggtgctttgttaaaggatggcaaattgattgaagtaattaaggatatttggcactgttgtaaatgagaaccatggagaaatgggtagggggctggaaaaatgctaggcgcgggaagaactggtgcgtaacctggaggtagaattaacggacatcaattgatcggagtaattgaacgtacttgacagttgacactgtggcaggacatagttttaatgagtgccatcctcttttatcagttaacgacaaaagggaaatgaggcaggaatgatgcatgtagaaagcagtaggactacatactttttaaaagaacatagataccataccaattttctcttttctcttctggtataagtaaaaaccaaacacattacttaatgtagtagtattggtatacaatgatataggattgaccaaaactacagtctagcatagtaatttgacatctcttgatatgctgacaagctatattcctttgtttttattttaactctcatcatgcatgtgttctttcaactaacatctttgtcatttatgtccttgatttgcagccaaagcattagagctatttctgcaagacttgtgt

SEQ ID NO: 2059 - DNA, 5705 bp, Brachypodium distachyon
  Intron number 16 from transcript Bradi3g44690.1 (locus Bra di3g44690) derived from phytozome v7.0 (chr-ID Bd3; pos 46 663294 to 46668998)
gcatttttggatctcctgcaaattccactttccaggtaagaagtgtttagccagttcaggtgccaagagtttgtagtttgtagtttttagtagttagtagtttttaatgtttagtgttttttttctctcttccttttcctttctctcttttgttttttttggcctttgcctttgttttgttgcctgtacttgtgctttttgccccttaatgaaaaagacatgccgctcggcgtgttcgagaaaaaaaggtaagtgttattattttttccattgctcctcggatttgagcatggttgtacttagctttaaatattcttgacgcaaatacacaaccttctgcatgtttttgaggaaaacgaaatatttagtcattaggaattgacttgcaaagatcatgaagtgtacacaggccaacatttgcgtatgatgttcttctgcttctgtatgttatctaaattttctactctggctttccaaggacttgctttccctgtagttttgcatactgtgcctgtgcctttccgcttaaaagacttgttggattatcaaccataacttacttttttttctttctatatatactgtgcttctgtgctgttagtttactgtacaatgctatggaattcggtccttagatgttgttatatggatttgcaaatgttggctgtagcctgctctgtgtgtgtgtgtgtgttggttgtgtgtgtctgttttcctggcccatgtagctgccttggcccaagaggcccatgtaacttagtatatatctgttggctcctttctgggaaccctaactaatagagatagagttccacccctctcagccgtcacttaccttcatggtatcagagcataggttgctgctagttgaaatggaagaggtggatatctgagaggaggggaaggcttgctcacccctcggggcggaagtagaggtggtggagaagtagatctgggtgcaggaggaggtctggaagaatgggagatcagggagtactaaagatgttggagaagctggcagagcttctctctgtcaaggagagagcacatcggctgcaggtgcactcgtgccacaggctgaagtggtccagaagatagagctgatgcctaatgacatcaagctagagggggtcaagaactacttgagttggtccagaagagctctactgatcttgaggaccaaggggctggaaggctatgtcaagggtggagtcagtgaaccagaggacacgacaggctcagaatggaagaagtggagcgtcattgactccactgtggaggcgtggttgctgaactcattgactccatcaattgctgcagcagtggagaccttgtcaagtgcatcagaggtatggaaaaccttagaaacaatgtattctgggaaaggaaatgtgatgcttatggcacaaatcgaagatagaataaatgagttgaagcagggggataagtcagtggtggagtatgtggcaaaaatacaacacttgtgggctgatttggatcactatgatcccctagagttgtcacattcagagtgtgttgctgctgctaagaaatggatagagcgaaggagagtaatgaagtttctgaaggggctcaattctgagtttgaaggaaggcgtgctggattgttccaccaaccagcactcccatcctcggaggaggcagttgcagcgacggcccaggaggaggtaaggttgaagttaaagaaggatggagaagcaactccatcacgttcagccttcattgcagcagaacgtaaggagacgagggagtgttataattgtggacagataggccacctaagtcactattgtccataacacgcagagaaatgcgtggaagggggagaggccctagcagaggtggatcctatagaggcagaggcaggggctattctggtggctccgtccatgttggtgattctaaagcaaatcttgcagctccagaagaaggaacatcaagtgattctcaaggggagtcaaagaggaaaaaccaggaggacaacagctttgggaacttcgctcactttgcctacaccgatgaaggtaatgttgcaaatgcatccatatccacacacaaatcatgcccagattcgatacttgattctggagcatccaaacatgtcacgggtaactcaaaggaatttgaatcatacattcagcatccacctacacacaatgaaacaattcaaaccgcggatggcacctctcaaacctataaagggacttggaaatgttcagtgcactcctgtcattaagttatcatcggttttacatgttccagtcttccctgtaaatttggtgtctgagtgctttgattgatcaactagattgtcgaataattcttgataagaagatgtgtttgattcgggagatgatgactggaaggaagcttgggacaggaaccaggtgtaaaggattgtggtatatggaccgtgagatgcccagcactaccacaagtttagtactagctgcaatactaggtgaaaaggaaacaatggcaatgatccatcaccgccggatggggcatatggcttttgataagatgtataaggtgtttcctgatgtaatgtgtggggtggacaagagtaaactcaagtgtgatgcatgtgagtatgcaaaacacatgagaactttctatgtgagtaaggggcttagaagtatatccccgtttatgttgattcattcagatgtgtggacatgtcctgttgtctctgtcagtggtatgaaatattttgtgacattcattgactgccacactcgtatgacgtggatatatctcctgcgacataaggatgaggtgtttaaatgttttcaggatttttatgcctctgtgaaaaaccaatttagcgtgcaggtacagatgataaggactgataatggtactgaatatgtggaccaacaattcagtggcttcttgtcatctcaaggtatacaacatcagacctcttgtcctgatacccccccgcagaacagagttgcagaaaggaagaatcgacacattctggaagtggcccggtcactcatgtacaccatgaatgttcccaagtttttatggagtgaagctgtaatgactgcaacatacctgatcaaccgtatgccttcaaaggtgattggcatgaagtctccttgtgagatgctactaggggaaaacaaattcctggttcccccaaagttatttggatgcacttgttttgttagagatcatagaccatcaattggaaaactggatccaagagcacttaaatgtatcttcattggttaccccgcaggacaaagaggttacaaatgttggagtcccactgaacggcgaacatttgtaagcatggatgttaccttccgagaggctgagcctttttatggggagaagacagatctcagtgcattatttgaagatcttgaccctcccaagtgcatagaggattgtcaagagggggagaatacatccaatgctagggaagaagaacaacaaagaacaccaatagtgggatccataccggttggtgttgaggaaattgaattaccaaatgcccagagatggtcaagaccgaatcaagagaataaccttcaagtgtacacaagaaggaaaaggtctatggaagaacaggtgcaaggggagcaaggagaaggaaatcagcttcagggggagcagcatgaacaaaatcaagagcctgagatctcatttggaggaggccaaaattcagatgacacaagtaccagcatggacttgccgattgccctgaggaaagaaacacggggagcaggaagagaaccaccagacaggtacgggtttaagcatgacataagttactatgtttcatatgaaacgttgtcttcatcatataaagcttttgttgcgtcactccaaattgctgcaataccaaaagactggaaaggagcaaaacaagacccaagatggagggaagccatgatggaggaattagaggctctaaggaagaataaaacctaggagctagcttatcttccaaagggaaagaaggcagttagttgtaagtggatctatacggtaaagcagaatcctgaagggaaaattgaaagatacaaggctagactagtggccagagggtatagtcaaacttatggcattgattatgacgagacgtttgcaccagtggcaaaaatgaatactgttaggatctaatatcttgtgctgctaattttggttggccactacatcaacttgatgttaagaatgccttcctacatggtgacttacaagaggaggtgtacatggagatcccacctggttttataagcactctgaacaatgtatcactgtccttgctgtctatgttgatgatatcataattacaggagataatgagcaggagatagcaagattagaaatgtctaggtgaggcatttgaagttaaagatcttggtcagctaaaatactttcttggtatagaagttgccaggtcaaagaagggaattgctttgtctcagagaaagtatactttagatcttctgagtgatatgggaatgcttggatgtcggacagctccaactccagttgagcaaaatcataaattggctgctcagctaggtgaacctgttgaccgagaaagatatcaacagctggttggtcgactaatatatctgtgccatacaaggccagacattacatatgctgtaagtgttgtcagcaggtatatgcatgatcctaggagtggacatcttgatgctgtttatcgaatcttgagatacctcaagggcagtccagggaaggggttgtggtttaagactaatggtcacctgaatgtggatggttacagtgacgcagactgggctagctgcttggatgatagatggtcaacctcaggtttttgtgtgtttgtagggggaaatttggtatcctggagaagcaagaagcagcctgtggtgtctaaatcaacagctgaggctgaatatagggccatgtctcaaggtttaagtgagatattgtggataagaggcctcctacttgagttaaagatactgagacaaggacctctgaatttgtggtgcgacaacaagtctgccatttgcattgcaaataatcctgttcagcatgataggaccaaacatgtagaggtagacagattcttcatcaaggaaaagttggattctggtattatcaagattactcatgttagctcaggacaacaagttgcagattgtctaacaaaagggttgggaactagagagtgcaatctggcatgtgacaagatgggtatgatagacatatatcatccctcttgagggggagtgttggctgtagcctgctgtgtgtgtgtgtgtgtgttggctgtgtaaaaagtgtctgttttcctggcccatgtagctgccttggcccaagaggcccatataacttagtatatatctgttggctcctttctggtaaccctaactaatagagagagagttccacccctctcagccgtcacttaccttcagcaaatcacctgtccagcgagtggtctcattaagtacaggaaaggttcagggatttgcctgaactcaccagtcatagatagcatagccgtcctatggcatgtttttaaggcaagattgaccaagttaggtggtgtttagtttaagttggagattatttctggagaaacttattggttaacatgatgaagatttttgcctcattcacgattgagggtagaatttggtccttagatcttttgcatggcaggc

SEQ ID NO: 2060 - DNA, 1356 bp, Brachypodium distachyon
  Intron number 3 from transcript Bradi3g14950.1 (locus Brad i3g14950) derived from phytozome v7.0 (chr-ID Bd3; pos 132 71914 to 13273269 reverse strand)
ttacatatcaaatcattttgaaatctctcgttgaggtgagcatttgattggcctcataagttctatatagtccaatgctccggctactgaagccgggggttatcctctttttcggattttttttgcttcagctacttgaatctatgaggaagtaaccccatatttaatggttactcctttttcaaatttactggtcacaaattgttctactacttttatctagtattctgatataccatgattctgtgaatattttgttgtgaacccatttttgtataattagccaaaatattctacttatgtaaataagtgctcaaaagtcaatccttcagcagaaggctttgcagaataaaattatgtttctaacatggtatgatagtattgttggcattgtcattacctacgcagagcacatgcttgttttgccttgcaaaaaatccatgggtcttggtgctgttgtacttgttctctcaatattacatgctgttgagagtcacaagatgcttccaactaaaagattaccaattgaatggaacccttgtacatcatttaaattagtttggtctgtaacatgctgtaatagctcaagcataaatggcatatgatgctgacgtcacctgtggccatcacctggcatttttgcactttaagtcttcgaagtgcctccaggcatcaatggcctcttcagtacagtcttttttgttaacaaagatatcatcatatcaagcatgtcgagctggtttttgctgtcacatggaacccttttactattttctaagaccaaacaggcaagatcaaggttgcaatgcagtagctgtgacaccctagtttgaatgggtttgggaccaatcatcagagtcctgttgacacccttgggctagagagaatgacacacattctggtgcaagttgggcttgggatttgttggtttcaaacttgcaattgttgacatgaaaaaatgcctgtgacttgatgttttttaatcaatgtgggagcttgatcccctaacgagcaaagaccagatttataggtctggtagatatttgtttatttgtgtgtattagtggtcttgcttatacaagatttcaaatcatatatagtcttattgaactcttctctttgttaccccttagttgttgatactttggccattctgctacatagctctgcacagcctgttatacaaagttcccatgatcccatctcttgtacaactctttgtaatttagtaacatcactttcaataatttctcataattatagcagttccttgaactactgtaccttcgcccataacaaatatattggtggttgctgacagggggataaatataaggaagccgaagctatatttga

SEQ ID NO: 2061 - DNA, 1320 bp, Brachypodium distachyon
  Intron number 1 from transcript Bradi1g63080.1 (locus Brad i1g63080) derived from phytozome v7.0 (chr-ID Bd1; pos 622 85146 to 62286465 reverse strand)
ccacccactggcaatcttggacattggtgtttgaggtatgagcttttagccatctatgattacttaaacctgaactaattaacctccttgaattttgggtctgccggccggcgcaccatctagatcggtccgttcttcgtctgagttcgtttcttacgagcaaggattagaatatttgttttgggggaatgtttacgtgaatcatctactccgtaacataaatttgccattttaatctcgtggttcggtgaactagttgacaagattccccaaatccataagtgctctgtagattatgcaatcctggatgtactctgtagattatgcaatcctggatgtactctgtagatttgttgatatagacgtatgccttgggatgctcgttagttaggtcaaactttgctgctttgatctaaaaaaaccttttgcctgttttgtttcgcgaaatatttggacgttttagtttacaggctctgtaattttagagcttcttgtccgttagtgtttggtgtgtttctaagatattttccctttctctcgtttatatgcaataattgtacaagactagatagatgatatgtcatgaacaaacttggtaacacggtctttattttgttgtacgctgtagacttcccgacgtgaaacattttcactataaggaaacagttatgttcttgtagaactggaggatgcagttctcagttctcacccatccgttgtcctgtaggctgcagccgtctaccttctgaatctactgaaggataaacataagttttggtagttcaaaatcaaaagaatcataactcaaatttcataaaggttcctagctctatgagagtactggccttaacaaacaatcttttgtgttaagagacaacagagttgttctaatttatattcttatataaacaaatacaacaatcatgtgtgtaaactttctctttgttcaattgtttagtttgcttgtgatttcttcattgtttcctaatcattcatgctttctccttacagtattgggctttcagttggatggaaataacaaggaaatgttgaacgatgtcttcgcgtgctagagagccaccttgcttagcatgcaattggcagggtagccaaacatatttccattcttgctctggatgacattgaagtacaagggtgtgcacaacagttgctccatgtgcatacgcaagatggggctagatgcggcagctcaaccatctccaatcgatcgtaagtaagctccctccacatcattgagtgccccggcttgattcaagttacaacatcaccgcctttgtgtgcgtaaatatattggacaag

SEQ ID NO: 2062 - DNA, 370 bp, Brachypodium distachyon
  Intron number 3 from transcript Bradi1g00960.1 (locus Brad i1g00960) derived from phytozome v7.0 (chr-ID Bd1; pos 674 910 to 675279 reverse strand)
ttccatacattcggcttaacggtaagacagtccaaaatctgtcaacaaatgttgcttcgtcatcttcaaaccaccaaatctgagcaactaggtacctgctcccattgccttcctctgtgctacaaataatatttctgtaagcatttttccgctccctaatactattctactatatttttagagggtgattaatttgtgaagaatatgcagcaaggagatatatattgttatatgctttagtgacagttataggctgatagcagtggcacctgctaatggttgacaactagtccaaccaaaagatgaaagtattacatactagtattgtgcaaattgttgattgatctggtggtttgtggaagtggcaata

SEQ ID NO: 2063 - DNA, 2588 bp, Brachypodium distachyon
  Intron number 1 from transcript Bradi1g33920.1 (locus Brad i1g33920) derived from phytozome v7.0 (chr-ID Bd1; pos 295 39752 to 29542339)
gcagcctggacgggacgagcgccatcttgctgcaggtgagctgctcacgtgttattctgatacttctagtttccctttttcaagtcagactcagacgttgtactgcaggaggttgccgggtgctagatcttcatgctaggaagaaagatagcttaatttagttgaggaattaattgctattaaggcattaacaaacacaaatgtgatagcctttgccaatgaattcaccagtaaaatacttgatggacttctagatcttaatcttttcaacaagggaaattaagacctaaggtggaggtgtatatccaaatacgttggtagccgggaagctctaaccccaaggacaaggagaagctctgaactttatctctagaacaagtctccctagcacttgggggctggttccccttatatagttcctcacatccagacagcgagttgaaccaagtcagtctactttcactgttcaggagttgtctaaccagttcaaccgacgtggaagtacaggttgaactggtctgaccggtgcatcagatgctggtctggttgagctactattttggcttggaggcggtcgtattgtccaggagacagtgtgatctgataccattggtacactggcatgaccgctgctggtactgttgccggtgagctgttggattgccgtggagcgagctgtggaactgtgtgcacggttgaatcatatggaacatgccagttgtaccccttggccttctcttctattcttgggttttgcatgaccctctgtttgttctcaatgggagttattgaattaaccactataggttgagcggaaccatcggccgaaaccgatataggcatatcattcgcaccggttcctggactgttctccttcatctgtttcatcaaacctaaaagacacaaaatcttgatgcatcaagtagcatcccattcatatgtaggtcagcaggagattcaattaggagaagatcacatgttgctcaagtagtttggcacgggctcttgtggtcgggccaatcactcgagggtctcgactcttgaggtggttcattagggatgttattgtgaaccttgattcgcaacggggtagctaccgtgctgaagatagccagacagaatggctgcagggaattaacagacagactagattatagaatattaaggaaggtattagattgaagatacatgtcatccttaagtagtggatgcttaggtccttgatctttgctaacataatgtgaacacctaacagattagactactgcctatagaacccctgttctcccttaggcctggtttccttgctgctagcccacaacattacaaccgtccaggataggcatcttgttctcaagctacaggacggcggccacggttgcagccctaggttaccccatttggaagagacttggctgcatggatacttcgagtcgtgacacatacacttcacatccacgtttggctgccccggctctgcctcctattgctcctcctctgtgacttcttgcccgtgttcttctccttcctccagggtttgcactcgtgacaaactcatgatgcccagaagatcttggcgaaaagcagcaatcctcaatttgctactttgctcacaaatatcagtgctcatggctgtaaccaagaggtttccctgatttttgtcttgcactttggaagccatggcgatcagctcataactaccatgctgaagatagccagattgctgcgggaaactagatacacatagactagattggttctttcttgcttgtcttaaacctttcttggatacatgacattcttatatactggatgcttaggcccttgacctttcctaacacagcacaaactcctggatttcttaatacaatagtgcttcctaaagtacctctaatctccctcagttcagaaccctgctgctacaacatatgtcctcattgcgttgcagctacaggaccatgtagaaagtgtaaatgttgatgcgtttacatgttacagctacaggaccatgtagaaagtgaaactgatatgcatggtgtgcttaccttgatttaactcagtagtatggtcatctaaagaaacttgtgcaatgtaagtagagcccaaagttaatttacagttgtttgttttcaaacttcagtaaaactatagttatggtagatttagagcgtaagaatgtaaaccttgtttcattaaatgatatcctaaatccaaattattgcttgcttatttagacatgattagattcaataaactttgtgttctcagaatcttgacttatcaggacatgaatatgactcttgcttttgttataacctacaacagtttttgatgtcatagtctgttgggttaatgaactggatgtgccttcttcttttttccgatgtatgtgctggacatttattcaggagtttggtccgaaagtagataatacgcctccaatctaactatctgtagtgttctaaagttaatatttttatatttcttagatattgttgatcagatgcaacagccttttgttttttatatgcttctgaagtttttctaaatatatgtcatctaattgtaatgtttgttccagctcactt

SEQ ID NO: 2064 - DNA, 1909 bp, Brachypodium distachyon
  Intron number 1 from transcript Bradi1g13500.2 (locus Brad i1g13500) derived from phytozome v7.0 (chr-ID Bd1; pos 103 09391 to 10311299)
caggtactgttctccgccgtgctccactaccgctccatcgcatccatgtttggttttggttggggattgcgccatccgtgcgcttctgcgtttgctattttgtcggtcgtttctcttcggtgtttatttgatctagtaggatttttgtgattcggcgtcagcgatcaggaaacccattgtccttgctttttgaatcgtccctataggtttcaggtgttgctctcccgaatggccgaatccagtatgttcatggtctgcgttaccagaaaatactccgttatgttcatggtctctactggaatgaaaatcatgttcctttttgtagtacaatttaatgttctcaacctcttttgttgcatggatatattcgcttggtccatgtcgcattgccatgcatgtcccatcccatttgtttgttctctttctatgtatttggtagcctttcagtctctgtcatgttgcaagccgttaatccattgccagtcgtgttgcaagctaccaatctattgcaataccaaggatgaggaatatgaaacaatttcgtcgagggactattcttgttttattgtgggttaagctactcaacctctcaaaaaagtcaaatgccttgcttcttatccagttaacttgaaatattcttttccgagaccatgttaatttatatttcattctcggagcgatgggtttgcacgatatggctggctagataatttctatttttatttttagattcaaagtcagcgctctgatccacttggtgatattttggatttttttttctttttcctatgaaggactattggcatgccatttagaaaaagtgaattacatatctgatcacatcccgatatgccaatcggatctatcctcagaaaatccatgcgcgagtgcaatttgtttaagaacagttgtccactagcctttgttttctagtacaactaactttgtactaaatatgaggcacttattatggatcagagggagtagcattttgtcgccttcccagctccaatggggattatggctatgttatcagcaacattgcataatctctaaagaaaatggagaaaaaacacgaactgcaactgaaagctcaactgttgacacttggcagttggtagcaacaatagtgtggcagtgatactgactgttgagggcaacatatatagtatgatgatatggacgcacctatattacctgaaggccgactgatgcctggtgctggttggtgttggtggtagatgactagctaaggtagtagatgcagcaatgctatcactatgagggtatgcttgtggctaagtcgccgcaggttcaattatttgttccatgtacgatgttcatacaacaaacagcagccatccatcgctttagttaagcaggctccagccgtcgatgcaactatcgtacacggtttggacactgaaatgtcgtacgtgcagtgattccgggtattgaataggatcagaatttttacatctttacacacatagttttactattttgttagttactgtttatggccattacaatatggctgctaaatcaggtaagctttctctgtattaccataacctgtctcagtcaatgcatgcaagtctgtgtttctgtcatcagtgtgctattcctgaatagggtgtgcttccttgttaaaatggtttttatttttcctgagcaagcatgttttcatttggttagttggatttgggaatcaaaatattcaattaaatggttactgcattggtaaatacagatgatattgcaatttgcaacaaactatattctgtgtatgttgtacagtatgatttactcattgtttattttgtactttagctttccaaacatagtgtttttatatcctcaagaacaactggattgagctaatttttcaggtttctctgtaggcaag

SEQ ID NO: 2065 - DNA, 1502 bp, Brachypodium distachyon
  Intron number 9 from transcript Bradi5g06650.2 (locus Brad i5g06650) derived from phytozome v7.0 (chr-ID Bd5; pos 873 1746 to 8733247)
tgtaggtttggtttgtgtccaactcagcactgccaactttcttgatcataaaccaaacaaataccagtcttggaagtagtttattggcaataaattctggtcccacttcccatggagaaatcaagagaatcggctgccaattgttggtgccccttaatagcacatacatatttatattctaaagaagtaaatccattttaccctcctcaactgttggtaaagtctaaatttgaccctaaactctaaaaccgggcaaaataccaccctgaactcctgaaaccgtccacgaggaccaccccccctggcagtttccctgtcagcttggctggttttagtggccacgctggcgctttgaccagcctttacacgctggcaaaggatgggccagccctgctctcttctctttctctcccgtgccctttctttcctctcctttgccccttctctctctctctctctctctcagttctttccccactgaacccgtggttcttctccattaaattgccatggaatctgttttctgataaaaagaatgaaccgaatcagaggacaagaagaagaataagaatagtgcagtgcagcagcttgaggaggagaagaaccagaatctcaatgctcgaattgtttgggccactgtcgtgcaggtcgttgagttacgacatcatcgattccccactctcccgtggatccactccggccagacatggacgacggcaagtagctgagaacagaggaaaatggggatggtgcggaggtgctgctgctgccgaattgccgccgctgccgtgctcaacagctgccgccggtgctgaatcgaagagctgctgcagctcaaccgccaccgctgacctgaatctaagacctgctgcagcggcgtctatagggttcagtggggaaagaggaaacacgagagagagagagagggagggagggagggagggagggagggagggagggagagagagagagagcgcgcgagcgcccacccttttgccagctggtggtcaaaggctggtcaaagtgccagcgtggccaccaaaaccagccaagccaaagggaagacaggcagggggtcctcatggacggtttcaggagttcagggggtaatttgcccggtcttagagtttagggtcaagtttggacttctactctaaatagcaaatcaaaagaagcttggagaatgacatgcaagctcaatatttatcaactaccaaacaattatagatttcattgtctgcagccaaaaattggcatgttactgttggatactgactaaacctaccattagtcttctttttttttcaaatttctctgtgtaaatactaattgagtgacatttgcctcttgagtccattatttagatgttcatcatggatgagatatgtacaagctgacaagagaatggtcctttatttaccttcaaagtacagccttagtagacctcgtaatgcaaagggcgggtggacattttcatgcaggtaatcttgccactatctact

SEQ ID NO: 2066 - DNA, 4372 bp, Brachypodium distachyon
  Intron number 4 from transcript Bradi3g06580.1 (locus Brad i3g06580) derived from phytozome v7.0 (chr-ID Bd3; pos 476 0508 to 4764879 reverse strand)
tcatctcccagctgccgcagggctacgagacacaggtaattcatgaattccgcgaatcaattttcctctctttgcaagtcgctgtccagttccttttcgatggtctattttggttcttcctttgaaatgcttattcgattcctcgttctttgcctcttcaaactttctgatatgttcggtggtttagtacggagtcatacaaatatatgtggtaaagggaagaaaatgatcatggtgttctttcctgttgtctaaatatattttctcaaaagtcaaaagtgagaaccgatcaattacaggtaaatatggcccaggtagtttaaaacgtatagacggttcgattctaaagacaaatcagcaatataaattatagagcaccattctaaaaaaaaaatagaagctccactttgcaattttgcattgacatggatttccagagttgtatgagccaagtccttgctcgaattagaaaagataaggaataagatttccaaaataggataaaccatagaaaggtgcttccatagtgcagtacagcagccacaaacttgtccaagctaacagaacggaaatcaacacgtcccgacgaaattctcttccttgtttatttgatgaggattggtagccagccgcagcatgtggccttggaatccccaacctccttgctcctccttttgtgggaggttcttagcttgtctttcttgaaacgggatacctgtgagtacgatcctttatcttgaaaccagcagccgttgtttttagtgtagccacctttatttggaagcaacaccagtactctactctcagctagtagcaatctgagatttagagagcgatctgtgttgccttcctatcaaatgccgcacctaccgagaaaaaatatactctagatgttatgacaaaaccaaaacatatgttgggatgttgggtcatcaaatgaaaagaggcggatccgtctggaacgccggattcctacaagaatttcataacggggtcttgattgaacatatttaacagacggaaaaaagcatgcatggttaacatagcccagctttgagtacacaatatagttaaaatagtacttgatgaagaaaatgtaggaggttcgatgaagaccttttaagaagtatctcttggagcaccgttaaggataccaagactccggagatgggcataaattttacacaaaactgggcactggaactaccatgagatcctgaaacaaaagacttcattgcaggagatataagtaaagctgataaacatatcaggcactggacgctatgaagagctgacaagtggcaacaaaaacacacaaaactaaagcatgtcttcagatcatctaaattaggctagtaacaaaaccctacaaaagacaactccaagcaatgactacaacacctgacatcgtggcaccaggatgaacgatggccacgttatggtgtgagtgtaaccatccctgccaccagttcagcatagttcctctccccctagtccttctccagcagaccagccacacaacatccatcaacaactggtcaagaaattaatacattagaatgttcaatgttcagtcgaaagaatggtgtattagatgccttccaaaatactgcattacagcatgagttacagacaaacccgagcaacctttgtagtactactaaatgacagtagtggtagtataagctattacagaagctaatatcctaaattagaaccattatcgatccagtgaatgcttgattaaatttcatttatttccctgttagcttagaatgacagtactatttcttctaaggctgccataacaccacttcactgtgattcggttcaaactgacgatggtataaaaattcaaagctctcgccttagagtttggagaatggctggtggtgggacctacaaatcatagagtgctgaacccaagtggaaaagggtgaatagttggcccaccactcagggtgtgtgcctccatggtcggtgggcactgaaggcaagcagctacgaggctttttgcaaatctagtaacaagaaaaggcatgccagccaacagttatggtgttccaactttccctgcaaacaagatttcattcaggtcctgtcatgcactaaatttttttgacagcaatatgttaggcagagatctgacagaaggaagtgcccgtgtgcatatatgtcatggcatgactccttccacaaagcaactttaatcagcaagaaatcaaaatggttcagaaaagcatcattacctggtctattgccacccgccactgcaactgttgcgtttcaaagtcactaatcgtaaaaggggaaaagacgtgccttttctggctgccttgctgttccaacataggacttgttcaagatgcagctccctggctaataatgggaaaccccctaatgattcaaactctaagtggtgcgcatgtaaacctgaaaagttcgttcatggccagacccacaccaactagcaatttctactgtgtgcaaacctgctgtggcctgtgggtcatataaaatcaggatgcactagattttgatgtgggcaaacatgctaacataacgacctgataagcactcaaaataccctccctgtcgaatatctaccacttcttatccttgtaactgaacttccattctcattgttcaagcactcacgaaaagatcacagcaaagtgccctagaaaataatagacgcttaatttggccactgactagaaaacacactagcaagtactacctccgatcctaaattgttgtcgttgttttagtacgaagtaattgttgtcgttgttttagtatatgaagcaaacggcaacaatttaggataggagggagtaataaactactcacaattattaactgaatgtgcatgcagatatgcaaataggcttatttttgtgaatgattgctttcaaaagtaagatttaccttgatgtgattgcggggaataagtgtacgtcatgagtacatagactaactgtgtgtttggaagaccaagaaacaagatttcaaatctgaaaaaacaaagctatatggttaaaacaatgatgttaatgtagcttgtccaataactaaatatcagtgtcaaatgactagaataaacaagagtagtggcctccagaactaactgttcttttcactcatttgcgactattgccagccatgaactgcttctgaatagcaagagtgacctactgaccttagtggggatcaattaataacatgaaaggataggaagagcaagttctcagaataaaaaatgaatgaaatattgtacaaatgcaagcttggtgacaaacagaacacaatattacatgaaaggatgcgattttaggtccgagaatgtaaaccatgtctgtatgaggatgctagcagtgttgtgagctactccctccgtctcatattaagtgactttttattacatgtacctagacgcccttttaggtatagatacattcataattgggcaaatttgagtcacttaatatgggacagagggaatctggtagcataacttatctcaccattgaatggaagaatattgtcatttatctgttgctatctttgtccgtaattgattggcaccaaagggtataatgatcaagcaaatcaaataacaaagctaaaatattgaattcatccttgtgacacggctatatcactcagacactgatgcttcgaagtgtctctaggagtctaggtcttgacaacaaggattcctgtcaatacttaggatcaacaaaaaatgtggtttcatcccctgcctgcctttgacagcttgtgtttgattttctaggcaacgtaagtaggttaagtaaatttacatgcatggaagaataggacaacccataataatagaatgttgggttacatgttgaacacatgttaggttcaacttttaagtggcaacactatatgtctatagtcaatggaatgataccagtctagcagtgtgccaaccaacagactggtcataaatattggttttccataagtataacacagaaatttctaaatattcttcgaatgaaagtgctttggaaagttttaaacaatcatcagttatacaatctacaaaataactgttacgcaacttccgaaatggaaaggagggttgtacatacagaagcttgcgaaaacaataactttagctcacctatgtgccttctgtcttttcaaagcaaacttggatttcatgaatttgtcacaagaaattacagaggcttacaaaagttagctcatcatgaagctaattcattttaagctgttgatcttgtcgaattttattccaataaattggtattcatactccgatagtgtgatactgaccatgtgcaaaataaaataggtgggtgagcgtggagtccaa

SEQ ID NO: 2067 - DNA, 1069 bp, Brachypodium distachyon
  Intron number 1 from transcript Bradi1g41780.1 (locus Brad i1g41780) derived from phytozome v7.0 (chr-ID Bd1; pos 384 20156 to 38421224)
cagcacggcgatttgcataagaaggttcgagctcttggaatctttggtcatgttacttcggttgggattattcgctggcaatgttattctgtaaactagctgctggttagatgagcatagattaattgctggagaaatgtagtttagccattctttgcgcacggtcgatagttgctcacctaatctcaatcgtgtcattatttgtttgcacagaacctgcaatctacctatgtactgttctggactaatttgcacatgatagagattcaccaatctaagcacctccgccactcattgttttaatttatctctggacatgcttcaaaaagaaactttctacaatcttacagctcgtttggctcccatcatttgagccttgaattttggaagtcattttggattccaggaaccaacttgcttggctggcatgaaattgggtacgagaattcaatttgaaattccatggaatcacgcctatacctaaccccaattcctctccaaaaggcaccatttctctggatttgtatctcactttacaaatccatgtggcagacaaacatgatttttgaatccagaattcaaattcaaccaaatgaaatcctatcaaaaatttgatttcctcaaatgaaatgaagtgaagtgaaatgaaatgagggttgccacacgattagagttttatttagttcttggctttggattaatttgtcattacatcccaaatgtctttatatgtgcatggtggtaagcgtgaaaaaccggaaacaccttctccagcacacgtacgctcggtcatgctcaccatgtatgattaatttgtaggcagaggagagagtatcttcagctcaggcagttcttgagctggttttggcttttctaccactggtcatcagtgattaacttgcagcattattgtgatttcttttgaccggacagcattattgtgattatagtagagtaatcaagtaggggtatcatcattgatgttcattgttcttctgggttccgtaggtttattgtgtattcagtattacttgtctgattactatttctaattcagagtgcagcggag

SEQ ID NO: 2068 - DNA, 6453 bp, Brachypodium distachyon
  Intron number 1 from transcript Bradi1g77020.1 (locus Brad i1g77020) derived from phytozome v7.0 (chr-ID Bd1; pos 734 08490 to 73414942)
cccagcggccgcctctacgagttcgccagcgccaggtaaaaaaaaccatctctcatctcctgctttacttaatctcataattgctctttgtctttctttactattctttgcttgctgctggtggggggaatgcgggttgggggctagcttggggcgtgggaatccaatttgtttatcagaaaagaaagcctgcgaaatctgatggatctttgcgtgcaccgctagctgcttgcgccaactcctgtgcccgtggctcgccaatgaggggaaagaagcctctctgtagtgtagtactgtggagatgccccttctctctaccttcgtgcccatccacttggctgatttttttttcaagttttcccacactccatatctcttcgagaatcttgcctcgcttcttgcgatcgacttgccagtagtaccattatgattttcctactatttcctgcgtactggtattgctaccatttgggctaaacttcaaagctgtctcagcctttagtacatgtaggcaactcatagctctattggcctagtcattttttaattaatagacctagccaataggaaaagacggcaaaaaaggaaattttttactcctggctagccagaattgtttagcgcacacactaaacgcttgtctgaatattgtttgcccttgtttttggtgcgtggctgttcatctgtgcattaatttgctgtcctgaaatggaatcgatgcatgcgatatggtgttccatgttgtactacttatcaactgtagagagagtaccttttttactgtgaaacatgctccaccggtatattttagttgtgcatttgctgtactaagtttatagtctactacatctcctacggaatagtaattaattaaacctaatatttccctcagattaataaaaaaatagaatcagattttgaatttcgtagaaatgagctttacaggactagaagcgtcattagattttctgggcagtgtactgtgaacttgctgtgtggtcttgtacgtacaaatagattgcagacagaagactaattaggttgccaagcaagttcctcaatatttgttccgattttaaattatgcagccttttttggaagaaatgaaataaaaaggtgatttccaatatttcattagctgacattttgtggtcatgcattatatttgtctatcggtcaggatatatgttttcaaaagtatatgtatcacgttgtattcatgcatgatccggccacaccaccgagccaaaatatcattcagataagtcaagaccatggtcatatatagggtgacagttgaatatcagattaatattcagattttgcagtccatgtgcaaacagagtccggcacaaaacaactgctatctctaaaatcactacaacaaaatatgacctaataaagtgttggaccaagcattgattctcatgggttaactatcaatcactttcatgcatcggttgatcaaaaacataaaagaacatgtattagttgttctgagatgagagttggtgggaggagagaataaccttgtatgctgaattacaagattttagagatagaccttgtaaactactaaaatggagggcgagtttggatagttcaactttagtataatctccctaattaggcatgttctggaatttgcaacgtaaaaaattgggctatgcacgaaatgttcatgtacaactagtgtaaaaatgataatctatagtgctctcgattcaaaaaatacagagtaaaaagctagtatatgtgtgttgacttcaagcatgcaataacaaaagaaaaatcctttcccttttgcatgtaggaaatagaaagggtgtttcttgttccgcatgaatatgtcacgaatcatgagtagatctaatgccaagcgacaaagatatatatatataggtgcatttgtttcttattttgggtagaccaaaattgtacatgaggagaaaaacatatttctatttttgtcactgagatatatattatatatttaatgtttctatttttcatcctgttattccatcttggattaaaccacacaatgaggggctaatatgcatttggctctagagtgtatacggacatctccctctcccccctagtgaggagagactacacaaccatattaatggccccattccctacaagtgggcctcttggggtaggtctaatgtacacctgccaccaaaggaccccctgccccagttgacaatacccaccatgtcgaggcatataataggagcttaccgtcttagcaaaagttgatgcatatagtgttggtacatgttgtaaacttgtaatgctgagttttggcttcaaataaaatggatatttcacgcgtggaaatccacctgacgaatgggaccgaaacgagaaggtgaagaaatatgacgtggaagaactaaggcaatcaacatgaagctcacatattttcatgcccatcaagaaggtccacaaatccacgagcttgtctggattcacccttggtttgatggctcttctgcttgaactagaaggatattagtatttgtattccatcttaattaaataccatgcacgaatcatgaaccaagaccctaccaacctcatggatcaattagtacatacaccatattggattggttgtgtcttatgctcaatacaaggacaagatgggtcaaatttgcctggctttagcttaattatagaaggcacccatgggtcacttggaaccaacatgcctcttggaatacacagatcacatctatcaaggtgggccctaaatcttcctagtagatcatgtagtcattaaaggatttcatggtaagcaagagaacgcctaactatctcaaggaatattgctcgttagcatggaccatatcatatgcgtgaatgagggaatccacgcctctcaaacggattacacctcattcaataacccataccaaaattagttaaaaatatcattgtccaaactcgcaagtctacaatgatacataacaaggtcattctatgctccatgtattactatattgtaagtgttgaactcagttgcattaagcacattgacttaattgatagtcaacataccttgttgcctacttataccgaaccaatacacacaccacatgtctgtgtgcttaacccaagtgccctataaccgtgaggatcatgtgtccatgtgggcttgacaagtggatgttccatatatgtgttctttgtctgatcacctaactatgcctgagggttgattttgattgtttcatatatgtgttactccccccgttcctagattattgtcgttgtttagttcaaggaatatttgtcttgtcacctaacctatgcccgatggttgattttgatacacttgttgtgcttcgtccccaaataggctcgggtctagtcttattcacactagctattctcatgtacaccgaggggtcccaataaaaaaaaggatccctaaaaaatattggtcaaaaaataaactgatcaattgagtgtgctatctttaatgccgttggtatggttcaagttgaagatggtcgcagcatatcttttgggaagaaaattgggtcgattgtgcagttgcctctagtgcctttgatatcattgccctagcgagaagattgtttagatatgttactaacgctatgcaaatggtcattggctagcagtacaattggatcttcaatcagagggccacatcattgcagttcacagtgatgacgaaatcaaagatgatgacaaacttaatttggtgtttggctagtgccccatgcccttgatgttatcttagactggcttgcaacttcagctatgtgttggttgtatgttactttgagcgcatttcgtttttgttctttgagcaattactgtactacattgctcgcgtattgcatgatttgaacaaagctcagaggtggatacacatttagatatagagtttttagtttagctgcactcttattaagtactagcatccgtagcatgcgattctaccagcctaggagctcttctctttgtcggttcactggtgtccaaggcttggagatcaagatgatggctctatataaacgacctagtggctctcgttgaattgacgacgattcatatcgcacaagacctagattagtagatccactttagctctcatatccttgtaacattcttgctaataacacaaggcaggacgtgtagggctattaccatacctcaaagccctgaaggtaggtaaaacctactccctccgtcctactataccgggcgtgttagatttttcacgtgtaccaaggcaggcctgatggatctaactttggacgaaagtacccctgcatgtgccccggttgtgctctgttctgctgtgttgctgggtttttttattccctgcgcaccaatctgatttcgttgcatgcgccaccacacccaggacaagagcacctcgggaagggtcaatcgatttaactacacatgcatgctggatgatgagggggtatttttggcacccaactagaaaaagaagatgcacgcctagtaaaccaggacaccaggattcaaataagacgcccggtatagtaggacggagggagtatctcccatcgtgatcttatcgagccatgccccccccccctcccccctccccccgctaatctattttcaacacgaccacttggtcactcatgagatcaacaataaattcatcatcaacaccaatgttagggaagatcacgatgatattctctagttagcaaacgttattggtgaaagtgcttctagccccttaaatgggtttccatgattattgacaagcaatcaagggaataacaattttctacgggtttgatgattaggcatagtcccacaaggatgaaaatatatgtggttgtccaccacccttgaataaaaagagaaaataagacaacttggttaaatttagatttaatctctccttgtcctagtaatgataatcgctttcaagatatggtagttactctattaagagacgtgttcgacgaaaaggttgcgagaaggattaatgctaagtcccaatgcttgtcaccaaaagccaaaaccaaatatcacacaacaagattttatgagcatggaggcaatttggaaggttcagattaggctcttacatacataaaatcaaacagttctggaaaaaatctatagcaaaatctacaggttagcattttggttcagacttgaccaaaatgcgtctccatggcctagaagctggacgagaggtggcctggaggaatggaattctggagttttggagcagggtttggatttgtaagtgcaagttgaccgattggatttgaagggtttgaaaaaacctagaggtgcaaattttatctaaaagctcccggtgactaggttttgtaggtcgtcttaagcctcccttcccccaaggcttgaagcatcctagatccacaaaattcccgcccacactcatgtgctatcacacctttgtcaaagattgaatcctttagaggaagaatacaaatatgggcccttgacatagaacaattgcaactctatttgactttcagcacctgtggaaaaaaaatctgttatttgtttctaagaatacctttcagttttgactttccgaaaactgcacatttaataatatttttttgacaaagcgaaactcgttgaatttttcttttctttttcaggcacgactatgtcaaattgttgttgttattgtaatttttcctcttaaaaaatattgttagggaaatgtgtagttctagttctcttctctgcaattcaaactacactttgcaggtcattcttgttttctgaaatttagccttgaaactttatctatctgatgatctgataaaatatatattgagtactgtcaaatgtctatctgaagtctgagcctaggaataattctactatttaatggactgattagataattctgaaatgacatcagggtagccctagaacctactctagcagtagcactgaagtcagcccagactgttcttgttgtagaattgcgctccttctttctcagtttatgttgtagcttatccagcagttggacaggttgtgcggtgcctgctgaccagatgctgcagaatgcaaataaaatatcacaagcttggttccaacatgtaatataaagtcacgaaaatgcgttagtcaagatggacactttcacaaccagtcctatactagtctcatgcgtaatattgataccaatatctggtgtctaacccgactatgttttcttgatatgtatattttgtctatttcattagcaagatagatggaataagggaaaaacctcactgagttgcagaaaggttcatttccttctatatattctttctacttcttcctctatattcataacactggaaatatatgatgatgtttgcttgtctaaatgaacgaattctaattattatgacataatttttacattttaaattccaattcagc

SEQ ID NO: 2069 - DNA, 2283 bp, Brachypodium distachyon
  Intron number 11 from transcript Bradi4g16850.1 (locus Bra di4g16850) derived from phytozome v7.0 (chr-ID Bd4; pos 17 652372 to 17654654 reverse strand)
gatctactggtatgattcaatcatctgtaacatttaagtttcctgtcacaagcattgttatttcaatattttaatgttattgtattctggggaaatatccattattatttccagttccttttgtggggaagttctaaaaagtcataagatgtaggagaggtggttttttactgctttgcaagactgaaatcaaatttgaccgcattcgaaagatgtggaactgccagccagcaataggaatagtgttaatacagttttaatcactgttacatcaactagtcatcaacccgtgcacatgcatgggctagtattttggaaacaacagattcgtgaattttgtttgaggaaccattatcatgtatgataattagtagttttttatatatatggagtagttcgattttccttggatagccatatgaaaagaaaagtttcatataccttctatgtgtgttttcccaattatatcacagctgtatgtataattttagagtaggtgttttctatatgtgttttctagattgatatactatgagcacataattgattgtttttttgatatactacctccgtccaacaatatgaggcatattaggatttggttgaccaagtctttgaccacaaattacttcatgaatgtgtgactaatgtgatcaaaatcataatcataagcaaatatccttgagtaggaacataatggatatgaatctatgtcatataattatatattaatagagtaattcgtggtcaaagcattggtcaaaagaaagctaatacgcctcatattgttggacggagggagtaccttctatgtgtgtttccccaattatatcacagccatatgcatggcatatatgacaacacaaatgcatcaacatcctcaaattttgtctgggacattagtcctgttgaggcaatcaacaatcacattgattttgtttacttattgataagaaaatcagatttgtttcttatctgataagttgagtgagtattttctaatctccatcgaccaaggcaagctgtctgttcagctgttattttgtcaagtctaaactttatttatattgtttttaccatggggtgaaaattatagtgctgaaggtgccaaccgaagtacgctattttcaaaatgaatgagctctgctcactccctaagaaaattagcttgaaagttgattttgagtttttgacacatctagcactgtactactagcacatatcaaatttcttttgccaggccataaaaaaagaagctgattttgacacatatcagtctaagctactctaccttcaactcataagtcgtaaacgaaagtcatatctagcataaaaacaaccggttcagtacagattggaaaattggaaaagaaaagacatcttttgccccatgtagctgatccacttttattaccgttgagttggctgagttccttacttcctttgcatcaaggatacttgcaggcagcaatatatatgaatagagtccaagcaacgggattaatatccaagcatgccactattcatgtttatttctgttttggttcaactatgctttgaattccacattattgtttatagatatttatcctcttccctatcctgcaaatactattgggattgatcttcaaaacttcgtagggccttagacatccaacatacatcgaggactctaggaaactagctagtattctgtgcaaaattcctactagtaacggaaatttttggtttgtggcctgccaacacttcgccaaacgtcacacagacaaggttggcttcacggttgtggcatgccacacttccttatcctcttactccacattaccagactcatttgctagccattttttgtcacgagtgtgatggccaaattttctgccacaaaaaactgtggcttgccacaaacacgaagtgtggagttcaatgaaacatgccattagctcctgcatccatgttttacactatttagttccagcgaacacctgcgtttgcatctgttatgtagatttctacgcagactaacagagggaccatcattgtttttctataattattgattaacatggttgaaaagcctaggttttgtgtagcttaagcttgtgtgagctgcacaacctaaccaacaaaagcgaaactttaagcattcgctttctgagttatttgttgttgtttatatggcaaatctactcatgccggattaccatcaatttctagctcggcatatctggaatgtccacatctgttttcttacatgagtgacacacttgtgtttgtatggtccag

SEQ ID NO: 2070 - DNA, 1882 bp, Brachypodium distachyon
  Intron number 1 from transcript Bradi2g07260.1 (locus Brad i2g07260) derived from phytozome v7.0 (chr-ID Bd2; pos 557 1700 to 5573581)
gtcttctacaaggagcccagcttcgatatctacaggtttgtgcggctcttttttcgttgggtctttctccattttgatcatttttcgagttaagtgagcatattttaggtggcaagcgattgaattgattatcacggtgatctgtttgtagttaatttataggggaagatatgtggcagactgacagtagcttctgactggaacatgcatatatttgttaagctacctccgaatttcttacatgcttctgtcgctaagtagttgcactgatggagtaattatgtgattgttgttgactgatagaaaatggatatgttgtctcacaatactacaacccttctagattagccttgcactagtcttgacaccaatgtagctagtcttgaggcttttggagttgggatcaattacttggcaccgcagctagttattgaaccgcctactaatgtgcttctgctatcaaccatctgaagaaccatgtttcagaaatgaatgatcaaatgaagctcaagtatttatccttatatataatgtttgattaggagatggattgtcctgtggatgtgaattggacctattgtttgtagatttgcccaatctattatttagtaattcagttttagatactattaattttgaggtgatgaaattgaccatgtagtcttgattctgagttgaacattgctacaatgaagtaaatgaacttgaatgtggactgagagcagaggttatttgcgctaggcttgaccagtagcgctacactcatgaacctatattgaactagggtgggcaatcaaggaggaaggccactagtgatgcatggtctggcagaaatgaatgaccgtgctgatcaagagttgtctaggccgcctcttagttgggtcgatcatcattaataaatgctgatgtctcagcaccttttagttgtccttttggccttcttctttcttttatctgggcatcctatagcgaggttcttgctcccaagtttctaccttgttttatgttttggaagatttatcttcttaatgcaaagacaggcagttcttttacaaagataaccttatttaggttcttatttttttcttgcattggtggttgacacatagttccctttcttgttagcatattaagaccatcttgttttaatacttaccaattaattcaagcaatatgacatttagttcacctgatcttttcgcttggtttgttgtctaatttacaatgtagatgtgaccaaacatttatagatatgaccccccatcagttgcttccattcgtttttcttgtgttcatcttctattattgtgtgaatatcaagctcatgaggttgactcctagatactccctccgtttctaaatacttgtcgctgttttagtgtaaagttgaactaaaacagcgacaagtatttaggaacggagggagtagcttttaggctctaaccagttaagtttcatgcgaatgagcaaatcataaactaacttgcatcctgagcctgcttttgaatatcccctattccgctgaactttatagtaactttatttggccagaacttgaaggaagaggaacagaaaaatacagtaccatatgttgtatctaaattaccaaggtcatactacacggcggcatgttatattgttacggtcttggcaaagttcaaacttcaccatgtgtatgtcttgtttaacgattggcaaaagttgctccagtgagttgagtaacttgattctgcagctgttgatattgcttctgtttcccaacttaattcatttatgtggtctgcagactgcattgcatgaaggtcgaattttcttgtacagattttaatgtcaagtctttatcaatttttttcgtaactctgtttgttactgttttccagag

SEQ ID NO: 2071 - DNA, 2804 bp, Brachypodium distachyon
  Intron number 3 from transcript Bradi3g19700.1 (locus Brad i3g19700) derived from phytozome v7.0 (chr-ID Bd3; pos 185 77736 to 18580539)
gaagcggtaatatgcttcgattcccttttataaccgcattgttttcttttgaataaaaatgccctgaaggaataatttgaatctggaacaacactgggcacatatatgacttaccagtatcttattacttatctaaacattttggcgctactagtttttgccccttaactgttcttctagagcttcaactgtgctaagaagcaaggatacggggacatgagataccatattttccagaaacagacatacgcggatacagctagtatgtataaataatttaaaaatactacattaataaagacaaaacaagatgtgaaatcaaagtactccacatttgttgcctctccaactcattttcattgatggatgatcctcaattcctcacaccgcgatctttgcctctttaaatgtatcatatgctagcattagaatttgaagttaaatttcatccctaagcttaactcagcaactagtaagccagcatggcaggaaacaaatatcagcagctagccaacaacaacaagaagcgataggagtgagaggagaaacaagcacatagccgtgaacgctggagtggaggcagcagctagtggagacggtggcgctgtcgctggagtggacccatacagggccactggcaaggatgaagttgcaagtagcggcgcggctgctggagtgaagccggtggcacggttgctggagatggagtgcacatcctcagtttggtgtgcaggagcacatcctcaggtggtgcatgtgtgtgcctgtataccaactctaggatttctcgtcgggcttgggcttccccgtatctcggatgtatctcaagcgtatcccttcagtatccatatttatttttctttttaaaataaaagatacgggatactcagggatatgagtatgctgccgtatccctgtatccagccgtcctgcacggggatatggccaaccaaaccgcatcgttgctttagagcaactgagttcagtgaaagagtttgacttgtatgacattggtttcttatcctaattgagcttagtcatggtcatttgaccttgaaactgcatccttgggtcaagtgtggccatggtgtcagttcggttgaagctcagttacaaatttgaacccgaatgcatgtatcatggaacttgccaggatagtttaaatggattgttgatgcgttttagactgtccaaaccatttatgcagaaagcactattacgacttagtagtgagagcgacaatcgttgaatagtttggagctttgaagatctcccttgggcttgggttgatccattagtaagcacagagcatgggctttcctctttgtagttacattattgttggaatggcttgattccggctcgactagcagctctatttcacatcatagtttgtttatttcagtttcaatgagactttagaattgattaagagttgctgtattttggaaaggaaaactgtgtgggaggccccaataacatttttgttgttgttaatataacaagataataacaagatgggaaatatataggggagatgggcagggaatatacatggggacagaaggaaaacactaacagctcgttttggtagccctcatttcatttcatttggcagaaatgaagtcaaatcaaatttttgatatgattttatttggttgaatttgaattccggattaaaaaatcatctttatttgccacatgattttgtagaatgagagacaattccggagaatgatgccttttagagaggaaattgggttaggtataggtatgattccatggaacttcagattgaatccccgtacccaattccgtgccagccaaacaagttggttcctggaatccaaaatgaattccaggattcctggaccaaacaagctgtaagagcaagggacactaacataggtgaagaagccagagcttcacaggagtcgcggtattgcatatgatgggtagattttagcatgatctatattgttgtaagattgatcactccttgtaatgtggtggtgtttatttactgtagtacaatgtagatgcatacgttttcttcataaatcataaatgcaaaatatttaggtgaggtagctctgctgtacgttctaaaccttgtcagtgatacctctcttttttcctaaaaacatttgatggccaatctaggccagatatgctggcacatgatgcaaatagatactgattaatgtagtatgtgctaaggctgtcggtagcactttttgcagttgcatcgtttccctagcattttaattggagagcctgcaagcagatactctaatttgatgttctgttacacggcaaccttgtacttttcattcttatttcttgtgctctctactaccgattatttcttgtaaaacagcgacaagtatttaggaacggagggagtagctgttattatgtgtgatacagcgcatgcactaattaagcagttacaattttctcaagaatgtcacagtttcctattgtgaatactgttgagaaattgaactatcaaggttgcatgtttgtccctaaattcctttcatttgaataccaaaaattatttttgtatatgacaacaacatatttgaattgtcaaagacatgaacttgatatcttgtagtacccttgggtagttcaaaagaaattcagaattttcctaacctgaaactttccacatgatattgtggcgcttgatagatttttgtaatgataagaaatgcacattcaattaagatatactgatggagttctatttgtgaatttcaggaagcagaagcaaaaaggaaaaagaacgaggaagt

SEQ ID NO: 2072 - DNA, 11970 bp, Brachypodium distachyon
  Intron number 2 from transcript Bradi3g52460.2 (locus Brad i3g52460) derived from phytozome v7.0 (chr-ID Bd3; pos 533 49913 to 53361882)
ttctatcgtaagtatattgtaacagcatttgcttgattgccatgatcgtttggtacgggtgatagccattggatgttgtcatctattaatgaaaattgcacttccgggataggtttgccaggtgaacattgataatcggcccaacatattattgctgctgatcccattttttgtttgtaattccaaaaccagatcatatgtgataattgaattctaaatgaagcatttacaagtaatcatattttttggctgacattaaaccttgaaatgcttcctgtgatggtatttttcatttgtgtattgacttcatttgccttctaatagattgattgttattactgttttttacgccagtggagtatggttacttgcttactgcattacggcaacatgatcggaaattctaaatattttagacccgtattttctgatttctttctgttttgaaaatttacaactccacaaattatttaagcatttatataaagctgaacctatttttcttcctgttctttgttcgattgaacattgtccgtatgttacagggaaatttatagcgatgccgtctgctgaattttaatctgcatctagtcatgtaaaggcaaatgcaaaataaattttgtgcttgtggcaaatatgtgaaatcctgatgtcactcacatgtgtttccacggtcttgtgctggcttttcggccctggttatgctgcaatcgggtaaccggtactacttggtgtatgtgtatgtatttccctatatactgtggttgaccaacatgaattttcagctaccgttttgcatattggacttcatcagatcagtccggcccatagatttacgtgcccccccttcgtcgggatggcgtgatcttcaacggggagcagcacctgtgcccccttcctagtggcgtgcgcctcggccacgatgaatctccgacatcctgccgccttctttctctcctccagccaacgagcataggcacggtgccgcattcttctcctctggtgtcaagcatcctgagcggcgacggcggtgaggtcttgcagaatcgatccaacgaggtcaactacgagatcgacgcggtgtctgtcatcttcctctcctccaggacagtgcttcgtagatttggtgacgtggagccctcgtagacggaggcctcggtggtgtcgacagcagcggtcgctcgtcattgagcccgctgaagcggccgcgatcgtgcgtcggcgggggcctctttcctatctctagtttttctctacttcttggacctatcgccgatccatttcatggatctattttttttgtcacctcttttatgggtatgttttttgacgatttatttaacttttggtttactagtgttttttgataatgagaatgaatctctgtcttttctattgattatgttcatgttatacacacacaaggaaaagagacaccaatacatgcattggtgtcccaaatatttggcattcgcgttccagttttgggacttttgggacgcgagctgttacatgttaactgccatattaattattaattaactaatgattaatcctaattgatcatatattaattaatcttaacacctctaacattcatctacttagatggactgcaatggatctatttctttaacttttggtttactagtttctttttaatgcttctaacattcatctacttagatggattgctttgaaatttgaccgaaattggtgtgtatgtatctaagctaatcttttgaaaaaattgagtatgttcttgtggttgattgaaacatttgtgatcattgggtccatctacttacatgtcgtccgttcattgacgatgtgaaacttgtgcaaagcagaatgtgttctcacatgttggcctcataataataaaaaaaaggcttaggtttaggcggtctggtccggttcgggccgtcccgaggcatgagaggcatcgggatgggtttgcgctacaacatcaggccgaggcgctggctggatggccacgtcgcatcggacgggtgcgagcccagcacggccacgctctaaatcatactctccactcacactttcatctggtggtggtgcccatgacaacatacgttatcgggcaccatgtccgcgttccggaacgttaggcaccacacggtgtcgttcctggggaccttgtacaatagcctacctggcggcgatgaaagtaggagttgagtgtcttttggaacacaaagctggggtcattgaactagggaaggaagggcttgtctgccgaggcaatgcagttgaacaccgcatgcagcggcggcgcagtgctgcgacggcaagcgatctgttggtgaaggatccgtctgcgtaggagagcgacttgcggtacccgcgcgatgccccaccgtcacaggacggaaggtgatgggagcgggcatgtgctatggcagtagagagggagtcaaacaaggtatagaaaagacaaatgtacttgtttgttgtgtgcgtcttgtgctaatacaatactctctccaacccatattacttgtctacttttgtatcgaaacaacggtgttaacgtggaacggctgctccatcaaaccgtactgggaccgacggtctaaaaccatagagaacccgagtactgtccagaatccatggcacatcctgttgctcgagcccgtggtggcaaccccaagcaacttagcagaggaatcagtttgccgtgatcctaccggtagccttggctaccaactctctatagatagacctcaaatttgcatccgccaatcttgtcagtcgtcacctttggttccccaacctctgttgcgccctaagtgccactgaaaaacattctttgcgattctccgatgccgtagctcatgcccatatacctcgtttaaaggaaaggctttgtgttttactcagtggccggctaaacctgttgcggcagctcctgtttggaaggcgccggacagtggatgggcgaagctcaactcagacgcaagctttgatgctacgtccgccatggcatgcgccgggtgcgtcgtttgtaactgccgaggggaggtgctcatctctgcatggacaaaattatccacttgtgcatctgcggaagaagctgagatattggggtgtgtgggttgccattgaatggatcaacatgcctattgagatttaaggtgactgctcaggacgcatcgtgcgacttcgttcatcgacatacgacatgacatgatggggccacttactgctcgatctgaagtctatcctagctgacgctgagcgttttaagttttccttagtgaagagggagtgtaatagagttgctcatgaactagcacaactagctaaaagtgatgtggagtcagctgttttgcgtcttgagtcaccaccttgtattgccgagcttctcgctttggattgtaattcgttttatttctatcaataaagcactcctaattcctcgcaaaaaaaagaagagaaaacacacctctctcaatctcatcactagccagaaataaagcgccagttgccctggctgctatgagctggaacctaaatcgacgtgaccggatgtccaagattaacatttgaacagaagagatcagaattctggcattgcagtaatccctcttggttttcaccttgtggaacaaaaaaagatcagggattacaggactagcaagtcttatcggccaggagaaagttcggctattgctataggcacactccgcatgaaccctcagctctggctcgaaagttgaaatcaatcagccagctgaacagctaggggaaagtctaattccacggcattcaccaattaagctaatcaatgcatcaaatgcctcaagttcattgatttcataactcaacatagagatcccacaagcactagcctcagatcgatggcataatgtctcgacaacacaggacgcacaagagatgcatcaatgcaacatatagagttataaactaaccaaatgaactaccgaatttctcaaaaattgagttcagcagtagagtgaatgggtttagtcttcgtcctcatcgaagtcagattcatcgctcaaatcctgcacatcttcgtcctcagagtcatcattgtcgctggcagaatcgatatatattgcttttgctttcctctccctggctgtcctcctaggggcaactggctcagcagagctcccagactggggagcgtcagtatcttctgttccagttgaagcacctgcaactctttggaaaaccgagccgctcttcttgttgaagggggaagccctcatcttgcgcactttcttcacaggagaaggagcacttgtggtactatcgtctgtaggtttgaatatttcttccatcactttctgcctcatgcccttgctctgagctggcgccctcttcctgacggcaggctttgacttctcagcagcaggctttctgcctctagttttcttctcaacttgcacttcttccatggcaaacccttcgtcctcgctctcatggatgggtgctgttaagtcttcttcgtcagaccagtctgctaaagatgacatggccttttttgctgcacctctattgcttggttcatccactcccttctttcctttctccggtccctctgtagtctcagtttccatgtctgcagcaggagttacttcatcagcttaagcgtttgtaaaattaaacttaattaaatctacataaacgaaaggtagatcagctttaccaatatgttctggagaagagtcaagattagaagcagcaaggcggtcttttagttcaagaatttcatcctcagcatctttcacctgtgcacttgcctattaaaatgtatgactgacttgtaaaagcagtagataaattatgacagaaaaagaaaaggcttgcgtcagggcccaaccttcttagctggtttcttcttctgtgctgccggtttgggaattgctgctacataatcttcatcatcgctcccagccaaatttgccttggaaagttaaattgttttatcacttgaaagaaaccaataatgtctagttctccctacaataagaaataaatcacttgcagtaatgtctaccttctgagacttggctgcagtcttctttggctgtctcttgggtgctgctttagatgccttaccatcttttgtcgatttttcccttgccagtcttctcttctcctcagcagctttaagttcagcatcaagcacctgtatcaaaatgatgagtaagacaactgaaacacagaacatcaagcaagacattcagttctacttacatccagttccttctcaagagcatcaaggtctttcacccagagagattttggatctgttttactcagcctttcaacttcattcactagattgtccttttgtgctatgagctgcttcaccttctctagagtcaaagtaccgattgccatcgagagaagatactcataatcacctccaagaactccatcagtatcttcagcaggactctcttcattttcttcatcttcttcttcagctcctactgcaactggctctgtcttattttttttcttcgggaaagcatcaaaattcttctccttaagctccaggaatagctcagccctcttcctgttatttacttttatatcgccactaataacagaacgaataaaacgaactctgttctcaagcttcaataattccaccctcatatttttcaacattgttatctgcaaagtataaataagttaatgttgtagttcacaaatcaataacacaggggggagggggagtcaacatgtacctttcttcggccatagaattcgagcctcagtgtgaaaaactcttgaagtactgaaaagttcacataatttatttaagtgataaaaccatgaggaaaagaaaggacttgtagcaacaaattaaatacttactttcctccggtgtgtcatattttcgtattttaccattcgagtcaaataagtgcatgtttgtcgttcccattgtgtttgtcagcttgaatttcttctcaaggccttcttgcatagcgatagccatgtttttctcgctcaatgtaagttcaaaatatacagaggaatcatcgcattgagacctaagatcctgcaattttactgtgattgagaaaccatacgttgctaacccaagagaatgatctatttgtaaaattaactacctcaagaaatggtggttccttttccttattcttgtccttgtccttgtccttatccttgctcttgttcttattcttgtccttctctttttccttttccttcacactttgaggacacatggacaaaagaaattctttgtaatctaaagtccagcggcggacagggagctcactaattataagcttggtgtcattggctgcctctataataccagagatggtatatgtgacacctgctgcctttgtagttgtcttctcaaaagagccctgtcagattatgagaagaaaaaacgcacctataaaccatgtgttgaacaaaatgaaccaaacaatctgtgtatcaaaacttgctagtataaacatttacacaccttgaaccccttgtaccaaggatccattggtacgatcggatcatcatttagtaatcgtttcagattagcaacaatatctcttggattatagtttggggtataggtgctccatccagtgccaatgccttcacttccattgaccaaaaccatgggaatgattggcatgtacctgcagaaggtggcacatgttagggacaataaggtaatctatttcaatcatgcaacattaatgttccgagagttaatattaccaggtgggttcgattgactgtccatcttcattcaaatagttcagaagaacatcatcatccttcgggaaaattatgcgagtgatagaaggcaatctggtgtagatgtacctcgcgctggcagcatctttgcccccctgaaatgaatataaatatgctacagagcattagaagaaattgttacaaagaacaaggtcatgtggtacttggcttttaaataattagcccaccgaatttctggtgccaaattggccacggggctccaatagacttatattattgctgccaacataatcttgagccattcctagaatcgtacttgctagactctgctccccatggtggtatgctgagtgttcagacacataaccaataaattgtgccacctgtcagcaataagggaacaatttagaaatatgccatgataatcacaaatacgcaaattcaaaaaactccacgagatggcacaccttaatttctttaaccaagtttctcttgaatgaggaaaacaaaatcttcctctggcctggtttaaggccgtcaaccattgaaggaattgaccgttcaaggtctgccatcgagaagagtatcagctctttgttgataaaatcactgtacttgatgcgtttctcgcgttgatcaaggcaagttccaggctggaaatggatttgtgcattaatttagatacaggatacaagataccaataccaacctgagaaaagatacaaggtttaacctgataattgcttagccagtctttcctatcagcaatccttttcttgctgaatgctaactcaatagcatctccatccttgtcatccgcccagacaaaatccttcctgtgatgcgcaatcttttcaaagtactcgcggccttcgtctgcagtgctggttcccagcccctggacaatcgagaagtcagttaagacataatacaactgcagtctccacacctagcacaattccctccgccaaaaataaataaaggagaagaaaataccatcatgtgaaccataatgcaagaacaaaataccttgtagtactttatagaccaagcacttgcatttgcccctagcctctccttccatgcttcatagtctggcattgagtaaaatgaaattacagatttgctccttttattggttgcctgagcaaaaagtaaagagtattatttttgcctgcacttaagaaatatatgatttatatgaaaggaatgtacgattgaaatgaaaagttttagtaacgaactatgaataatcattgtatcttcagtacgaacgtatctggcaaaagaaccaaaattcacttgccttgataattggtgtgatgaactcaaccaagaaagatgggacttttaggagagatggccaggatgagtgaatgaaattgatcagcaagcctttgatgtgtgaaccatcgtggtcctgaaatttaatatgttcaaagccaagaaacaacttgagtttgactagataagaaaaatttggagatgttgctagacaaacctgatctgtcattatcatgagatggccatatctcaagtcttttgtgctattgtactcctttccatgctgcagaccaattattttcttaatattttggatctctgcattctccatcatctgcttatgggttgcttctctcacatttaataatttacccctgagaggaaacacaccgtagtgatcatttcctacaatacctctgccagccatctgcggagaagaaaaccagaactcttcagtatgacagtaaaagtgtgcgctatggcatttaataggttcgcgttacttacagcaagagcctttgctgaatctccttcagtaaggatcaaggtgcacttatcagagtccctcccaccagcgtcatttgcatcctcaagtttagggatgccgagtacatttgacctcttgctcccatcagtcttcttgagttccttgcttagtttgaaatcagcccaagaaaggagattgctgacaacacctgagtcagcaactgcaattgtaagaaatgaaaatttgtattagtggtgcagccacacatgacaaaactgaggtaccgaagttaactcatcatatacccttcttaaggaaatcatcagagagatcacacttggacccaaagcttccctgacgagtggtcaaggtctccttggtctgtgaatcaaaggcggggttgtcaatgagcgcattaacaaacacccataaatacccctttactgtgtgcaatttcatgttagcttgcttgttcttcttgttcacaacggccatcacatgggtggcgatttggttagcaacatagtcaacatgtgttccacctcttatggtcgcaattccatttacaaagctgacctgtaaccagacaaaatgtgtgacgaacaacatgacacaataagggagctatacaggaacatagtccaccttacctgctgaaactgcccttcgcttagactcacacagacctcccaccgatcatttactttttggtaaatactgaaagaaaaacggatgtaaatgattagaaacaacattgtaggaactttaatgtatatctcaccaaagctactgtttgatcaaaactatcataaaacctggggagcttgactccatctttggaagccgagtctatatacaaattcacatattccaagaagctctttgctggcactttctggccatttaactcaaccttcacggttttgccaagggttcctgccatatcaactactcgcttcttcatgagtgccacgacatcatcttccagatgggccatgttaaatttcgcaaggtcgggcttgaaagtaactctggtccagttctctgactgcttgcactttgaaatctcaggctccgacttcttccccatgttttcagagaaaacctgcacaattattcaaggaggcatgtcatgatgtatcatgcactttgtgatgtcagcggccgttcgttaaacatacaagaaaattagttagtattgagtgtaccagttacttcaaaataatagtcagttttatccatttcgaacaaaagcaatagtcagttttattaaattagatatatgtctccatggtaaaccttgccgatgctacaaactgttgacacaaaagaaggttcgtaatagtggtaaatacataaataaacttgtgcatccagtttacacagaaaagaagcttttaatcattttcttccgagcaaacccagatactgaactagtaatatactccaatattattctggtatcacgctccaatatcacccgattctgatctataaagtggtcagaaccaaccgaacctaattagaatgacatggcacaccaataaatctacgtctccaaagccaaacatttctaatctctcatacacgctccaatatcaccagatttgtcagatgtctccatttgtaatcccaaaacacgaccgcaaaacgtatccaactgaaaacgctcaagaagacgatgatgatctcacctgcttgtacttcttttgccggtgcccatcagctgtctcgatcgtgaactccgtcgagaagatgttggtgagtttggcaccgtagccgttcctccctcctgttgtcttctgctcgttgtcgttgtagttgctgctagtgaggaggtggccaaagatcatctccggcacgtagacgccctccgcctggtggatctcgacgggtatgccgtctccgttgttgtatacggagacacaacagccctcgacgtcgataaagacccggagggagtccattttggggtcgcgctgtttgttgtcggcggcgttgacgaggatctcgtcgaagatcttgtagaggccggggacgtaggtgacaggccggtgcaccatggcgccgtcatcgtagacccacagcggctgcgtgtgcttctccaccgagccgatgtacgtgtccggccgcaggaggatgtgctccagctgcgtcttcttctggtacatctcctcgatggtcttcccggcgccgccgcccgcgacggagttgtgcgaggagctggacttgagcgggggcttcttggcggcggcggccatggcggcacagaggctgtgtgcccgctagggtttgggatgggagaggttgcgggattggggaattggggatctggggagaagaaggggaggggcttcggggtttaaagtgaagtggaggggaggggtgtgccgctaacgggcgaggcgttcgaaatttgaattttcggggccggctttcgcgtggtgggtttgggaacggatggatgggatcgcggcagcgtccgatctggcggtggaagcggaattcgacgaagaggccgcagcgctctctctctctctgacgccgctggcaggtgttgacggttgttttgcctttttcttgcttcgcggtacaaatttggaaatagtggtggggccttgccgtaagcgcccaactcgaagtgttcaaacttgtaaaacaaaaaaattcttatccagtccaggcacgtctcgatcattctggaccaggaatcactcaatcacgtggccagctgcgacgcaaggcaaggcaacacacggtcgatcgatacgcaagcaaagattttctagtttagggaaatacttttatcggattctccaaacctcggcacttatgtttattactcgagttttcctctcctttggccctctcctgaatgtaattgacagttatgatcctgtccaaaacgaaaagctaaaaatgggctggtgaaaagcttaaaaagcgacacctgttactttgtaccatcttaatggcaggaagagcctcgtgccaactgcaaagcggaaggcatgctgggcgtagtaagccctcacagtacgtacacacacatcctgtaaagccaagaatactagattatcgattcttccgtggatgtttggatacttctctcacgtgtctatccagttggcggaaagatgattccgcctttggatgagctcatcgtcagtctatttttgtcattgagttcagaaggaggccaattatgtcaatttagttcaagaagagtccactttagcaaaaaaatcttattactgcaaggcaagagtattattttataaccgataaaaatataactaagcatgtcgaatggtattagcacacatcatcattttttttaagaagagacgcaacgtgttcttgatctattgaaaggtagacacacgatcgagaaaaacaaagttcagttacaaaagaaaaacaggaagaacaaaaaaaaa

SEQ ID NO: 2073 - DNA, 4434 bp, Brachypodium distachyon
  Intron number 5 from transcript Bradi3g19450.1 (locus Brad i3g19450) derived from phytozome v7.0 (chr-ID Bd3; pos 182 65230 to 18269663)
actagattgatatattagtcctgtgaagctctcaggtatttgttcatccataatcccaatagcattttggtcaagatctgacattagtgtatgtaactatgtatcaatatgtgtatccctaatgatctatttgatgcaagtccttcactgggtattagttattgccatctgtaacttagtggtatatggtggcctgaatattctaaaatggtgaatccctaaagcaaaccttttttgccatatgattttaattttgcctatgtaatttagttacattatttaaatagcagataagtatatttggtccctctgctttggacggatttaagctttcaaggacacctactttagaactgtttgaagtgcatcctatggatccaggtttggtctagtcatgttgacatgtcaacagacatcactactatatgatgaaattttccttgtttagtacagaaaggatttattttctcgtgatggttctaaattagacaatgtatgttgaatgcaacacacacagtagacaacaaaatatgaatctatcactttgttacacattatatcgaggctgctagaaacaattcatggaatcagtagtgtctaatgttgaccaaaagtttattctttgatgatagcaccatgctgtccatttgatacacgggggttggcttggtagcatattattacgtggttcaatgcacaatgcagtatttgcagattcaagcgtatgtaatgtgtctcctaaggtgcttgatgtttgaagtgactagtcagtaaatggcatataggcttgtgtctatgcttacttctctttgattttgcgcatttggatggactgccaaggtgatcaaacatggtcaccaccttgaagactgaggacgaggaaatgggccaggcggccagcaacaggagcccagaggcagagcagaatatctgtgggccgatggccaaggttggcaaaatgcatgtcagtgagagtccgggagcagcatacacgcatgtgttggccaaggcaggcatagcataaaaatagattttgaagaatagttacaccgaatcaccaataagagggaataatttattaccctggagatctaatcagacacagaatggtcaaccagaaacatcggagagggggaactacaccacacgatccgtggggatatcaagggaacataccagaagtcaggaagatgctagttcttgtcaagcttccgggtgtttgcaagaccgatgcatcaacattggctgtggcaacttcttattgagttcttccagaacatctttgtcttacacatcaacaagaacaccacagttggcagtggcatgcagcaagaagcagcagagatagcctagcgcagcagcaacagcgcagatgattgcatcaccggtggcagtggctggtccaggacataaagtgatgcacccatgtacacaagaaatagcttagcctgggatcccatgttcggagatggaatcggtcactgggaaggaattgcatgtagatacatgtgagacaggtaggtcagaatatctctgctccggtttgttttgcacggttggaatgtcccaatcctttcattaggagtttggattagtgagaaaacctgtcataagtttgcacacagaaattcaggggatattctttgagaagaggaaggtcctatctgtgcatgaaaggaagtcaactctgagaagaaccccatggatggccacagcacgaggatgactgtatatccgatctttgtgtgcatgcaactgcaagactatgagtgcacttgttcctttctagctttctcagcatgcttctatttcattatgcttgttctgaggtgccaccaaatgttttaatcgtagcgtcaacatctctgctttagaatgagtagaagggccagcagcagcagagcagagtacctgcaggaacaatggctgttcacttgtctgcgctgtggcaagagtccaggatcataagtgcatgtgttgtcagggcaggcagcagcagtagtaggaatagctagcactgtaagcgaagaatagactgaggagaccttctcagacaaagtaagaatcagccagaaacatacccagacaagatagctggtgcaagcatcatccaggaggatatcaaagaaacaagctggagtagaagatttgcatatgtgttggtgcgtgtcaagtataaaaaggcgggatccttttcttatctggaagaagctagtttttgtaatttgcacatcagatcatgatgcagcatgagcttttgggagtttgctggcccggtgcatctatagctgctgttggcaacctcgttttgagttattatatgcatgctggaacatcttccacagcaacacagcagcggcagcactgcatgaagcagcttaggtaggtgcagagaggcagcggtgataagtatgcagtctagctcagcatcaacggcagatatgagtgcgacaacagtggcggcggctgtgatcataagtcagatatggaatcaccattggaaagaaattacatacacatgtgaacatacctttttctgctgtttgtttgcacggttggatccttccattcggagttcggattggagagcaaacttgctgtaagtttgcactttgcacacgagaatttaagagatattcttgtgatacagggatggtcctgtctctgcatagaaggagggcaactcggaaagggacatgatgtgtggccacaatgccgcgataactccatttcctgtttttgtgctcatgcaacaataagaccaggactgcaattcttcctttctcagcatgcttctctttcattatgcatgtttgggtgggctacaaaggtcttcaactgtggccaccactttacagctcgagggtaaggagggccagcagcaggagcgcagtggcatagaagaatattacgggaatgacaatcaacatacatgtgcactgcagcaagagtacatgatcatgcatgtatgtttcagccatgtcgtgcagcgacaggaaaatggagtccaggcaactttaggaaaacagagtccggaggaatagctatggcaatagtatggataaacagataagccaggaaatctacttggacaaagaacaaaccaggaataaacatagtcggaagcgagtttgtatcgaaggaaacgagccagaagatttggattgggctgtgcgcattaatttcaaaggaaatctgggttcttatcagaaagatgctaggtcttattctttgtgcaacacgagcttttgggaggttgcacagctgtgccatctacattcttccatggttgttatattgatttactctcttgtctttgggagcattactccttttcatgccaataacaattaacaacaacagagttggtggtacaacacagcaagaacgagcaacggaggcgcagtgattccttctttgtcatcaaaagcactgcatagatgcctgggagaggcacacttgggagtggcacacgttgtaaaacgcctcagtctatcctgggtctgggagcagtgcctttctgccgaaggcactaaggcagcagcccaccttcttggctgacattgttaaagacaagaaagtagaaacgaaaccaaaaggcaaaagatgctcaaatgcttagtatcgtagtgcagtggtcctagatctcatccatggttcaggtgacatagtatcatgtcagattgtcagctacaagggaaaaagagagatttactccaacttgaagtgcttccttctcatagaagctcaccatcctctctgcagcccttctccagttgcagctggaaagtaaagtttcctagctggtctgaacccgaacttgggaatcattctgaattatactcaactataattatcacctaactagtacagaaatacctatgttgatgttttacgcctgatttctcgggagcaggcttcttatgttgctccatctgcctcaggctatctaagaacctagtaccagctagcacctgaagtggcttccacatttgactgcagtggggtttccacgaggaaattgaatacgctgctaaagagtggtaggtatgatgtagttgtcctgaagtagactataatgcttttgctatagtgcatttgtgagtttttccacgactagagcccgcaagtttgtgcccaagaagagaggttatcaacagattttagaaaacaaaaatgaagtgaatttttgcaattagacatggtagtcccaagcaagtgctattttggagcgttaatctcttttgtattatttgaagtaacatttttattatattgtttttctatccgtatctgaaatgtattatacactttgatatcatacggacttgacaggcttgacgagacatgctccatcttaacaatgggtgtgagatgcataccttgcttcagtgtgcctttccctgatccctagctatttgttcgtatatgcag

SEQ ID NO: 2074 - DNA, 7622 bp, Brachypodium distachyon
  Intron number 7 from transcript Bradi3g51650.1 (locus Brad i3g51650) derived from phytozome v7.0 (chr-ID Bd3; pos 526 95050 to 52702671)
acttagaagtaacctatacacacaaagaggagaatgtatgtgatccgtcgctcgtaactatatgcttgttatgttgtgccattacagtttacagtttatgttacatccatctatattgtttattcacgttaccaagaacttgctagcctttcctgctatcatctgatccattctttttggcctgtttcttatgtttatcgtgttcagcctccccattatgatttaccttgaatatcatttgtactttactgattttacttatgacctgccccattttattatatacagtacagttaataaatcttactagatctgtttttacactctttgaacttgccatttgaatttacagttgaattatcataccgtaaacttctacagaattttacatatgcaattaaacatatcttcaggatgttcatgaatctacatacatcgtacatgtcaacatttttgtctagcattgaaaaattgatatttaagctggacctgtcaataaccagtcaaacgaccactaccagtacagttcaataacattgttatttagagtattttatattgaatttctatgtggtattattttgttgatgtataaactattgcccttatgtcaagagaactaagtatggctcttaagcaaacaggacctttaccaggctccactaccagtttaaaaattacggcctgaaaaaaacaccctaattagaaataaacttgcctaacaaagagattacagacaataagccctgaaaacaaagaactacaggaaacgagaggcttcagttagccatcagatggaatgtatcttcattgaggtttagcttccatcaccagtaccccatagttttattattcaaagttcaagcataagtatttcaagacatgctctgtgatcctcacaattttgtaaaagctaactggaaattcattaggtctctcagagtttacataatacttactttagaacctgttcggcatccctccactcctacgaattcttgactccgcttctcactccatgaattcccgctccgctgccaaaatctggagttatgaacctgtccggcaatcaatctgaactccagtttctggctcattgtacagaaaacagacattgacacccctgctttattgatggacagatgctatatctagtgcatcagagaatcaatcttcagcattgatttcacagaggatcaaattagcagtatcaatttccagcatcaaacttcgcacagaatcacataatcacaattttcacaattagcagcagttttctcactgtttcacatcatatttatcacagttttgccaatcccaaacttacaggaacataaattgcagatgacaaaatatcaggaaccaaaaagaactatttctatggctttgaatatctctgtctttgactgttccttcgaatatcacacaaaaataggagctcacaaaaaggaggtcaccatccaacagcaatagttgttgctagtgtgttgcgcaacctttccatgtcaacatcactagcctgtgaagtggatgaatctgatgcatttggaaggccacccagagaaatcactggcagtggtagatctatgctactccttaggtactagcttacacgtcatcactaggagtctaggacacaagagaatagacctgcatgaaaaaatgctcccaagtccgaatgtgtgtgtatgtatgtggatcctccaggggtatatatttcttactgtgttggtaccttgagaagatagttggctaaggagctcaaaatttgagtaggagatttgagaattaaactagaaatgggccattcgcgggatccgcttgcatccctatagttggcacataattaggatctatcaaattgaacaaatgaagcacttcattttctctctatcacgttgtgcttggatgagtatatcctagtgaatttctctttaggtgttcttagagctactgttgaatatgtggcctatgttggtccaaaaagcccatcacatgaactggtcgagggggtcttcttccccagtccctcccgtgcctatccccatcctctaagccgtcgtcccaccaagttgagggccctgcacccaggcgaggtatatttccacatggtatcagagccacccgtggcggctccggtgacggatctggcggtggcgacggtggttcctgcagtggcgacctaatttccctgcacgtgattctggcagtggccaggatgggtcttggcggcacgtgcaggctgcagcggtggcgctgggaggcacagtatgaggtgcgggcgcgcgtgcaggctgcagcaatggtggcactgggtggtgcactggcggctcgcgagagactttggcgatgtgcaggaggcgcgggggcgacaccaagcagcgaggaggcacggcgcagtggtgaggcgatgtactgcagcgcagcaagggtcagcaagggtggccggggctagcagcgtgaaggaggagatggtgcggcgcatgcaccttaattctgccaaggactctctcgaggcagcgagggcaagggcagtgcaggagatggaatgcagggggaaggtccagacctggcatgatgagggtgtcgggaagaaacagcgaggcatggtcgagctgctccaggtcaaggaaatggaggcagtggctgcagctggggaggagaagattgaagggaatttgatggaagttcagagatcgaattcaatggaatcggatgttaacacgcaggacctacaagtattgtccttggttgcggaggtattggaggttgtgtcacgcagtggcagtgaagaaaagaaatgtacgcagctgttggggaagctccagatgatggtaatgaaggtgggcagagaatcgttcttgcaggatgagatcgagcaagtcagtcaggaggacaaacaagtttgtttgtatgcaagtgaaggtgttgctgaaagggtttccgtagctgttcatggaaccaattcagagtggatgttagattctggggcatctaaacccgtcactggaaattcaaaggagtttgaactatatagttcatattatcccacacatgaggaaacgatacaaaccgctgatggcactgctcggcctatcgaagggatgggatcagttaaatgtacaccaaaaatcagactgtcttcagtcttgtatgtccctgcgtttcccgtgaaccttgtgtcattgagtgctcttattgaccagcagaactgtgagatatttctgaatagagctacatgtgatcctagatcgtgtgacaggccagaagatcggcacaggaaccagacatagaggattgtggtacattgatcgtgagggacccgacaagatggacagctcggtgttagcagcaatgtctggagaaaaggaaactatggcaatgactcagcactgtagaatggggcatatatcatttgataagatgtacaaggtgtttcctgatatcatgaaaggggtcgataagagtaagttgaagtgtgatgcctgtgagtgggcaaagcacacaagggtgtcttatgttagcaagggattgaggagtatcacacctttcatgcttattcattcagatgtgtggacatgtcctgttgtgtctattagcaacatgaagtacttcatgacctttattgactgttactcatgcatgacttggagttatctaatgaagcacaaggatgaagcctaccaatgtttaaaaaatttctatgcctatgtgaagaatcagttcaaggtgcaggtgcaagtgatacggactgacaacggtactgaatatgtgaacaaagtgtttgggaccttcttctcagagcatgggatttacaccaaacatcatgtccggacactccgcctcagaatggtgtagcagaggaaaaatgggcacatactggcgcggtcactgatgttcaccatgaatgttccaaaattcctttggagtgaagccgtgatgactgccaaatgtttgatcaaccgcacaccatcaagagtattgggtatgaagtctccttgtgaaatgttgcaaggggagaacaaatttgtagtgcccccgaaactatttgaatgtgtttgttttgtcagggatcacatgccatcagtgagcaagttggatccgagggctgtaaaatgcatctttatagggtatccgtctgggcagcaaggttacaaatgttggagtccatcacagagacgcacctttgtaagtatggatgtcacgttcagagaatccgagccatattatggagagaagactgatcttagtgttctgtttgagggacttgaccagctgcagcctatacagcatggtcaagagggggagaaagttgaggagcaatgtgctcatgatgcaaccagattttttgttggctctattcctatctctatggcaccatattctgtctctgcaacaccagatgaggcacagagaaggtggcccaaccaagacgaggaacaaaatctttgagtgtatgcaagaaggcaagttcagaaggagcgacaggttcagggggagcaacaggttcagaacgagacaccagacaatgatgctacttcaggagagtccataactgattcagaaacgacaaatgacttgcccatcgccttgaggaaggggacccgtgctgcggtaaacaaacctatacaacggtatgggtttgaaaatgatataagcaattgtgtcatataagttcttgtcaccctcttatcgtgcgtttgtagcctctctccaattagtgtccattcccactgattggagagtagcacggcaggatcctaagtggtgtgcagcaatgagggaagaactagaggctttaaggaagaacaagacctgggaattgtcagatcttccagctggaaagaaggcagtgggatgtaaatggatctacacaataaagcagaattctgatggtaaaattgaaagatataaggcaagacttgtggcaagaggttatcgccagacatatggtatcgattatgatgagacatttgcacacgtagcgaagatgaacacagtgaggattctggtatcttgtgcagccaattttgggtggtcgttgcatcaacttgatgtaaaaaatgcattcttgcattgggacttacaggaggaagtctacatggaggtaccgcccggtctcacagagtttggaactgccggtaaagtatgcagattaaaagaaatctctttatggtttgaagcaatcgcctagagcatggtttgatagattcaggcgggctgtgtgtgacatggggtatggtcagtgcagtggggatcacactgtgttctacatgcattccaagcagaagattacaattctagctgtctatgttgatgatataatcattaaaggagatgatgaagctgagataacaagactgaagaggagcttgagtaagacttttgaggtcaaggaccttggcaaacttaaatatttccttggcatagaagtggccagattgctaaagggaatagctctatcgcaaaggaagtatactctagatcttctcagtgatatgggcatgctgggatgtagagcagcttcaactcctattgatcaaaatcataaggtgacagctcaatctggagaactagtggacaaggagtcatatcagaagttggttggaaggttacggtacctctgtcatacacgtccagatataacttatgctgtaagtgtggtgagtagatatatgcatgaacccaggagtgaacatatggaggctgttcacagaatcttaagatatctgaagggatcaccaggaaaggggttgcggttcagaagcaatgggaacttgaatatagatggctatagcgatgcagactgggcaagctgcttagatgacagaagatctacctcgggctattgtgtctgctggaggaaatttagtgtcatgcaggagtaagaaacagcaagtggtatccaagtcaaccgcagaggctgaatatcgagctatgtcacaagggttgagtgaaatgctatgggtcagacatctattgggtgagctaaagattttgaagaatggatgattaaatgtgtggattgataacaaatcagcaattagcattgcaaacaatcctgttcagcatggtagaacgaagcacatcgagattgaaggagaagctagatggtcaagatagaacatgtctgttctgttcaggacaacaacttgcagattgcctaacgaatggattgggaactaaggattgcaatctcgcatgtgacaagatgggaatgatagatatatatcacccatcttgaggggcagtgttgaatatgttggcccaaaaggcccatcacatgaactggtcgagggggtcctcttccccagtccttcccgtgcctatccccatcctctaagccaccatcccaccaagtttagggccctgcacccaggcgcggtatatttccacagctacacctctatggaattcagaaacatgctatctctctcccttctaaggtgctagatatcctggtctgtgactgttaggatagccagcatccacaaggtaatacttgtctacaaacagcaagaaaattgcatgttagtgctaccatatgtgaatgcatgtgagcactcagcagcagcagcattcacctagcaaatcggctaaattggtagcatacagaacagaattacctagtttgcaaatcggcagcatttattcagcaaattctcaaaaggcttcttttacatcacattcacctagcaaatcagcagcatacacaagaacaaattcaagcccaatcagtcatactcatatatatgaattaattcacatatggtgggagatggggagagaggttgggggggggggggtgatgagctctcctagccgtcgatgaagactagccactgctggtgaagatgaaccacgctagggtctgctcgctgccatcttgcctccaggagtggtcgggcaagatggtgggcctttgggcaaggtgagatcgaatggtaaaagagcacatcagtggcagagcctctgccagtggcagtgatgcgtaatttccatcaacttctagaggtacttcggaattttggtccacggagcgattccagaaggatgtggagcatctatttcttgactccggcaaaatgagctgtgagccactccgctccgcattggccacttcgtggaggtgggtgtttactctgcccgctcgaggtgcagtgtcctggagcggagagaatatgaacagtcccttatttgcgtaaaacagatcaatttactctgttattcggtaactgtatatttacaatcttcatactaccaaagctttcatgtccaaaatgttctcttagatgaatatgtttctcactgcgaaggaaagattaagtatccatcttaaaacatagatgtctagtaatgtgctgtggttgttttaatgctatgaatggaagttagtagtccaaggaaattgttgagtgtagacggctcatggtcactacattgaaatcacttttgtgagtgttagtacaagtttcataaaatgcgctttttttatgtactccgtatcatctaccttcccaagagtcaggggacgtacatgtcgttcccccttatgctctgtcgtactattgatgatcttaatgggtttgttccatctgtagggagcacttgcgcttactggc

SEQ ID NO: 2075 - DNA, 7425 bp, Brachypodium distachyon
  Intron number 3 from transcript Bradi2g51520.1 (locus Brad i2g51520) derived from phytozome v7.0 (chr-ID Bd2; pos 511 04915 to 51112339 reverse strand)
ctaagttagcacacaatttgtgtttgacagtgaaggtagttagtatataaaatactgtttggctagatggtttagctgggttaacagttaaaacagaatcaattttgctgggttaggttattaaccttattggtgattcggcttaatcttgggtgaggacttaagtggtctgaaatgctttggctgtttgggttactttatatactctccaacttaaggatctttgtacaatactacatgcatgcattctctaatccatgaacactgatatttaagtggccactctttcattagaacatggagattgcttttacaccttgaaatagcagagaactgtagccatatggattttgtatggtattattggctggtctataatatacataatgttttgtccggaaattattaacacatgggcacttgcactgttgcaaccagaagtaactaacgcggtagttgatgtaattttaggttcatcatatgtactgcatgtgcacatgcacagttacacccaagtggatatttgcagtagtcgtaatatttctaggtctgtgcaatgtgctgcattttcaacgctttcaaaagcttgcaatgtaaacttaattccaaggcattgtttgcccatgaccctgtacaatttgattatttaaaacttatccttgtagaatgtaattcttcattctgttgttttgattcgtacagttttgaattgaaaagtgcacactaaccatgtgtgtggctacttttatatttttgtatcatcatttatggttgatttaattgaagaactaaacctggcacttgtttcagggcagatcatgacagtatattgactggtcagcttttccaaattaacatgtgtttttctttttctctggaacttatgatagtacttagttcagtggtaattgtggtccgtttcattttgctaatctctgactgttattatctcaggacccggtccttcaaatttattcggaggacatacctggaaaatcaaaaacttttcaaaggagaagaagagagaaatgaaaagtgaaccatttgaagctggtggttttaagtggtagggtgcccaatgataattatctgaaatgatggtgttctgtcctttctcttttctgcttccgtttattttggtccagtgatgaacctacatcaaaatgtgtctggtttagtattctgtgttatgtgccattatagattgaccagcattccctttagcctatcatgtatgaatgattgctggtattactatgctttccagctcatgtctttctccattttgttcggcagtgttgcaagtaagagaatcttttcataatggtgttgaactctagtgccatcgttgttagtggtaaatgcacgtggacattcctaatatatgcaaatttaattgttcaacagctgggttagtctttatcatgtttcagcatgatgctagattgttcacttcaattttacacatgctgttttctggatcctgaaaagaaagctttgtgtccctatatggaactgggccaacttgccgtacataacttgaatatctctgtaagatgtcaaagctgtcctgtatatcaagtagtttctgtttgatcaatttctttgagttggtaccatctttgctaacattaggcactgctgattgatgcattaatcaatgggcctaacctactatcagtgcaactatttttgaattcaaatgagcatttaacgagtgttgttcattttatttcacctcttccaaaggcaggtcggtgcttatagagtgctagctggccaaatttattttctataattttcttctgtattctacttcctccgttcctaaatactccctccgttccttaaattaggatgtatattgttttctttgaccgagcctttgaccaaagattactctatcgacgtgtgacttatgtgatacaaatcataactacaaacaagtatttgtgaatatgaatacaatgttatcaattttattacacaaaaattatatattaacagtacggagtaaaaaaaaaggtgaggcgattgctgcgtccgtctccggctaagaaacagagggagtatataagaagtcctatctttgtcctaagtcagacttcgtaagtttgacccagttttgcgctgcatctcaagttgtttggtcagactagtgctctgtttgcgtcttagcgatagaattctcctcattccctaatttgatattgtagacgttagtaggtttttctataaatttcgtcaaacttttaaaagtttgacttaggacaaaactaggacttcttaattcagaaatggaggtcgtagttcttttcatacttccaaggcccctgagatagttagtcaatgcgaagttgtaaactagccttttctccctcatgacatgctattttattatcatttgtttggcacctttcccatctgcagttgttcctttttgcaggtatattctagtttaccctcaaggatgtgatgtctccaatcacttgtcattgtttctatgtgtcgcagatcatgacaaacacctcccaggtttggtttcagtgataacatgttgcataaataatctcttgtcctcaaagtattttttttaatcattcccttgacactttcaggatggagccagtttgcacagttcaccatagctgtgggcaatcttgatcctaagaaagttaaatattccggtaaaatcaattgacagtttttcccttttgagataaacagacaatagaggttaaccaagtacctttttcagacaccttgcacaaattctggaaaaaggagcatgactggggatggaagaagttcatggagttgtcaaagattcaagatggttttcttgttgatgatgttcttgaaatcatagctcaagttcaagttattaggtagtattgattttcacaattgttaattcaaagatttttactgcacttaggctccctattattaaagataatctccattgcttctgtagtatggaaactcttttaatttgattgttcatactatgcacttgagattaggtattttgttagtattttatgctttcctagataattccaatcttaaagcttacatttgtgatcctgtatatcctaattttatcctgttgcaagatgtgcacattgctcatgtatgaggaaaccttctttggacagtttctgattgcaatatccagcgttcgttcttatgttgaggccgttatttcactcttatgttgtttaaaattgagctttttctgtcttcagtgtgtcaatgtgcacgacctattatgcactcggttatttggatatatttgagaactatactttgctcattgtctatattcttcattgtacttaattctcattaattggttgcaaagaccttatgtaacttttttttctgtcttatttcaatattggagggagaaagttgaccgcccttttcgttgccttaatcgcccatatcgccgagaattactccgtgtctatatgacaaatatagagcaaatttaccggcgctttgttgaagaacgcagaaataaacttaccaagctcattgaggataaaatgggatggtccaggttagtcaattagtttttgaatgccatatgacgtgacccttaaacagcagaaatactccccatggtccaaaatataaggcgtataaatattgtctgaagtaaaactttctaaggtttgacaccaagttcatagatttttttttttatcaacagctacagtgctaaatgaagatcactagatccatcttgaaatttgtttgcatactattgatttggtacagtagatgttaatatcttccaaaatataaggtgtataaattttgtctgaactcttaagtcaagctttctaaagtttgaccaagtttgtgaattttttatcaacaactgcagtgctaaataaagatcactagatccatcatgaaatttgcttgcatagtgtattgattttgtatagaagatgttaatatcttttgttaaaagtttggtcaaactttagaaagtttgatggtcaacaaagttcatacttatattttggaccggagggcgcatgtgtaattttaattataatgcatgtttttcttgctgttgcagtttccgtgctttctggcttgcaattgacccaagcacaagacgtcgcatgtccagagagaagagcgacattgtattgaaaataattgtgaagcatttctttgtagagaaagaagtaacttcaacattagttatggactccctgcatacaggattgaaggcactcgagcaccagagcaaggggatgaacggtagaggaagattaatggactcagaggagttgtcaacgtctatgatccatgttgatatggacatgtttgttttatctggcgatgtcctagctttgcttgagagggcagctttagaacccctgccttgtcaaccgctgtctccaaaggatgacaaatgctcccagagtcgcactaaggtagtattggtatatgatttactgtacattaatatttcttttgtttggtcatcttgataggaattaacttatcctggctaaaaacttgtctggtctgtgtcctatatcgagctccttttcatatctcccagttccttcaattatttaacttaattattttcatatttacatccttcttaattgtttctattggattgttgtgttttgaataataaagcttcctattgcagagttttcattttcttgaatttgccatttttgatggatgctcctggttgaaactggtcacagaatcattgaatatttttggaccaaacagaaccattggatgacctatataaatgctagttgatcttattctgtaatttggtttacctggccagataaattcaagctgcaatcagcggtctttgttttaaaaaaaagattatcaccaagtgcctctgcttttactgccattcatagttcttgcatggttttatttgctagcttgtatatcatttagcttcttgcatggttgcctaggctagcttatgttgatatcccatggtaacccatctggtgagggatcagcataaagaatttatagcctcgtacatttgaactatcatgctagaacctcaggttgcaatagctaggtccttcttggattcttttatatcactcctagactcctagcagagactacgtacccaatatattcttacttttttttttcagggataccaatatatcttattattactacaatattaggctcagtttttctgcagtatgattattagtagtcttgaattcttaaagtctggtggttgcaagcattatgattatttttctgcagtatgattattgttgtgctgctcacttttcgttattatcatttttctaggatggtagttctggagaagttaaagtctcaattgagcatgaagaaaagcgcctaactgagttcagtcagaagatacttgaaacatttgttctctctcatatatttaggtaaattatttatttatttcatcttgttacctctgtgtgattagtttactgggtcgatatattattaatttggccaacatttatggcctcgactgtgtcctccactctttctttttggaatttttagtccattttctgttcagtccgtgatcaatcagatgattcatgtggttctgttcagtccttgatcaatcagatgattcatgtggtccctgtatttaagatttttacataactgcgtatctcacattttttcaatgttttcctgctgttttgaattgaagcgtgtacctttcgaatatatcttagaaaactgaacaagtgattttttacaccaattttgagcttgtccctcagttctgcttagaagttagaaatataatggcgtactggcgttgtctgatacatttgatatttgtactagataactcacatgtttcctattgcttatgttagtgggattgaggtcgcttatcaagaagctgttgctttgaagaggcaagaggagcttattcgtgaagaggaagaagctgggctccttgaaaatgagatgaaggggaggcgtagcagtaccactgataaggagaagcgtgcaaagaaaaaacaggtcacattcttgatgcggttcagcacatcctccctctcttttaatttgttgcattgaaattgttaaaaaacatatccttgcattaaatgacctgtagctggatgctgttagctagcagggtgatatgatgatagctttcctttggtttttacttgaacatggcgaactagcgaaatgtttaactgctggagtatattggaagagaatttgcttctagggttttcttgatgattcttcttatcgagtattgactaatgtctactgtacactcgtttgattggcttgatgcctgtcaaatttccagagttctgagctttggttgagctctcattctcattttctgccctgttactgatgagcgtccagtagtgtattgtggtgggtgggaactgttccaaatcaacagatttactcacttgaatattgaactgaaaaaacaagctgtcctgatttctgttctaaatctcaccgcttcattctggcatcatacattcatactatttccctttttaaaaatcattaaatcgtcattgtgcattatgagctaatggccttaaacctccgtagcccgtaaggacatctgaattctggcatcaactcatgcataatagatcaagtgcaaactgctttgctgaacctaaacttgaatgtcacagtttgactagtaactcctttctagttttaatgacctcttgatgctacaagtattgtttacttttgatattcttgtgccttttgttgagataatcaagttgttgatggtagttgttcttgtggtgaacaagttattaggataggaattagcatctccgatcagctagtctgttggtgatttttattcattttatcgttccattactatacttcactccctccagttatacaaagcctatctccaaaatctcgaaatcccaatctcccatccatgctgaaattaattagattaaatccccgttcaaaaaaagaaatagattaaaccaaacgagccaatgcacattcagccacgcttttgaccagccaatgcatgaaggagaggtatggtttatacgtgtcgaacactcacttagttctccttggttatagcgttttttggatgtgccttgtataccgaaccggagggagtaccacttcatagtcaacatagcaagtgagctgtcttactgttcagtcagttatcatgtgcatggtaatgtgcatattgctggatgtgttgcacgtcagtatcactgttcagagtactatgatatattaagcttaatttgttttgagtgtttacgcagtgttggactctcttacttacacaatcttgaattaccaattttaggccaaacaaaagaagaacaatcggaaggttaaaga

SEQ ID NO: 2076 - DNA, 1993 bp, Brachypodium distachyon
  Intron number 32 from transcript Bradi1g24950.2 (locus Bra di1g24950) derived from phytozome v7.0 (chr-ID Bd1; pos 20 168652 to 20170644 reverse strand)
tgcaacttgaaatccgagagagagaaagaaagggtgttatctcacagcatcggccatcacatgctgatgaccttcctaggataacaagcaagacaagccgtagagaggttgaccagtaagtttagtaaatattagactcgtgaaattagtattgcacacctttctataatttacatttcacttgcagtgtgttctttatatcttagatgtgttgtgagccacacaatcaaggatcaattttgtattgaaaagtcgtaaaatcatcagtttaaaattctttcctaaaagttcctatgtctggcacatacaaaactacaaactgtcattttctttgacatcttttagcatgcaccagccgcttccttagttgaaagttaatatttagtcaagaaaagaattttggtcccttgtttgttaggcaggtaaagagtgttgaaaaatccatcattcttcctttaaaccgtgtggcgccacacacttaacgtggcactggtaatgctggcaacaaaccacttattctgagctagtgctattgcgcaagtttgcctcaaagccttgagactcgctaggctagtcacgactattcgcgaaactactctgagtctcacatcatggtttaacaactgaaagtgaaaaatagaagtactcatgggcagtatgaattagtgggaaatacgcaactactccctctgtcccataattcttgtcgctgttttagtaattatgggacggagggagtaaataattgttgtttttgttagaatgtacaaatgccccatgtataaacagctaaatggggtatgtattgcaccgttgccaagaattggcagttattcaaattcgacgtttccattgatagagaagattgagatttatgatccacttaatcatcatgggtgacgccttgttatatactccctccatcccatattaagtgactccaatttgcccaaatatggatgtatctatacctaagaagtgtctacattcatgtcatattttgtcacttaatatgggacggagggagtactagccaccatgttacatcagtgaatggtgtatccagaattgattatgctctctattttacttctgtaagagttatcttaaaagaagtaagcattgaaaacttacaaaagaggatgctcagttggcaaggtggtgttgagaccacccagcctgcgtgcgttcgaggcttgcctctgtgattattcaggtggattttttccccttggtgaccctaaaaaacttagttatcttggagcttattttagcagcatcagcatcattctgtgggttcttagttacgtgttaccataattgtgttgatcctcatattggtgcatgtagtttgagcttttcgtaataaattggcaagctacataacaaaacagaaaaatcccatggaaatgagtagttagactcgcatcttacgttaaatatgttgcagtcataaagtatattagaaatctgcagaaatatgattggtagtatgattttctttctagttttgtgcaacagttgctataacgtaacatctgatgcagccacaattttggtaaaattccatttctctaacagcctttgtaaaatcgcagaacgctcgagagagaatgggaagaggaaaagaggcctagaactgaagcaaaaagaaagcattggaagtaggttttcgtgaggactttggtccttccctataacatgatctcacttgagaacgtgcatgaccaacagcgaacgagatgatgttttcttgtagcgggaagatctatttgggcatggtttttaaaggtgtgctggggcttaaagagaacacgggttcagtccttcacccaatacttcatcgatgctgtgtccagatgcaaaattgttactccctccgttccataattcttgtctcaaatttgcccaaatatggatgtatctattcctaaaaagcgtctagatatatgtaatatttcgacaagaattatgaaacggagggagtataaca

SEQ ID NO: 2077 - DNA, 1476 bp, Brachypodium distachyon
  Intron number 4 from transcript Bradi1g07810.1 (locus Brad i1g07810) derived from phytozome v7.0 (chr-ID Bd1; pos 553 6230 to 5537705)
ttcgtgttgcttcaaggtttgtgtagatgcaagtcaaccgcttgtttggttatgtttattcttgcttccccgtaaaaaaaaatatatgctttttcttgggggcgacttgtatgagatctgggcttcgggtgtgatcgtagaatccaagaatatgtaccattggatccaatggtagagaactagagataaagccaggtgggactgaatggtactgatacacattgcactctgatccccgacttccggcaacatagaatttatctttgtcacttagatttgattgaaatttgaatcaggaaagtaacaaggagctgattgtaggacaaaatggactgtacccatccttccctaaaaataggtcactttagatttttttttaattccccgagaatcagttgttttaggatgatcgaagtttatccaaccttattaatatggcccatgtacagaatccctggtgattacgtgggcgctaatgaggccaatgtgctcgctttgtcacgtatcttaaagctgacgttatgcacgtgtgcagattgagatgggacagataagatctgcacgattcccctcgccgtggatttaacggcaactgcagccagtttacacgccccaaatcattcctcggtgttcgcaacaaatctaacatgacctacttaaagggaataagtaattagtgtacatactgtgagaaatgcatgaaacaatactatgaaatgtgtgatttttttttgagtggtatgaggcctgaaaataacacaatgtgcttcgactatgcgtgattttagtgaatttaggaaagatggatcgagtttaggcaggactacaagattcaatgtttttacagaatgtattcgttttctatttggtatagtttggcactcccttcttccccatcttgaccaccttgctgaatctggccagctcattcttcatctcattggtccagacagttggattctacgacgtaaccaaagcacagatcctatagtcgccctgcttttctttgctccgtggcttaattttatcgaatcctcttgatcatgttcaatatacgaggatcataacttgggggtgtgacgtactgtcggaagttggctctagaagcaacatatgaagttatgaacaaagaagtttacttaatttgaactcgcctagactgttttgactgcctaatgggattatttctgtgatgtttccattctctaaacttgaagcaatgaagatgttaaactatactaacaattaaaatcttatagaatatgagaaaatgccaagaaaacatgttttatcactacaacatatttttcttgttagcatgttatcaccggtcttgcttattaatgtgccaatacatggtacacatgttctgattttccacttatttccatgttatctttttttgtatctgaaagaagcattttttttccattttattcaggtatttcaaaggacctgaacttcttgttgatttgc

SEQ ID NO: 2078 - DNA, 1263 bp, Brachypodium distachyon
  Intron number 1 from transcript Bradi4g35740.1 (locus Brad i4g35740) derived from phytozome v7.0 (chr-ID Bd4; pos 410 85710 to 41086972 reverse strand)
cgcgagaacccgctcctcggcccgtcgtccgccacgtacgtatgccgtcccgtccctacatgctttcgctagctcccttctgttgttttggttgttgttaattgtgatgtggtgtcgagtagtgcctcggacttaggttttccgtcgtgcttgtggtggaattttgcttgtggtggaatttggctgataggtttgagtatttatctaccgactcttgcagtttcattcattgaggtgctactagtcgtcgtgcttgtggtggaattgggtggatagatttgagtatttatcttgcgactcttgcagtttcattgaggtgctactagtattaggaatacgaaattgagacttcttagatgcgttttagctaattctttgagtaaggaatttcatgtggatttcttattcttcctgaggattcttttggggtggattctggtagttggagctcgtatccttcaacactactaaagagtcggcgatttttattggtctgaagtctgaactgaagtgtaactagtcggagcaaattcctcagatgttcttcgtttgtatctgaaggctttgctccgggagaatctaactataaacttttgcttctagattcggatgccttttccaccttgtttcactatttggaagttagggatacaggggattctgtcttgtggtgatgacaattcagatctctctcacttgaatgacttgctctgactgaacttgtacaatttgattccactgtccaaaccggtccactattttcagttaccccgcagtttgtacattactactgatgttagcgagactacctccacacgacacaaatagttcaggctttctttggcttggtgtcaaaattgcttaccgagacagtctgctataatatttggtacttctgttggattatagctgatagctggatgaccaggttgtgttgcaagtgtaggattctgttttattataacctactagatggaattaggttaaccgttttgacttttgtagtaccttctagtagaacaacctaagatattagtacacttgtagttttctcttcgacagaactggcattcttgcttattctaattgcaacttgctatgtagtgctatgtatctcttaggattgaagctcactgaccagtggccacagaagttcgatgtttgtttgatttatggatttaatctagattatatttctaagtaagatgctttgtacacgatgataaagttaacagctccacttcgtcttgcagtttgggcaaa

SEQ ID NO: 2079 - DNA, 1767 bp, Brachypodium distachyon
  Intron number 2 from transcript Bradi3g16450.1 (locus Brad i3g16450) derived from phytozome v7.0 (chr-ID Bd3; pos 146 28591 to 14630357 reverse strand)
tctccatccagatcgacggcgtcctctacgtcaaggtatacccctcatgttcaccttcccttttggtgctgtgctgctgctgttttacttgttggtagtttggtgccttctggtgtgtctcaagttttgtatgctcacgagccagcatccccttgcattacgacaaaacatctggtctggtcttacaaacaatgtcttgacaccctgcttgtagattacagtagcagattttgtaccttccctctcgaattaggacaaatcatctggtcttagaaacaatgccgtgatgccctgtttgtagatacaggagcagattttgtgtgcccgctctttgaattaggacaagttatctggtcttagaaataatgcgcaatgcgatgatgccctacttgtagattacaggagcagattctgtatgctccctcttgaattaggacaaccttgtaaggaatcaggatatgatgttgtggcttattgtggtattgggtatgcaattggtgtgggtcttcctatttctgtttggttatattatgcctcttgttatgactgcattgggctaaatttaatatggtaaacgagtggtctcactttcaacgatagtagcattggtaatactccctccgccctgaaataagtgatgtggatttgtacaaatccacgtcagacagtgcctaaatatgctgttccttgctgcttctgttctttattttctgtggctaatcaagatttgaagccatgcttgaactttaggtgcagttgcaaagatgaattaggacaagttatctggtcctgtaatctacaagtagggcatcatggcattgcgcattatatgcagtttttatttttgactgagatgttggcatttggatgattccctaatatcttccacgcattccactttaatttgggttctatgcagttgcaaagatgatgctctgtatttaggtgcacaaagtgtcaggatttgacatagagccatagaattaacaacctgtgaaagtgaaattgcaagtgcctgggcattctgctttagtaattacattggtagagtgtgtttgcttttgcaatttagtttgaggatttcttgctgaaagttgttcagttacaatctacaagtgtttctaggttattgagccatatccttgtttgatggttttggggtgcaaatagatggtgaaattgttgtgtttatataaatgtaccattcatttccttgtcacctaatcctttaggatattctttggttggatttaactagattctgttgaaatgcttcagtttcactggttactgtgatgaatagctagattgtcagtctggctgtataattataggatttgttcttgttttgtttgacactttgattatacaagtcattaagcttgctttatgatgatggtatctcagatacttccagataagttagtgacccacctgcttcttcttttttgtcgacaaaaagctgttgttactatctgttgcttggttagtaatgtttattttttcccttgctgttcaaccgctttatattgagcattcttgttgggtaggtcattgttatttggtgggtgtagatgttattcgaagtactaatgtatttgcaaattcacccaagtgagaaatttgttcaaggtttattttgtgaagtgctgtcagcattctggaaattagaggctgttgctggcaatttctttgtgttagtttctatcttactgtattgtgaactttgcagattgttgatccctaccttgcttcctacggtgtgga

SEQ ID NO: 2080 - DNA, 4339 bp, Brachypodium distachyon
  Intron number 3 from transcript Bradi4g17380.1 (locus Brad i4g17380) derived from phytozome v7.0 (chr-ID Bd4; pos 185 38250 to 18542588)
gacacacaccaaataaaggtatctttcaatctttgtaagtttgtctatctactatgactagtgagctggcacgtgcaacgcacgtctagcgacaatttgaattatacctttttttataccttttatatatgatgacttgtatttttacaatttgtttccatcttatttatttttaagccaaaatgctaaagttggcctccaaaaatgcccacactttcttcataaaatcatcaaatccgaaccatgatgacttttaaaaaaacatgcaccctaatacactgaagtcgaatcaatctcatttgaacatagacaatattcaaaatcatcatgttcaactacaacactaatttctcaactcatcgtatacgttctgaagaattaaacttgccctaaatgatagttgatgtaacaaagataaaaatcaatgaaaaaaaaatatctacaagtcttttcgttccctgtttccagatgaacatgaaggagttccctatgcattgccagttcatcgatgcattcaactctcagaatttagaagccgcaagcaagctaagacagaacaataaactgcacacattcaagatagctattaggtccttactcaggtattgaatgaccgcaagcacaacattgctaattctctatgtgccagttagctcgaatgatgtgatttttttgcaactgaaactctgaagccaacagtgataatatatgaacaacagtcaaatcggtgctcttcattcatgaaatcacaagcacatataaagctactgggagttttgacggaactacagaaagctaatgcgtatctccaaacaagacttatatttggggtttgtaggcatgaagaataaaaatttaatccactgtatcctgccttgcacttacgttgtaagctcaatgctatgtagactccatgataataagcaaggttattggacaagtccaacattaccatggatatatttggggtttgtaagctcaatgctatgaagactccatgataataagcaaaggttattggacaagttgtccatcgaccgttgttgcagtaatataccaaaatcacaaaatccaagtataatcagcagttattggaggcagtacggccttagatggaaaattacaattacttcctcacccgaacaattgttctttcagctaagaaaacacgtacagttattctctgaaattacaaatactgcacatcaggacctatcagtgtgacaatagcattcatgtatcagtgtgcaactactataaggtgatagggtctcaaacctggtacactacaccaagtgattgcaattacctagcttgctggaaacttcatgccaccaagaacggtcatgttgcttgtgttgcattgaacaggctcgatgcaccaattctgattctgcatacaactacatgtataaatggcaatacaagtaaagaatagtataatccatcagctgctgcctgccgattccagtaaaaaaagaatgttcatttacacgtcaacggtagtatatttctgctttgaaggaagagaagtactgtcaaacatttgtccctcaatttgcctgatggttcagaagttttctctctgaaattgggcatgacatggtcatatatgcattccagagctgcaagcaaaataacagattctccgatcagtaaaaagagaaaggaaataaaacataaagctcttgacatctctatctctatagtaagtgtacacacgtccctataatttaaaacatgtctttggcttcttctttttaagagtgttttcttcctcgtatgggtaaggaacttaaaaaaaatttaagtctaatgagaatttcatgcatggctaccaagctgaaattatctcactgaattctgtacagggttgtacattttttggtgcctaatggcaaacactggagattagcgaagtcaagcacacaatattacacagagagaggtcatttgcaaaccaaagaaagtaatgaaaagaggtcattttcccatataatgagccaaggtaaaattccaaaccaaggtaaaaattcagaaagaagaagtcacattcaaaccaaggaaagtaatgaaaacatcataggaaaagttcagaaaagccatataatttccgtgactattgacatgatcagaggtcagacgtttaacaaacataaagtaagaaaagccatataatttccgtgactactgtcaggttagataagccgcaagttctagcagggtatgtaggctcacattcaacaatggacaccaagcacatgatcatctagccatcccagacaactccagattgacaaaaatgcaaaataaaactatggtgcatccagccatccaaaatagctatagaaaataacagagaaggtaactacatagccattttgattatcgaaagaacccaattaatctacagtcagagaagcacctaattgacgggcatcatagatattcagataactctcttcaccttcattgagatcgccaaaattgcaagacaatgcccccatgatgcctccaatgccctgctcacaatcaaagacatcgtaataaatcaagcatcatggaccagtgtagaaaacaaatcatgaaagacctgcagtcaacacagaaacacaccaaaattcattgttgagcatattagtggccagatttcacaaactaacatcgctaaactatttaaatatgcagaggaattgaatttaccaaaacatcctaaagatcagatccacgtatataaaattgaaattgtgttttttgctcttttacggaaccgcgtgattccaatgccctctgatttatgaacaagaaaataatttatgcttcaatcaactaatctcattagaccagaaaatgatgcaagaaagtgtcgatgatggtgtggtagcgtggagtgaagttttgttcattctgatctgggagctagggagtgaaggttatggaaactggagactgtcgcgtgctgcaggaagcaaactactaaattcagaggagagagctgaagattttgggagagcagggatcaggcgttctctatttagcagcgcaaagattgcggagattctcggttcagtccccaagcaacgtgcggaagggatgggggccggataggacgggcaccttgtagacgggcgacgactgcattggcggctggtttctgagtgacctgatgtcctggagagtgacgccgacagcacatactgttgttgtatcaggaaacaactttggtgccaatggaaatacattggcattttgaaaacctaaccgcaacttaccagtcaagttttcaagcagtaaatgaagcctaacaggctaaagataatgtagtttcatagtggatggcaactcatttcagaaacatactggtttgtatcagcaacaatgagaggaaaatgctactaaattgtacatcaaactgaactggctgaaaagcaatcatatctgtgcgattgggagatgacataccaatagcctcttgctatgtgatgtgaatgtgcatgccattaaattaacaaccacatggttggcctggagatagaatacagattaaacattgagcaaacactgaaaattaaaggaatcataatccaaatattcaattgagtaaataatggctttttatatagagacacacggtggttctgcacatcttccaatattcataacttcttgtagataaatatcatgtctaaaacaaatccatatgccagaacatgataacaactcgtaatgaaatctaccaaagaagcagccgtgctaattccctttggtggcagcatggagaaatgataagaaatcaaggctgctgctaatgcccttactctctggacagtgaatcgcgaaggaaagtaagaaagggaaataagaatgaaccggcaatttgattcctgcgttgcctgcgcataaattcaacagcacgacgccctggcagtgcccccgggctgactgtggggttattatttgtccgtgtacgtttagttgggtggacgttgggatgaatatgtttgtgcttttataagtagtagagatagagatgaaatttcagtgggttaactaaaggattggatcagcaaagatcgagattcatcttttactgcgtcactctttatcctgtatcatgcaaaccctgtccggtaaccataatctacatacaggcatttccttttgtgctttgtcaaataactatttgcacatcatattttgtttctctaatattgaagtttccaatagttcttatgttgatctcttcccctgccatttttctgttgggctatggcactgcagttgcacatatctttttttttctatgtctattaaattagtaaaatgtttatttgtagaa

SEQ ID NO: 2081 - DNA, 2554 bp, Brachypodium distachyon
  Intron number 4 from transcript Bradi3g03730.2 (locus Brad i3g03730) derived from phytozome v7.0 (chr-ID Bd3; pos 247 9438 to 2481991 reverse strand)
tatacaagtggaagtactggtctgcccaaggtacacttctgcttgagcatatttcactttcttgtgtattcatttgtcaattgaatagagatcaaagaaaaatagactggggtgctataaaatgataatactaatagaaggttacaactaagccttttgtcccaagcaaattggggtaggctagatatgaaacccaaacagaaatttgtggaaactaatagaaggttagatttgctttttttgttttccaattgttgctttccacatttaagggaaatattcatagccatgcttactgccagttatttccattttgctccaaagaggataaacaaaaccggagcatctcctatagaatgattcattctgctgttctatactttctcttcgtaaatctggttattgttgttttattatgtgttcagtcacaaacacagccactcacttattctggaccatcaggcaggacctacaatcgaatgtcatacttaacagttactctagctcgtgcgcatcatttaatcaactaaaatcaacagaaagaaacaagccagtggacaaattgggccttctatatgtcatatgtcagaggaccaaatgagccaagtgaaagttggttgacaatatgtctgttttaccgtttgtgttccatgaagagctaacatgatatcagttaacaacttatattattttgttccttgtgtgccataccattaaaactggacatactgaatgacttaagtctgctggttagactggtacaagctccgctgcactgctttgtaccactgcgaaaggtttggaatttttagtacagtttttattatcgagaattgtacttcacgcctcctcaactattcatccaagtttggctttccaccctcaactgcaaaacttgttctgtcatgtgttaaaactgttcgttgctctacacactacaaagcagttttgaccaacttgaattcaatgtgcccaactgtccgccacataacgagttcaccactttattgtttacgatattcaaggccaacatgttcgtccttctcttacctttttcgacctctgtttacctcctcatcttgttcctcctctgccttctcatttctctgcatcattggcgacatgtactacttgtcagttttgtgtggagctatgtagtctgacagtcatgcctggaccgcgcgcttccaccttgaggaaccataattctatactatatgtgtcctttcgcatcctttcgtttttgtgttattttttattctttgtgttacaaggcttgtgcgtacttcattgccgtggtaaacgaatgaactgcatcactgctttgggagcgtttggatcctacacaagctaaattgcagccccacttataggaagttcactactaaacttactcatcttattcaggagcttagtctctaacctagagggcctgtcctctggattctttgttttcttttctctctaacaacgtaacctgtacagttttgctaacgccttaatacaaagcgcagtaggagcctctcctgctgttttccccggtcaaaaaaaaattaagaaaacagctttgccacgcaagtttgctcatatctgtcaagaaaaaatgcgatgcaacgctcctctctccgtcagagagtaaagcaaacaccaacttgttgttgccaaaacattgctctagcttgtcgtctgtgttctttactttttttctgaaaggctggtactatcaaagttatacaatgcaacttttaaatgaagaaccttgtagaaataagaaatcacatgctctttttgcacaaagggcctctgatattgagcaaaatggtaatcaggtccccgtggctatgctgacaatgttgtggatgctgccactgttaaccactgccttcacaccaaaaacaatctgccttttgtggctacccaccatgagcagcgagggatccagtctgccttatgcattcagcctgcgccactggcctgccggttggcagtggatatgccagacttggaaggagggagataggaagtgaacaaagataatttgtgtgtttcacaattcctttttctatatcagttgccatgttttaaatgagcttgcgtttccaaaacatgtacatgtaggttttgtgttagagaaaacctggagtgaagtcgtgttagagaaaacctgggtgaaatggttgaggttctgtttcccctgttttaacaacagttgtggggtgtaacatgaactcttcccacctttcatgtttgttttacatatttgattatagtggctgatatcagcaagtcccataactacatctgtattggaccgcttgcactattgacccaacattttcagtataaatcagaaaactcgctcattacagtatgtaaacttgcccattgctagcttgtgggtacgaattctgatcgacgactgactactccatgtcatttcactggaggcctgctgcctatgcttgttaatattgagcgcatttggtatacccagttattttgtcctttttttttgaaaactaaattaagtgttctcttttggacatagggtgta

SEQ ID NO: 2082 - DNA, 512 bp, Brachypodium distachyon
  Intron number 3 from transcript Bradi2g02010.1 (locus Brad i2g02010) derived from phytozome v7.0 (chr-ID Bd2; pos 135 3435 to 1353946)
cgaaactgtcaaggaagtttcagtctactgttgaggtcagcttttgcatcattgttcatatttgctcgctatagctcatggaaatcaaagtgatatgaaaccaatgtactgtgattttgggaagatatctatatccactatagtcaataatttatgctaggatgttagtagtcacatagttctaaaaattgtagtagatcataaccgtaggtactaatgactagttatcattagagggtagatcggtagacaagcatctgatacctgagttggttgagcttgagattatttgcatttgatttggggaagttgattgacccagaatcaactgcattggcaatttcattaatttagtgtgatcaatatgtactgcaagatatctctgcaacaaaacaaatgtactgcaagatatgttgcttaatggcttctatactgcactttttataagtagctgactagagctctataattttgcagagacgtttaaaaaatcgaagaccaaaactgatagt

SEQ ID NO: 2083 - DNA, 8277 bp, Brachypodium distachyon
  Intron number 21 from transcript Bradi1g52510.1 (locus Bra di1g52510) derived from phytozome v7.0 (chr-ID Bd1; pos 50 767515 to 50775791 reverse strand)
agaagtgttggagctggttctggtgggttttcaaggtgagtgctgcatttattcagaaagttacgttggtaacagctcaaaatgtatgtaattactattgatgcactcgaacaacacttactatagaggctattgatgcatgatagtagaagcttaaacgtgcatgcacaacgaccttatgagtgaaggtagttgtttgataaagttgacacaactatgtttcttaataggttcagttgtctcgtagagtgtgacctagttcaagcttagacgagcttacgagtgaaggtagttgtttgataaagttgacacaagtatgtttctcaataggttcagtcgtctcgtagagcgtgacctagttctatgttagtggaggcgttgaggcgatggttatcctcgatcccggaccgaacgggtctttcagagtcaagatgtaagaaactaagaagttcctcgaattctaggccaatcctgcaaattcaagtctagatcgaactggtctttctagaactcaagactaagctctcttggaactctaggcctccaccttggtttttattccaaacgagagtgatcgttacatgccccttagaggggtttatataggcgaatgggttcatgacaaaagaccttggttacccctagtgacagagaaagtgccggcaagagtggaaacttggtacgtgctttgtggcgggccaagtggatatggggattgggggatggttcatggtccatggtggaccatatgccttgtcctgtcaaccttttcattcttacttctagccccttcttttcttctactccctccgtcccgaaataagtgacgtgaatttgtatagattcttatacaaatccatgtcacttatttgatgaaggaggcagtatttatttggttcttttcttcatactagtaagtgtgtacgtgcacgtgcgtccttacaatcttacaatcacacacgatgacacaatggcgcagtcacacgagccatccaacaccgtccgtgtcatgcccggagcaaccatgcatccaggactgcagctagaacatcttatatttagaaacaagggtaccatttatggttggtggttggtcataaaaaaacgctttccgcacctgcacggtaaaattcatcaaactatcaccacgtgctgctagtctgcttcgccaaattcatcatttcaccgacaagcgcagtcaaattgagagcagtggtattcaattcatcctacattttagatattcacagagctgggatctgtactcagaaagagccagaacttgatcacatagtccctactgtttaatatgtcaagatcattaacttctgtatatcgatgggaattatagccatgccctttagctccagttccacttctttggttagtatctgaaagaatcaaaggatatcacttaaacctgtctgtacatgagcacatccaatggcctgaatgatcatagtgtcaacctacagaaatgagcacattcataaaatcactgtaatttcacttgcaaatggagaaaaatgaagaaaagataccaacaaaaaaagcataataacacatgctagacaaaaacatacagcatttctaatattcagtactgaagtacaccaatggccttagtaagcattactatggtattggatgctcaccttttcagtgctgaaatttcagcttattcctagacaaactgtgggacctaggctcgttggacctagatcatgttatgctagtccagacattagttcagtgagctgatttctcaaccctcacatcagttccaacacagcagaattgtgacgacaatcaatgttctgcaaagtcttaattctcagtgacactgatttcgatcgtttcatatgaagaaaacagctgatgcaccgaactcggcagcttttatttgatagcattcctaagttttgagtcagcaacaaccagtcaaccactgtttcaccatcgcaatgcttctgcaagaacttgcgcagacccttgctaggcttgctatcaattagcaaaagtagcctttgagagagcattggaagtattctcaaacatgttgaaagccttcagtgcaaccagctgagataaaatccattgcagtgagtgagtattagataatattgaatcgttgaagagtaaagaaccttatagacaatgctccagaatctcagcaaatcaagacccattacttctcaacagagggtacaaaaatacagtataaaagatcgactaagctttgtttgtcttgacacaaacaataagtagagcaatgaaggacattcatttaccagagcaagcagtaacaagagaaattattcctattttaagaaatctagattgatcatgaaaactgcactacggaaagtaacatttttctgaaatcacgagacatattctgtacctaatacacttcaatttttttttaggctacatgtcccttaactgagacacttcaagtgagtacaggaaatgaagctaattagcagtaattaaatagaatgtttcagctgctggccatgtctatttattttcagaatagaacctctttcagattaaaaatatgacgggaaatcacatggtagtacattaccacgaatatcatttgtagagcaaaatttgtagagcaacatttgaaatcagtcaacaaagcttcaaactacaagagcatttttcatgaaagcaaaggagcacatgagaatacctttcgggtgaacacccacgactttcctgcataatggtcatttgggatcttgtagtgaacgacaccatgcatattttgtagaggaaactgcaacaacaacaccacagatgaaataataacatgctcttatcatgattttgcaggtctaaattccaatcatgtttagtggatcttatttttagcacacgtattttgaatggccaaactaaaatggctgaataatggaaacatatataacttcagtactcccaccgatccatattagttgtcgaaatattacatgtatctagatgctttttagttaaagatacatccatatttgggcaaatttgagacaattaatatggatcggagggagtacatgattacaattaaaggaatgtcagtatcaaaattatgactaagaaatctaatagtttatatataaaaaatacacatcaatgagattcagggaaactcataatgttgatcaagagaatagctcctcttatttcagtacagccaggtggcctaattttttcgaagtaattatttcagaactacatagagcaaactacaccatcacatggtaatggataaaaaaataccaaaatgatgcaccttggaaataaataaatatgaccaagaataatcaactatatctccataaatacttgtacagattaatcaaaatgatccaaaactgtccaacaacaaagagtcaacaaccacacctataagcaggatttaatggataagaaccaaagctataagtttaccacaataaatcaatgtaattattaccggtgtgggaaagaaaatgatataggaaaagagatccatacatagtagaaccataattctaacagtgcgtttggatgtctatattcagggtcggaatcaggaattggtattcgcctcacccgaattcgtccgtttgggtggtctcggtattggccatcggaaaccttcctgaattccaagctccccgccctcacgcctgcgcgagcccgcgcacaattccgaggcctcccgctccgtattcggctgaattgctatcctctataacgtaccggttcgttcgcccctttgaaaagaaaagcaggcgatgctgcggggggaagagaagctgcacacctcgagcgctcaccagcagacctccatgctttggccatccaaacaaaaagttagaattggttgcttcctcagatttcaactgcccaatacatatacatccaaacagaaaacattgaattgcagtccatttcaattccatggctgatttggtattccagcccaattcaattctttgggctgaatgcatacatccaaacgaagcctaagactaaatgggtgaggtatcatgcaaaaatctgcgatctctgcccaatgtccaacatcaactatttctctaactaatcacacaccacatagtaattttggaacaaaatgataagatattctgtgactgcttacatttcgtcgagcatatagtgtgcattgagtcattgacaagttgtaccaggactggacacccaacagccaaacatctagagagctcggtgctcttcagggaggaagcaacgcaccttccctggccgcacagctatgtgctaagatcccgcgtcccagtctcaggggtggttctgcgatggctgcccagtcacaggggcgtgaaggcgatgggcggtcccagtcgtggcgtggcgacggcgggtggcagaggtcgcagggccgggacgtcgcgtcgcgacgtcagcagtcgcgtgcggggatcgactgtgacggcggcaggtcccgagcgggccggcggcagggtgcacgggccggactacgacggcgggtgtgatgcgataggcggggtagaaatttttagatgcgagcgatgtggggctgatacggagattgtcctgccaggcggactgtcagccttgatggagtaatcactaatcgcacacagttaaaaagttatctgtgtttagtgagtctgattgtggggtactttttgatgaatctgatggtgtactttttgttaacaaaaggagatatttaattattgaaattaatgatctaggaatacgtgcgtgcctcatgttacggaacagagggaatagtagagatgaccatgccttgacttgttgactctactagattggccaccgtgcttcgctgcgccgttctttaataggcagtgatgtatgcaatgaaaaatactccagtatgtcatttcaaaatagtaaccgagattccagtagtattagacaaatatcaaaggcagagctactgcagtaggttatcttgataaaagctaccagtcttcaatcatactcgataatgccaagcctacaaattaatcattaatcacaatacaaaatagactatctttttccagtgtttggtcctaatgttttttaggacaaacctgttgatgaggatgcaatagatacagattctaaaatgggaagtgaatgctcattttcaaatactccagtagaataaatttgcatgattaattaccaagtttgttaaactaatatgtatgaaggtgcagctgtggtgtccttttcatgaaaccacttgcacactgtataagaaacgaagcatgtagaaacaaaggaaagtaaggtgccaaatcaaaagacaattatggcaaaaatcatgtgccaatctcatggttgtaccactctttgcggtgagagctgcaaaaagtctagaattaaccatgaataagtatcaacctgtccgagcaatgttagacatgtcttttggtagataatacattaaagggaatactccattactactcgtactacagacaaatggagcattctgtgtataaaactagatctgaacaggatccacaggagaacgagcaaatctgcagtaagatttagaaaatcgacaggaaaggagaaagactaagggtgcgttcttttcggcttctaggaccggcttctcctagaagctgccctcacctagcttcctggagaagctgcatcacaaatttagctagacttccaaaatagttttaggccaaactagtttggtagcttaatcaaatttaggtagcggcttctccaagaagctgggataggacagcttctcagagaagccggtccaggaagccgaaaagaactggccctaaaagagcacaagttatgttgagccatgaatgcataacatggtaagaatatttaacagactcttctgaaatcagaagctaatagcaataataatattcatggttaataggccatactgcatgaaatggaactattgtttttagatagaagccagcaaacatcagataactctagatcacatatataaataggtagtatggattagggacacatacagtctcatgtccctacagttctcctcacaaataaattatatggctagtgataggaacaaggattattctccttccagaggcctatcaaaaaattcttgacaaacaactcattggcaaagaaacataaacctgcagtcagtagagggcagcaacaacctggaatcagaacaacagtcatcagtaaaccaaaagaaagaaccacatagcctctacactacaatatactcagtgtcagtaactttccaaagttaactgctccaatacccaagtacagacctacatttttaacatgtagctgggttgcaaaagattcagaggcaaacaacaggtagtaaagtatcaaatgccacaatttattgactacccatttactaatcatttccaaagtaactatcttcttttccaataacagcaaggaacaaccaagtaaagaaaccaataatgtgcagcaacacaactaaggaagtctagattagaatctttgaaacctttcgctgattcagagacagagagagagagagagagaagagcagggagattctatatttccacatacaaaatttacccgcacccaaaagtctgcatgacacctgaaatcggcaagtgcactaaccaacggaaacttgcaaaagatattataagtcctttcctgactctacacaaaaaccatgtcaatggtttttaataccttttctaactctaggcataaaccaaaattggaaaaaataaatgtgaactatctacttttcttgattgaatctggaccccggttgcataaatagctcattatccatgaaaatcacaaatcatttctagctccagcctttgactccaggacattgcagacttggaatgtttatttcacctctcccagcctcaagacataagtagagaacaatgacatgcttgaatacaacatcttggatacaaagtgtcattatcttattaataggcttactggcatccaaaacttcaagcagcctttaaaaaaaatgcaagcaaccttttttctaaaacctgcatcatcaccaacaatctcgacagtgtgcaagctgcccatacaggagcaccagccacacaatacatacaggagctgactttccagaatagccagccatcacagcaacacgattagagaaagacaagctaaaagcaactgaaccaaaacaatggcaaacaaaaaagtaacaacacagaatagggaatatgcagaataaacctgcaaagcagactgaaaagcaccggtgccaaaccgaagaaaacagccgacaacaaagaacatcctgcataattcaaggtataagcaaagcacatcagcagcaaagaaaacaccaggacacaacagttgcacacagcagcaaaatactctaatgttacctgagcaatacgcaagtcaggacgagccggcgacagcactgagggaggcaagtgacggacagtggtggaagctcgtgcagcggccaggcggtggcagcaagggaggcgagcggcggctggctgaggaagctcgtggagaggctgcaggcggcaaggatttggtggcgatggacacggaggcgagagaaccctagctgcggaaaggggagagagagggagacgctggggcacgggtttgtccatcagtgcggtggtggtggtttacgacgtagagggatggcgattgaagtggccacgtagcccaaaagaacagcaaccaagcggccatgttacagcatcgagagggcagaggattctccgcccttgagaggagagaaagattcaccgtgccttgttggcttgacctttcctagttggctccttgtccgagagtggtttttattcgcttggtcatctccacataggattcatggccaactaatataagggatttagtttactacaacaattagaagaatacaaagcactcagactgaatgcactgacagattgcattaatgccaggaagataaatgttttaagatttgtcatatcttagatttgactcctttgcattttctccttggtgtgcctggttgaggatactattttcgacctatcttagaatggctgcatttagcaatttgaactacagaaattaatattattttggacctaatttccaattatttatgataattcatcattctaagttccagtaaatatgtctttgatttgtcgagcacaatatatcttggccattgaagtatgttcttccactgaaggttggtctgtttgcgagttcatcctactttcactc

SEQ ID NO: 2084 - DNA, 3408 bp, Brachypodium distachyon
  Intron number 1 from transcript Bradi1g14350.1 (locus Brad i1g14350) derived from phytozome v7.0 (chr-ID Bd1; pos 112 94923 to 11298330)
agaacgtcatcgagggcttctcctacggagtgctggtacgaacgcttactagcttggtgcatgcttctccattgcttcagtgttaatccttattatgaactacttaattactccgttcgtaaatttttgtcctgaaaaccacgacagtattgacgattgacgaaacacttgattaacatgcttctacacacatagtactgtggaatgcatcttaacgagaatgccgagagcgcgcgagaggctttttctgtctcgttatcaaaagaaatgatgtatccatcttctactccgaatcatgtgtgttcacattagctaggttcttaattaattcatagcttaatcatcaggagtatgaacgaagggcagctaagtagccggtttaagccggagcaagctagcttgcgagccgtgccgtgctagtgtagggcggtttggacgtctccatccgcgtcagctccgtgaggcccaaacaaacacacgagcttgttccttcttttggaggggttccatctaatatcaacaggacagcagcagaaacaaaccggggcagaactagaagcactaattagtcgttatgcgtacaatcaaataaaccactataaatgtcagtgcttgcttgaccttaaaaatgaatgaaaaacaacatgtacgtatttaatttaaattaagtttgacagtacaccaatttgtgcgttacgtccgcacgtacgtgatacgtccacacattttgtccgtgcatggatccccacgcatgaagagattttcttttctttttctatcgcattctcgctggctggctagctgctggctgccataaggaccaccgatcgaactaaggaatctgttgggcaaacgaagtgtgcttgcgtgtgcgtgtacgtgttttctagctcggaaatgagaaacgcatgaatagctagggatcacatgccaaaaagaagcacatgatctagctggagctaaccgtagctagctaaccggccgcggccggatgcatgcctgcatgcccgcaagagctagaaacctcccgggctttgcttcttcttaattacttagaacactaaaagagaaaagggcagtactaaaaaagctattccggaagtcggtagaactaatttttaaaattaaaagaatacaaatgcgtgtgtgttccatctcttttatgtggctgtgtgtggagctaaaatggacgtgccgtacgtgtgtggtcatcagatcacctcgtcgtgccgctgcagccacaccaacttccgcaattccggtggccaaattcgtttttacatgttgacccatgaacaacaacgacgagacgccccggcccgacacgttaaagcaaaccatacatttcctgacggtcgttttcgttaattaggtgcaccgagactaaattacatattcctccgtacaacaaaatatgtcccaagtttgtgaaaatttggatgtatctgaatatgacttagtgtatagatgcatttaaatttggtgaaagttaagacattttttgttggaccgagaaagtagatggacacacagacacacccgatgggccggatcgcgcccgtgggaactccatccgactcgactcgagccacaaaacatcaacgcaatggccccgcggccggagttaattaggcaatgtgcgtgtgtcattcgattgaccaagtcactataactatacctacatcactacatgggtggaggcaaaacatgaggattggcggatgttctctctggatccattgctgtccaccggtggctagtagtccacaaagtgtgtgtacgtcaccgtgtcttttttgctaaagataacctctattctttcctgggctgacctcagcgccaatcactttgctgcgcccacctcacctcacgactcacgggccacaacgggtgtgcccaaaaagatcagagattgcaatttgggtatgtttagaatttagatggttgcaaaagtatgctacgcatgttaaaaaaaaaataacaactttgtttggacgattgtcaacttttttggcatatgccaataccagtttatcaaatctagttttttttttgccaaagtttacaattcatgggcaaacaaaaacttacaccccattcggatcacaaatagaattgagctcataatcaggaattaattagagttgaacagagtgaactcttgctgtttggttgtccttgagattgaaatttaacccaattccaggtgaaaatacatattctatatacattacatattatatataccaagaaaatgaaatctatgaaataaaaatatagagtaaaacatatgtgaacacatagtaaaatacatgaattaatttgcatagtaattatatttagttatttgttatatttatgtaaaaatgcatacgcgaatgaattggtgtatttgtctatattgtaattctgtaaaagtgttccatcaaacaggatttggaattgacttttgtatcaattttattgtgcaattctattggcaatccaaacacttgaaatgaaactgatctccaattctaattcctatgcaatcaagattaattagaattttattctgaagaaaaggcagtcgattgccattcgattagaagaagaaagagtatttacaattaattagaatttcagttccaattcttgattccaatattttgacaagccaaatttttgataggataaacttgagtccataacaaacacactttgatttctgaaaggaccagagttgtcaaaaatatttttctctcctgctcctttttccccagacatgggtccaagtggcgggatgagttcgctggctgtggggtcatcaacaatcttgataatttttatctcaaaataaagacaacctttacaatttgatcctcgtttgcatactttggcgacaaggatattgtggtgtcttggaacaacggttaatgctctctgggcgcaaactattagtttgtcctttactagagctgcaagtttttgatcctcagggtacccatgcattgaccctccttagttcaatcaattgaactaaagttttaaaatgacacaactttttaaaaaactagttcatttgtttgaactaaacagggtcaaagggtaccctgaggatcatcaagttgcacctctatcctttactaatcaaatccggcaacgacaacatacatgtatcatccatttcccgaagagtcttcaatgttgatctgatgcaccaatgtgtcttgacttcaattatctcgtttttgtagtgggttccagctaagcaggccactgtttttacaatttatcaatcatttgtttttaaattttgtaaaccaatttgttggcccttgaatttctctcctgcactccatttgaattttgaagtttgcgctttcccgcgcacccaactcaaacatgcttctgtatttgcagcttggc

SEQ ID NO: 2085 - DNA, 3898 bp, Brachypodium distachyon
  Intron number 11 from transcript Bradi3g43530.2 (locus Bra di3g43530) derived from phytozome v7.0 (chr-ID Bd3; pos 45 047412 to 45051309 reverse strand)
ttaggactcggagagtgcgatttcttggactagaggtaccctccatatctttaggtatgttgttattttcttatgttccacataaatattgaaccggggacacatttctgcatgtagggggcaggtaaaacttccctaataaaagctatgttaggacaagttaaagaaagaaacaatgcagttctcgagtgcatacatgtagatatgcatagcaagggagtatcaaatggattgtgctacttagattctgcaacagtgaacttgcaggtaatgcagttactttttcattgtcaacttaaaatttcaggttacaattatgcaatactgagaaaggcatatctttgataataagtacctctctttttgtttaattggtactcttaattttgaaaggtctccaaaatttggctgcagcttctgttgtttttgacataatacgtagttgaacttttgaaactttgactaacatcttaaaaataaatagatagattagataattgaaaatcatatgcttaaatttgttgggttaaataagcatattgcaatggaaattagtggtcatagttgtgatttgagaccgtgctggtgttcaaaatgtcagctttagagaactggtgggagaaacaccatccctattgtattgaatttgccttttcccactcgtatcctgttggtatgtgatactgtagttggtccacctactgtttatgttagaaccttttccattaagacgtaacttaaccccctattaacattttttgggtgtctatgaacacttgttatatgttagtaacatattcctccattccacaatacaacgtgtatagatttttctcatttgttccataatacacctcatttttctcttggtaccggcactcggccaataactactcacatccatttattattaacccaatatgagtggtcaggcactagaaacgagagctgtcttggtccaagtgcgcaaatctatatgaggtgtattttggaatggagggagtattaagataagaaaatagattttgtacatgtgcatgtacacacattgttataggttagtaaaatattaagataagaaaatagattttgtaaatgcaaatgtacacacatgtgctatccgggcctgcccatgtgtttacaagtgctttgagatgcactcttgtgtttggttcctattgatttgttaaaacaaatagcctgcaatatctctcagtatgtacctcctatatttgtcacactaaactgtaccggcgtcccctcccctggtatctctcacccctccttttaagttttggagtgtccatgcgttagccggaccagtagatgaggtggcggatctaacatgggagaagagccacaagtgtcctctgttccagcccccgcaaccatcattgccggatggctcaacctcaatccagcaacgagaagctgccatcacttcctgcttcctccaccacgatctccactcccaacctcaccggcaccctcctctgcctcgcccacttgcatgtggtggtgcagccgaggaaggcgaacagcttcgtgagcatgaagctgatggctgagcagctccacccacccgtgacgaccgcgtggtggccctggtcaggagatgctcatgtgctcatccaccctgttactgagataatatggctctcctggcctttgattctctcatgagccagccaagccatcaaatcctctccccgtcgtcaagtccagcaccatcttgctcagagccccagacgtgcagacccggttgtcgtgcatgcctcacccaccatggccctcgtgccgcccccactggtgcatgtcgttcctgtcaagcagttagtgagctcagcggccattctcatgagtgattagtttgcgtgattgatgtgttgagcaatatgaagaacagagcatgaagattccccacaaggtcctccacccgtcctgcaatgttgttccgaccagcacaccgcacagtgttttgtgtcggcctttgctctttgctctgtgcggctcgaccttgacgagaatgctggcagagataccttgccaacccggaatccctgcagtgtggacgattttgtggggagcaaagtgtgcactttcgtttgcattctggacaaattgtctggagattttgtgtgcatctccccccccccctctctctctctctctgctgaacaggagctctccttgcagcactgagctagtcaccttccttgtcttcatcagagagagagaaggataagtacccccaaattgcgaaggactccatggattgatggattaggtgccttggatcaggaacagaacaacatacgctttggtgaggaactgtagatccacacaaggtacatgacgtgggcacgcatccaggacatgtatgtggtggcgaagagcccctcgatgggtttccaggtcaggtctgccgccacggagagcacggcagggcctgcaccggtgagttcccccgtcgtgcccagatgatctggcacgcgttcttgtccgtgcctcccccctccccctccccccgcagttgagctgatgtgatcgtccacgaggtctctccatttattcattttcctcccgctccattgagctgtactgttgctgacaggggtagggaggttgagaatagctcacatgttcactccctgaatctcaaagcatgttcagggtaagatactcatgtgctgatgtgcatgtacaaatgcatttcccttgcgataaacttgcatggtataacccaatgactactttacaaaagaaataaacaccttcaaccgagctcttccaaactgagacatgaacatacttgtctacccaactgaccggttcaagaaaccctaaaatctcaacaaaattatagaaactggccagtcgaggttttggaaaatgggctgtttcatgggcttttttatccccttactgaataaatgtattttacctgttagatactgaaagaacctaactttaaagattgaaaaacggaaactggctgttttctagtggaccacccgggtagcagtttgttggccaaactggtttcgtgaaccttgcccagtagtgagttctgccacaaatatttgatcatttttgctcaagaacaggtgctggttttagtgggagattttttttatgcccttacaatgtttgacaatacatttctcgttacaaaatttgataaccctattttcctgcaacagtctaccaaacctgtatatgcccatttggccatttcattaacacctgaaaaccatgatcgctcattcaaaatgtttgtgtacactgttttcttttactttgcattttgcactatttatgtgttgtcaagaatctagcattaacttgtaccatgatatgtatcatttataacatgctcgcacatgactttccactagatgtgttatgattcactacagtatttaagaatacaattgtgcaaacatatggttataactgtaaagcaaaagccacttgaatcagaaacattgtctagaacaatcagaaaccttggattagttctgaagcatacgactggtacgtattattgtttcgaagcatacgactggtacaatcagaaacattgtgtggcgcaatggaaaattgtaatattctactttatgttaaacaattgttcaatccggtacttatttctgtcacttggccagcttgtattttgtaatcaatcactaagtcaactttcagttactcgtaattagttcctacctcttatccggtgtattctttgtcatatatagagatggggagtagagtagagatcacagtagtctcatgtcttctgcatctttgattactgaaccccaaagagtacctcattaatcatgaaatttttattctgacaggagttacctttagaagttcggcgatttaaagaaga

SEQ ID NO: 2086 - DNA, 13156 bp, Brachypodium distachyon
  Intron number 2 from transcript Bradi4g25500.1 (locus Brad i4g25500) derived from phytozome v7.0 (chr-ID Bd4; pos 309 14456 to 30927611)
tgaacaagaagaagtacatatcaacagaggccaaggcaagttacacttttgatcatctagaatcctatatttttggcatatgctactttgcttcataaactataagcatgcatgtgtaggatcatttacttatgaagtatgtttaaaatgcgtttgcaaattgatagctatgtcctatgtagtatgcctggaggtcctaacccttttccattgtcaacctaagattatattatgcttatttcaaaatgtttacatgctatttattgtatcgggagggtacaaaatcttctgaaaaataatgagctcagtgattgagcgagtatgtttgtgaaaagtatttttttaaataaaacctcaaaaatgttttcactggacggagtggtatgtttttcaccatatgtggttgtctacaagagctgtaaccccgtaacgggtgcagactcaggatttttggtggggaccgccgtccagtagcaaaaagttcaagtctttccatgcacccaaaggcttaccgtacaaccacttgctattatgggctctggcttagttgagtagctagcaggaaaccgttgctttggtaccatcatccagaaaggggccaatgtgtccattgggggcgggcggtgctaggactaagcatagggggcttctagtgatagacttcgtcacaatctttacctattgcgcacgcttgtcgtcaggaaacacattggattgattgtgtcaagtggggaaagtgtacaaacctctcgagagtgtcaatctaatcgattagccatgcccctggttacgagcgaactatgagctactaagtctggatatgaggagatcttctagttttgttttcaaaatccaaaaactgttttgacctgatggagcagtatccacagaatgggtcaagaatgatactatgtgagccgtcagcagtatgacgccggagtgcatagttgggatgaagggatgctatgtgagtgtcagcagtatgacccagagtgcatagctaggtcatggagcagtatccacagatgaccataaatacatttgaaaattattttctatgaaattctagagatagagtttttttaaagaaaagattatctatgagtgtttcaaaatccaaaacttgattttttcaaagaaaccttgaagcttactcaggacttatccttaagcatgtacttgcatttctgctaacctcataggtgtaacttgcaagtacattcaatgtactgacctgcacgtgtcatgtgcagatgtcgacgtatgaagaaaggttacagagggtcacgggtctatactcaacaagcctgtggcgttgatggactcattggtgttctatttgcttttccgctatgtaataaatactctgaattttgttatcttattaaatgaaataaaggatatgtgttgtgatatacatcttggaactgtgtgtactagttattgatccagggactagtacgaaatacatagagattcggatccttgcgggtctgggtcgccacagatggtatcagagcatatgttgtctgtaggacgtggccctagtttggaaagaccttaaggacttatttgctaaagaaaatattttgaaaactctcatattctactctcatctattctttcatgctctcatcccattttaaaaggattcaagcattcctctccttttcaaaaggattagagttaccccaattgttgtggatgacaagttgagtattgagatttcaacaaggattcccgaagatacaactatgaagaaatggaatatgtcaagttgactttggtagaatccccttggtatatagttactcacggtagacgttgtgatttgtaagctgtcatttttttgatttattgacagcggcaaataaaattattttggtaacaaaaccttttgttgtttggggttaatagacgtttttcccccttgggtccattctttcctatctgaaaaccagaagttggtaagcaaagtgaggaatatgctcaagacaaatttgtggaatctcaagaaagataacacggcgtttggatcatacatcaagcctacaaagagatgggagaggaaattgcatgcatgatccataaacttggcagtgatgttcactttcatccttaaacttgctgatttgaaaaacgttcccttaaactcggcatgtgggttcacttatagtccaaattgatgaatttgggctaaattacgctactctgtcatcttgcatggctggggggccttctttgcaaatttgcggccgttgtttttctttcattgaaccccaggtattttttggcctataacccgcggtccagacatcgctacaaagaggtgtcatgtttgatttattaaaaaaaaaacctcactcgttgcgtgttagaccgttgggcctttgtcctcctcagttacactgcctcgcccgagggacacgaagcgacggaacagaagggccggactgccggaggagattgtcaacaatctccaacggcacaaccgacgggacccacatagatggaatcgcgtagatgacgaccacttgaatggtggctccatcgacgtccacacgaatgatgtcgatggcttctgcggcaactactggaacagcgacacggccggcgcttgcttcaggagagaagtgggaagatttgggaatttttgaggctagggttagtgatttaagctgcgggttagaacccatatttttccaaaggggccaacgcaagatttcagaagccgcaattttgcaaaaagaaccccccgagccacgtcagatgtcagcgtggcctaatttggtccgaaattgtcattttggactaaaatgacccaacttgtcaagtttaaggagccgtttttcaaatccgcgagtttatggttgaaagtgaacatggctgccaagtttaaggatcttcaatgcaatttcctcgagatgggacaatgaattgctaataaggagcacttgatcatactctgaattttattatcttattaaatgaaataaaggatatgtgttgtgatatacatcttggaactgtgtgtactagctattgatccagggactagtacggaatacacagattcggatccttacgggtctgggtcgccacaatggtgtatgcttttgctcttctctgaatttgccttgctgacacttcctcttccggcagactcccatctttgaggtatgacattattggttgtgcccaagccggcacagggcgagttataaaaactggctcgtcttcctccattggttcaatcgccattgcttcagccgagttagggcgctcagtccccgggttgccggaaccattgccattgtcaatatccattggagtgacgtcagcttccgagttcgccggaataaatatcgattccgattctggtgacggcttgcgcagatgttccaacgcgatgccagccaggatggcctgccgtgttgatcctagcttcgacaaagtgtcagcagcctcgttctccgcctgtagtatatgatggaattcccacccttcaaactagccgctgatcttctgcacatgaaagcgatataatgccatgttggcatctaacgcatcacaaataccagaggcttgctggaccaccaagtcgaaatcaccgaagcactgaatccggcgaataccgatctcttttgccatcttcagtccgtgaacaagcgcctcatactcggcgacgttgttggacaccacaaaatgaatctacaacacatacttcaattgatcacgcttgggcgaggtgagaactgtgccggcgccaagcccacttttcattttggagccatcaaaatgcattttccaataactggtttcaggtggtggtggctcatattccatctcggcccaatctaccaggaaatccgccaacgcctgagacttcacggcatctcgtctgtcatactgcagtgtgtagggtgctaactcaatagcccatttagctattcggccgcttgcatctttattgctcatgatttccgaggtaggcgcttcacatattactcgaatctggtgtgcatcaaaataatgcttcagcttctttgccgccatatgaacaccgtatgccatcttctggtaatgaggataattctgttttgatgatgaaaacacctcactcataatataccggcctctttaccgacttgccatcttcgtctctccactactatgacggccctgacaactcagtttgttgctgctatatgcaacagcattggttcttgtgccattggcgaggctagtatcagtgccgtagcgatcatcttcttcagctcttagaaggctacctctgcttgttgtgtccacacaaatttgtcagtttttcttcatcagctggtataagggcattgccttttcacccagccgactaacgaaacgactcaatgatgccaatcatccagtgaatttctgcacatctttgaggcatttcggcaacttcattctttcaatggcagcaatcttcacatgatttgtttttatacctcagcttgacactaggaatcagagtagctttcttgccggcacaccgaatgtgcacttggccgggtttaacttcattcggaatcttctcaagtttgcatatgtttctcggatatcatccagcagcgtgatgctttatttggtttttatgacgacatcgtctacatatacctgcacgtttttgccgagttggtcgtgcaagcatttctgcatgcacctttggtaagtagcctctgcatttctcaaaccaaacggcatagtacgatagcaataagccccgaacggggtgataaatgatgtctatatttgatcattagggttcggtgatatctggtgaaaaccagaatacgcatctacaaaagataacaactcacacacggctatgaagtcgatcacttgatcgatccgaggtaacggaaagggatctttagggcatgccttgttcaagctagtgtagtcgatacacatgcgccacactttggcagcagttgggtcatctttcttcttttcgatcatgaccgggttggccaaccagtcatgatgcaacacttccatgataaagccgacagctagaagccgggatatcttttccgatatgattttccttctgtcatcggcgaagcgtcgaaggggctgcttcaccggtcttgcgtttggcctaacatgcaatgagtgctcagccaactccctcagcacacccggcaagtcttggtttgaccatgtgaagatgtcccgattctcacggaggaagttggtgagctcgccttcctatttctcattcaagccggcaccaatgatgacggtgcagtccgggaactcactgtcaaccggtatcttctttgtctccttggccgcctggaaagctacgctgccatgagggtttgtcatagccgacagagcgacctgtgccgactgagccagtgcgacaacttcttgcagcttcctcttctccccggcaatgaccaatgactcggccaaagcagatcctgctgccatgcactccatcgaacgcctgtagttgccggaaatgattatggtaccatttggtcccggcatcttaatcttcaggtagccaatgtgagtagtcaccatgaatttggccaatgccggtctgccgagcagcacatgatacgaactgttgagatccaccacctcaaacaccaagttctctgtccgacagttctccctggtgccgaatacgacatcaacccggatcttgcctaccggagcacaagacactcccgacacaatatcatggaaggtagttcggctaggttcaagcatgttattagtaatgccgagtttgagcatcgtgtctcggtacatgatgtttatgctgctcccattatcaatgagaactcgagtgaacttgacattgatgtcaggcccaataaatgtcgggtcgaccaccagagcataaccatcaggattcggcatgactttaggatgatcagcccggttccaacagagctcctgctccgaccagtacataaatttcggcactgccggcatgacagcattgacctccatctcacgccgacgctggctctgcttgtcagttggctccgtgataaaaatcatgtagctttggtgatgctccttgtactcgtttcttcctccatatttcgggatgccttggtcttctacctgattgacagcattgtttgccggagggggtccttgaatctgagcattggcgcctgtgagtggcggaggagggggcagccgacttgccttacccttctcggcctgctgcatccggctgtattgccaggttgtgtgattcgccagcttgctgggattggtcgtgtggaaacgacaaggctgatcaagcatcatctcgaacgtgtacttctgcttatcttgctatggcttcttttgttctcctttcttggcccactgctgatatccagtcttctgacgctagctagggccggcatcaggttgatcttggatggctgccacatgggctggcccatactggtaatccggcctatcgtcccttcttttgttctggtgatcttgatgatcatttctccggaatgctccggcaggattgtatgtcggctgctctctgtattgctctgccggcatcagcgatggctgagttgggtcacccaaagcatacatgtccgcaatcttcatcgtctcggacaaagtggccggcatttccctctgcagcttctgccacaacatgctgccatgtcggcatccttgggcaaaccatgctatggcctgcgactccactatcccttcacaggagttgcggaggttattccatcttgtcaggtagtctcggtcagtctcgttgtccctttgcttgcacatggagttgctgagggcggttaggcctcttataggtgatggtgaagttgctgacaaaagcttcctcaaaatctatccagcaattgatgctgccctctggcagattattcaaccaaatcctggctggccctaccaacatttggggtacataacgtactgcccatctgcgattgccacctgccacatgcactgcagtgacataatcctccaaccagtcttccggcttcgtactgccgtcatatgttctcgtgcccctaggtagctggaaaccctgggtggtgtctgtctcatgatccggtgagcgaaacaacgcggtctcggaggaccctgctcctccagaagtgccgagagatagattcggtcgagccgatgccgggcatctagcgtcgacacttgccggtttcccactcgggctccgaatgggccgacattgtcacgctctcgcctgagatagccttcatctcccatggccgagtacccgtcattgtaacggtcctacctgcgatcttcacctcgatatagggggttgtgcccggcaccctgccgacctgcagcggtattgggcgccggaccccaaggttggtgtccatgacctgccgagtgacactcttgtggatctcgacgattgtcgccgagatgtaggccactttgacaatcatcaactcgcctgaccatttgctttctagctaatgccggatcataatgatccagccgcttgtctcggccggagttaacactcttatcccgtctgccaccaggtgaagacgcttgcttgtcggcccggtcgccaacacttgcggctgagtgaatgatctgagatgcactgggcttgccgtgcaacctcatctacgcctcgttttgctcattagccgtgcgaagcaactccttcacacgcaactgctgcagtcggagtgcctctccagtgagatttggcaactcttctgctgcagcctcggctgccctgaggttcttaacaggggtgctatatttcggctttagtgccgacgcatagcttgccgacacagcaggcatggctctgccatccctagctatctcggcattcaaatttctgccacggttacgcacttccccaactcggctagggttgtgcactacagtagaattgagaccatgagctttgttatactcggagtgaaatctcgagctcctgccgagcacgagccacgtcgacagcttcctgcagcaggttttggtgttccaactccagctcagcttgcagctaggccgagttagcgtttggagccacaagcaacgtcaacctctcgatggcggcctggagcggacttggctttgccggcgcagcgaatgtgccggcctgagcagcgatgttttccggcttctccattgggggtcacgccgttctgccggatttgctcgggagtccggcgctttctgcagcgcccttgccagcatcgccgccttgagccgtcaccatgacctccacacggctagcggggcactcgacatgccgaccgcgaaccgtgcagatggcagggggatcctcgggtaacaccacctgctcgggatacctgcaaggagtgtcagtggcgacgtagacctcgtgcataccgaagttgataaagcggcctgcgcagggaagtggcgcgttgttgaagcagcctgcattgttgttgatgaagcccagagagccgaatctctggaccaaaccggagacgacgcgctctccggtgatgaggatgcttcccatctgtatgaaaactccagccagcgccgctgctggccccacggtgggggccaactgtcgtggtggtgtcacggcagatgccataggatggctaaagatggggccgatggacgaaggaggatccggaggagggatggcgcagtgtaaaccacgcacggaagtaataatacacggtgatttacccaggttcagagccctctagatgaggtaaagctcctactcctgccttgtttgtattagccgagatacaagaggctacaatagtgctccttgagctgtgtccagaggaggaagaagaagaaggagaactcctaatgtctaagagaagaacccctctcacaggaggggtggagcctctatttataggctaaagatgacacactgacatgtgagccgaaagcaaaccctagctgctcccgggcccgccgggtacgcccatggtcccctccggattgtccgggaggggagaatgctgctttctgctttacgtacggccaggcgacgcgcactgtatccatgccccagccttcgtcttgtgcttctacggcgcgtcactatgcagtcgtccggcacagcgacgtgagcaacgactgcttttctgtcataaagagagcattgctttactttaggccatgcgatcaggataagaccgttggcgtatcccggccctagccgagattagatagtccgtgcttgtcctgcaatcacataagacaagctagagatgccggcacactcttggtatgccggcctgttataaagtcggctcaagaatgccggcgtacttgcttacgtcggtcttgctctcgctaactcggccaatatgtgtcgtcgtgaccctacccggggtcatccccccgacaataaaaacaaaagtctgtacccgtgtggttttgagcatttttgtctttaccgtgtttcctacaagaaagtcaggcccgttagaaattcggaagtcgggattagaaaaaaccgtaggaacgagaaaccagcccgactgaaaacaaaaggcataagaattttcacaaagccctgtttgaaacaaaggagagcaaaacacacaggatttgtataagatgaacaaacttgtttaaattgtacattgtatttgtactaagaagttgccaaatgatgcgcccatccattcatgaaacatgtcgatgaaacatgtcttcttgctgctccattgttgcgtgcatgagttcatggcgttggatgctactcactccatttcataattattgtcttagttttacttcttaactaaaattatggcaagaattatggaacggagagagcaattaagaatccatgcaatcagtaggccgtgactttggtcccacacgaagggaacgggccaggtcgagcttcggcggcaggcagagcaactactccctccgatccatattatttgtctcaaatttgtcgaaatataattgtatctatgtttaaaaagcatctggatatatgtaatattttgacaagtaatgtgagtcggagggagtactatttctctatcaatgtgcctcgggcatatgcgaagaaagatcttgcggtttcaattcctatggaatccatggagcttttcctttgttccactgctcaattgtttcctttgacattaatttggttttcctttgaaccaaatggggcctcggttgttgactctttatgcttttcatgtatatcatccacacttggcaacataataactcatatagtagaatgcgtgactaattcattactcctccgtccacaaatagggtacttttatgttttgtcataagtcaaagatattaaaatttgaccgactatattggaaaacgtagcaacatttatgacactaaattagtatcattagatccattttgaaatgtagtttcataatatgtcgatttgatgtcatatgtgttactagaaaaaattgacttaaaacaaaagctagaaacacacttagtaagactcttatttgtggacggagggagtatgtatgaagagttagcattaaatgtgatgatctacaaagggcaagaagttgactcttagtaagacttttcattggtactcccccgttccaaaatactagatgatgcccgcacgttgttatggaaatttttagttaacataagaagtactccaaattgaaaacatataataaaattgtacattcttcacttaatgagaatagcttcatgcatgcatgtgcaaaagtatgagttttccactaaataggtgtgaacaaattaattatgtgatgatgtgacatgcttgcatgtttagagaaatcatgttgcttatacttagatatagaagattgggcacacgtttttcaaaaaattaaagatttatttcaaagaattttctgatatcacgaataagatttctttcaaagacttcattgtaatgcttaatcataaaagttaatttgtagtttcttggatttatgatccaaaacactatcctagctagtaatggattcgagtttgaataaaattacatgtgactcaagaaaagttacaagggtctataaaatccagatttttggtgaggttttctagtgatttttctaaaattatattaaccggcgtgtacttttatatactatataatataaatagggagtgttcggtagcataaaaagtgaatggttgaaatctttgtttagatcggaaatctcttttggctatcggtgcaataacaccttcttttaaaaaaaaacttacaactattgcttcggagtttggaaaagaatctcctttgtccgtgcctatagattcttgctacacacctgcaaaatctcatgaatttcttttattgtgcctagactacacagaatacaagtattttctagtggatgcactgttcatgaactattcactattctaaattcagattttctttttgtatagcgcacaaatagacatatatattaactgaaattagtaggcacattaaaacattgtctaaatttacctttaaaaaaaacctaatacatttacttccatatacacatgctatgctaccaataggcatcacaccctttcgaaataaaacaccgaggggagctgggaggaacagaaattgaagggacaggggttccagtgcaaaatgtcttagtgacaacaacactgacaaggggtttcggaacgttactgtttatttcttacagggttcttttagcaagtctggcaatccggtccggttgcgataagaaaggagacagagaggtgaccaaaagcaaacctagcttcaaaaaggaaaaaaccctgaagcaagccctaaagcctaaatccaaattgaggagggatggcgagcgtcggcggcggcggcggttcctgtacccgtacaattgatggccgttttggcggcgggacgcgagggacggagagcgccggcgacgggacgcgagggacgaagagggccggcgacgacgggactcgatggacgcagagcgccggcgacgacggcgactcctcggaccagatgggcgccggggagcccctcgcaccctgggggggcagagacaggaatttcatcaatgagattgagctcctcgacgacagcaagcatcgggatggatccatctacacaggctcctctttcctgcacaagctttttcgcctgaattataccgaagagagtagacctacatatctctcatcttccgtttctttccatctcgttgaaattatttacctacctctatgcaatgcagcagtagtacgctagtactccaataccatggttctattcgcatcagagtcctaaaaagtgtcttcttgagtgttgtatcaaagattatgggtgatgtagaagatttaaatagccatcctacattctttaagcacaacgacattcatgttttattggatcatacttctcttgtttatttctagcaacgccatatgcttgttcagtggttgctgcatcttgtcaagataattaggacctacctccaaattactctgtttaatttggtcgtcgtgtaagcctttcagttgctttgtttttctctgtaactcttgtagctactttggccgcttggccttgttctcttcgatcttaattaatgaaaagcagtgctgctgcgttttcgtcaaaaaaaaattaatctgtttaatatacaactgcaagattgcctctagtcgtcaatttattatgtggtggcactaaactattgaatgtgtacgcacttagttttaattgctcttagtatttagcttcttgcccaagttttaggatattaattcgtaaggttgccgctatcatacttcaccttttttttccctttcgtttttcgattgacaggaacactgggtgttaagtaattaaaaataaccacgtctgcacgtcctagtatgatagcttttgcaataacttttcctgggccttgcatagtcctgaaattgacacttaaaacatgcttgtatctctgtacttcctctcttgttttcttttcaattctacaactaagcaattgctggggctaagcaccagctggggtcaatttgccgggacaataagcttttgtttctggggcagttcttttattttttttgtttactgtcatataatgcatgtacaattaatgcccctattttttcagcttatttggagccg

SEQ ID NO: 2087 - DNA, 3904 bp, Brachypodium distachyon
  Intron number 1 from transcript Bradi4g22650.1 (locus Brad i4g22650) derived from phytozome v7.0 (chr-ID Bd4; pos 270 66144 to 27070047)
gaaggtatgcctgccgtacgtacgtacgctgcttagttttccgactctctcgcttccgccaaaactgatttcggctcagctgcatgcatgcagctggcaccaagtacgtgtggcacgtactatagggtgtaccaattatagatggcatgcatgcatgcatgtacctgctgccgctgcagtcggggtgggggtgggggggtgagagagctagctatatataggattaagttttacaaggacaatttataagatgatacgtacgtagccgctacctataactatgcaacaagacacgtatactactccagaaaaaagggagggtaaacaaacctagctagctacctactcggtggaccgccgtgcgtgctgcaagtcctacgtacgacacagccagcacacaggagcgggaatctctaaaaagccaacgggggcccacttggataatgggatctcacagcaggaaatacaaagccggcggccgatagttacatgtttattagtttcactctaaactgaatccggtaaatacttccgtgcgcttggaatcttgtatttttttttacaacgtgctctcgcagttacttcgatcaatttttcttaaaacacaactgccctccaatattttttcgatttccttttccttacatacagagtactccgatccgatccacctgggagggccaacgtctcgcttcttggcctgatcagtggatccctattaagcttcaattccgcttttgttaactatcaactgtcttaaacatttttaaaccttagacacctaaattgcatgctactcaacctagaatttcacattcattgaggttgtaaatttataatatattactccctccggtccggccggaattacttatcgaaatattacatgtatctagacgctttttaaacatagatacatccacatttgggcaaatttgagacaagtaatatggatcggagggagtagttcaactttttgtttttgtactatctctgtttctaactctaagatgatatagctttgtcctaagtcaaacattttcatgtttgatcaagtttacagaaaaatatactaatatctataatatcaaataagtatattattaggatatatatacatgacgcacttaataaaactaattcagaattacagaggttgttgattttttttataaacttgatcaaactttaaaaaacattacaacaaaggtagaacatcttacatttagtaacggagagggagtaggtaatatttcacgatgagaattattggatgttgattgaaaagaatacaaatgtggctaggatagttgaaagttcagacaaacaattccttaaatttcagaccattttacctatttaggtctttggtgttgccacatgcactggccatgaatatgacaataacagcactactggagttccccttgttcctgacggtgcaatttaatagcctacgatgatcgactcaccaaaagtgagggttgcctcgctgatctaccgccctgtttggtacaaaggaatactagagggattttaagattggtttcctatggaatttttcctttatgaatgtttcatgtttggaacgaaggaaacaaaaataacaattccttaggaaagggaaggttttctatgcttttcaaatgaaacaaaacatagcccagacctacggttttaatttctcctattttgatcatttgttctcaaaaccggtaggcttccacttaatttacacaacatcatattactgggttttttctataactgtatttagttttcccgcgttccaaacacagccctggccagtgtttaaaacgccaagctcacagcctctcggcctggccgttgtagtagctgttggagctgcaccttgcagctcctcttcttctctctcaaacttcactctttctctcatgcatggtttcactcgagaacacgccaggacacacacgtacacatacaccaagagagaaatactcttgctttgcaaagagacactcctccttggtgactgaggactacatttttttctctgtccgcaggcccctctttctcattcatttgctcagcttaaatagacagtacaagataactcacacgtaacctcagcaccatgcggccacaccggccactaacgccatgcatgcaacgttcatgcatggacctcatctaactaactgggtcacacgcctgagtttcgatacacatgcttatccaacagtagctagctacgtgcactaacaaaacactatcagcttgcatatgcacacaagatcacttctttttgcactttcaacgaaaaaaaaaagatcacttctttttgtgtatattgccgcagcctagagtgtctagacgcaactactaaataaaacatgatttattcatctaaacgtggtactgataacaagattagttccaacagtagctagagagtttttttgttttgctggattctatcatccgccaacttccccttatgcaccatctccatccgctttaattcccacgacaaacttcttgcacagttctcattggacgttgccttatatgagcggcaggatttagggtgcggtccgaagatgacaacactagtcgaggtacgaagaaaactttgaggatgaagccccagtggctttatttcttcttcatcttttttttcaaatttctgctaattaatttctagtactagttttgcttaataacaacacatatttcgttttaaaaaaagtagctcagatcttgccttcaggttgtccttgtttgtgctacgtacaaacatagccagaggtgcatgcatgcaatagaaagctaattaactaacctgatcggtcaagttatcatgcatggatgattgcataactggttgcctatgtacgcgcatgcatgcatgtaacctcacgaattggaactatctagacattacttagtgtatagatgcattcaaatttaatcaaagttgagacattctttgttgaacggagggagtagtacggattctttgtttgtacttccccgttccggaatataagaaattttaatttttttctaagataaacttcttaaagtctgaacaacttaacgaaaaaataatatagcaatatctacaatataaaataagcacagtatgaaaatacatatcaggacggatttaataaactatttgagtgatagaagttgttagatttttgtataaacttggtaagactttaagatgcttaaacttgtgacagagttagaacatcttacatttaggaacaagtggggtagtatttaatagtgcttttcagagttaatgtggcacattagacatggttaaaaggaggcatttagacaccgaagtaaataaacacatctgtcaaaccacgcgcgttccatcagtttctgactctggctctcttattctcagcttttgctcttctcatccgtgttaagaaccaaataaatcatatggctgtgaaattaataactcattttcatctcaattctctccccgattcccttcgtagctaacttctgatattttctaaagaaagacataggtgacaatgaactgataacgcgtactacttaaggtcaaaatccgatattgaatcggtaggctccaaacaactcaatatcaaatcatagtgcaatcaaaacgtatgtggaactaaaaaaattaatgttttggatgggctgcttatgaagatcgtaattgaagatttcacatcaacaaatgccacaagaatattgcacatttaaactagctagaagataaaaatatagttacgagtacgaagaattacatttggcaatatgtgatcttggaaaaaatcgtatcgacgcaacaacaggcattgcatgtgttaattctgtttccgttgcagtgagaatcaagctatcaaagtgaaaccaagaccat

SEQ ID NO: 2088 - DNA, 1742 bp, Brachypodium distachyon
  Intron number 1 from transcript Bradi4g04810.1 (locus Brad i4g04810) derived from phytozome v7.0 (chr-ID Bd4; pos 392 7020 to 3928761)
ctccgccctcccttgctacgccgccgccgctgcaggtacacagatcgcgcctttagttggcaatggcacatcgttgtcctgattatcggaggtgttccgtgctcgcagctggtaatttagggatgttgatgctgatgaaatgcagatttggctgctttctgctttgggcaatactgcagcttgcagtccttgagatgctttagttagcaatgtcaaaggattgctcttttaaccggtttactgtacacattagagacaatagcattggcaattcatgcagagcaagcgcgaaaaatggatccttagagctgttaattatgatttaggaagcagaaatctgcgatttgtttgtttgaaagagtctgcaactcccttgtgccaccttttgttttgagttcttaagtttgtaacatcagattattacttctaagagctccctcgtgactcttacaacttggttctttgtaggatattgatgaaatcacctattattctgtaaattgagtttgttggttagtgtcaatcctcacgctatccacagacagtcttagttcagaagtagtaacagacagttttatacgtatcccatagtgagggcaagagttatcggtatagaatatgtgtactaagctttaagtcacctaagctcgctagatcaaagaaagctaataatggggtatgaagtagaaactgttccagggaacaagaaaggctgattccaaaagttgaaatttgtgagtggatgtcccaacttccattcagatattatgacatgatgcagatcttatattagcatgtgtatgatgcaacaatgcaaaatacaagtgtcatgtactccctgcttttcataatacacagtgtatggcgattcattactttgttagtatgtggtttattaaatgaaatttacatcactagattcatcataaaaagtacttattgactattgtggttttgtatcatataagtcacatagtaaagaataattgctcatcaaagccttgctcttaacgaaaactaacaccatgtattaagaaaaggagggaggtttgagctatggaacaagtcaaaaaatttaaagccacttcccatatttattctaacttctggatgtgctcagggtaacatttcttgctatatgtaagatattgtaatatacttgccgtatatgcaattgtaaggctctgaggagctatgtatacttttgcagaatgagacagttgatttataaaaataaaataaaataaaaactcagcacatattaatgggtataattgtagggctatttgtgacctttttttcttctcatttgcatattttatgtgcaattgcatgttgtagtattcttgcatgaaatattaattccatgccattttgctcatctatcgtccaaaattttctgaaatgatcaaataagttcccactggctagcatcaagtccttctcactgaatttttccttttgggcaagtttcttatacaaactgttgccatgccagggcatgagaaataaaaattcctagcgcgtctgtcttctatctttaaaaaaaaaatcatcactttaatagcctgatatggtaccagaatattgccttgctgtattttgtcatcttgatcttcacaattaaggtcgtgagtcaagtatttgtttgaggtcctattactattgcattgcatttgtaactgaaatactttgaatgatctgcaggagatccagcaactaagcctaaccttcaccttgcc

SEQ ID NO: 2089 - DNA, 6399 bp, Brachypodium distachyon
  Intron number 4 from transcript Bradi4g05450.3 (locus Brad i4g05450) derived from phytozome v7.0 (chr-ID Bd4; pos 451 3624 to 4520022)
agacatttgagagggtgtacatcccagaagacgaagtcctgaagaagattcaaggttagagtaaagacatgtttttctttgtcaattttactgaatccactcgctcatgctcaccttttcattttcttttcccccagaaatgtgctgcgccaattttgtactgaattcactctctctgatctgatttgtttcagagtctccgccgccgctcaatgtagtactgtcactcggccactctgtgtgggtgaagggagaccacacaaactttgagatcgatccatcgtttggagttgaagccactgagctttaccctgaagtgaagtacactactgtggatgaatacctgaacaggttcctttgaactcctagaaggtcgtataggagggcgcaaatgtttggatgtgttgaataaatattggagggtatgtcttttagtcggaataccgtgtaaattataatgatattaggacgtgtgagatctcaatggtgtgatgaattgttcctgtactcaatggtctgagggaacatggcattgtagcttgatttggtgggaaacagcctagtttattgtaaacaacatggactacgttattataaaaaataataagtttatgaccctgagcttcgtgtgacctctgccttccagtaaaaactaaaacttcaaggatcaccaattcaccatctaacgggacaactgaaacataatgttcactcaattctgtcagtagtctttgttgtttctgaagttgagagaacataaatgggcatatacctatagccgtctgactttaaatattgaagatcggaccaccagacgatggagcgaaaatcatcgtcaaaatatgcactgcggagactccgatactactttctaggactgcaattccccaatccaagctacaattacaaattaattagaagcaattgctaatatatagttgtacgttttactgagccattttgtcatggctatctcgttaattaaagaaaaaaatcttatttacctttataaatgtttgattttgttgaattgccaacaaagatgaacagatctttgcagtaatctatgcccacaagtaaacccaattgaatcatgactacatgctagcggtattcctgatgcctgccatgcctactatgctccgaatgtgatgagaaatgttatgcatgagaatgcgcaagaaacatacgagaacccctggttatatggccatcttgtttctgtatgtatataactctcttgcgcctctatctcctggagagtgcacatgctgaaaataactacaaatctcccctcaccgaagtgcgcaagatattctaaattgatttctccttatgactatctaaaaagagataatgctcatccacctaccaccatacaccatgcatgtgcctagtatcatggacaaggccatgcactattttgctggtggtgcttatcttgacattgccctttgggagaacagttcggactttcgacgactttgaacacatggtgcacatggaggtgaggctggctcactgagtgacgatggtgtagccgtgtagggcggtggggacgtggggtgggaggttgttgcacttgcaccatgtccttgacgcaatgctgggtgagcatctctgcatctctccatctcctccaatcctgattcctgacattaggactctatgctcctccaccatgcgccttgtcttctctctagcgacagatgatggctatttcaccctttctgttgagttcgaggagacagaaatgtgcactttaaacatacaaagaccaaaccgagtgttctcatcgccctgctttccatggcgtgagaatgcatttcactctcaagaataaatattgctctgtttcctctgctatgcactagctcccctgtctttctctagtttcttgtttacatgtttcatcatcaaaccgaacacaacaggaatctccctgcccataccaagactcgtttacattgtgtaattaatcttgccaaaccagctagaccatgggcaagcttgttactctctcttccaatttttctcaccgcaaagtcttgaaaaagggacttcaggtgctttatttcctcgtagatatgccaaattcttccacgatagtacgtcatcattcgatttgatcacgatcacaacagcaccatatctgattccagaatcaccggggcttgcgagatgttgcccgattttctttggacgccctcaatttttatcactcaaggaagcctatacagatctttacgctatcaggaaattaacaacttaactaataacacctaggggcattaatttgcaaggtgactgccatccatgacgggccagggccttgatcgctcgctccacaggctcacatatatatgatgccggtcctccaccttgtgaagaataaacaaagtacagaaccagggcatgtacagttatgtataacctgcgcatgcagtgaatgtcaacggctagtgcaggcgtttcccgaggcgactcgctgggggatctcgctttcgcggccgtccagcggaagtccagtcgccggcgtctgatgcggtattgccggttctcctgtctcgtggttggtactgaacagggcgagagctctcggggctgaggaggtggtccgctctgtgcctctgtgcttgccgccgggcttgatgagaatggggcagcgagggtctgagctcggtgaacgtgtcgaagtttccggtccagccgccgcctatgccgtcgtcttcgccggggtggtttcatcgtccggcctagcttggtgaccaccggttcggaataggtcgtggctccggccgcggagggggcccttgccgcggtgccggcagttgtcggagggtcgcccgtgggaagccccaagatcagttactgccttactggcaatcacgccgccatcttcggatcagacgcctgggctgtttgatccttctttgcagagacccatcgttggctgtgggccagagcgagatgggcccgatcgaggagattcgttcgcgtccccgtttcaggcccagtctttgggagctgtttgcccataaggcctaattcgttacgcccaaccaggtgggtatcgacggtgatgagtgaaattttagttcatacctctttccgctttggtttcagcttcgagagggtatatttaaacgcaagtattggaggcagagttacgtcgcatggtgcctactccaagttaataatgttttcgtggtggttttccctctcgagaggaactttagagggttgtcagtatggaaatcctgtttaaggctcagaaaatctagttagaatatagcgagcggaatcccgaagaggttccgctgctttccagttgcacagaatctggattattgtcaaaggagttcttccattcctgaaacatgtcaagtaccttgatatacccacgtgctacaaatggataaggtacttgttatggatgtactcggaaaccagtgggtccaaaggtgaggaagaaaatgtgtcagcactcacatgcaaaaaggtggagaaaatggaaaaagaaaaccaatttgtgtgttctgacaaaaagcaagagagaagagagaaaaagttgtcaagtggtcacatcggtcacactaaaatagaccaatgtaaaaaaaatgtttcctctcactcatctctaatgtaaggcatactattttcgtccaacagtagtaggcgtattagcttcctgattattctactaatatataattatatgacataaaattgatatcattatatttttattcaagaacttgcttgtggttatgatgttgatcagattaatcacatattaacgaagtaatttgtgatcagaacttggtcaactaaaatctaatatgtccaatattgttgcacggaggaagcagcaagtttattgcatggcacatatctcaatacttcatccaatggctataatagggtaggaatagatactgcatagaataccgcatcggctttaatcaaccaaacatgcccttggtccggttaattacgttctcgccagatgtgtgatatacatgtcttttttttgtttgattgtcggtcccgcggcaaaatttgctccatcaatatatgcaacacctaacgctgaaaaagatcccccaccctttccgttcaattaacatatcattaagtccaccgcgcggcaaacttggttagctatgtatacaaactttattatcaaaaaaatatcgtcaagtcccatcaaaaaatatatatcgttaagtcgacgcaagaaaaaagaaagaagtccaagtttagtgcaaccatgtcgccgctcgaacgaaagagaaagacccttgaattcgacgcaacgcttcccctttctcttttttagcccgcagccagtcgtcgtcagtctccacagtttctgtagtagcatcccttgctgtagatggcggagaagaacaacaacaggagccgggtgctggtgatcggcggcacgggctacattggccgccccatcgtcgccgccagcgcccgcgagggccaccggacctccgtcctcgtccgcgacgccgcgcccgccgacgaagccaaggccgccgtcctccagggcttccgggatgccggcgtcaccctcgtcaaggtcagcactcaacagccgccatattctgttcttagtaccctgttctgtgtgtgcttgttgtgttcctctgtttttcgtttgggaagttggtggtgtcaccttgggtcaaaatgacagcagaaacaatgataagacgtagtgaacttaattatcaatcaacatcactgaaataaaagacatctggtggttctaaatagggatcaaccaatcagataaacagtagattagactttcatttcctgcattgctttccctgtggtcgaacttactgctccattacgtcttttaatggagtgtggcccgcaattttttttcgggccgatgaaaaaaaagaaagataaacagtaatatttggtgattccgacaaagtaaagatcacgagaatttagcctttaccttggatcgtgcacagaaacaaatttgcagcatattgtgctaggattcttcagtgttgactgttgaatccagaaagttgtcagcaattatattaggtgactagtttgtggttaggttctacactacacaatccaatttctctgtaacctacttgttgacaaacttaactcatgttgctactgcgagaaacgaagttatgtttttacacggttcctctgctgtttgacaagtttttcatgacagtttttttctaaaggccgaagaaaaccaacaatctttcaagctaatcaagaaaaacagcaatggcttaatatgtcggtgattgaaggttatgtataactctaaaattactgttgggtcaccagggtgatatttatgatcatgagagcttggtcgcagccatcaaatccgcagatgttgtgatctcagccgtggctcacgcacaacacgcagatcaaacccgcattatcgcggcaatcaaggaagctgggaatgtaaaggtgacctccaaaactaccaatataagttactatgcatgctctttctgtcttactaaattttcgacggagtacgttatattcagtactgatttatggcgcttgtaacacgctgcggatcaaatacatttttttatgtaaagcattagagtgattgctttgattattaagatgtcccctaaaatggtcgacaagaaaagctctgaaaccaaaatgagtaattttgttcaaaacatgttgaatttctggtgtccctgtttttttaccaccgtaatacttgtcgaggtcacatattgatgcgctctgtgcagagattcgtaccgtcagagtttggtaacgatgtggatcatgtaaatgctgttgagcctgcaaaatcactatacgccggcaaagctgttataaggcgtgtcattgaggctgaggggattccctacacatatgtctcttccaacttctttgctggttatttcttgccaaacattggacaggctggtgtgactggtctcccaactgataaagttgtcattctaggtgatggcaatgtaaaaggtaacccaatcaggcttcccaaacaatggttttacatttttgcactgtaaaaagtaatatctattttgatgatgaagtttaaatccatcaatcaagaaatgagtatatgcctgcacatttatgtgtaaattatcgacgataggaatctttgccgtggaggacgatgtgggcacctacactattaaagctgtagatgatccaagaaccctgaacaagaccctgtatctgaggccaccaagcaacactttgtcgcataacgagcttgtctcactctgggagaagaaagttggcaagacattcgagagggtgtacatcccagaagaaaaagtcctgaagaagattcaaggtcagagtaaagacaag

SEQ ID NO: 2090 - DNA, 2493 bp, Brachypodium distachyon
  Intron number 2 from transcript Bradi2g48580.1 (locus Brad i2g48580) derived from phytozome v7.0 (chr-ID Bd2; pos 488 24098 to 48826590)
gcaagtcgcgtgccccaattcaacggtggagctcggtaagtcaaagtggtatttgctctctccgttctctttctaaactaaaaaattcactaacagtgcgcattattctgctatttcgatgcttttttagcggttttactatgctcaatctgtctcgttttcggttagtaagcaatcgattgcttaatcatcggatctaatttgtgttctgaaattcggaagaacccataaaggggtaaagatggcatccagatatatactaatttatcggttcggataactatatttaatcattttacttagaataaggatttgaaagctattactccgtaagatttttttttctctccgccactcccggatagttatattttcggatttgctagtactcagtcgcctgagaaattgatatttcgcagttgacgctctgaaccgtcggatcatacgctgagattcgtgcgggcgtttaaacagaaatgtgaatatacatacaaaataacaacagcacaaattcagaaagagttgactgttcgagtggcaaccacccgtgcgctgtgttgtacttggatgcagcaggcgcctgttggaaccccttgtgtagctttttttttcttcatttcgtttcttttttctttctttcttttttctttcttttgtttttctttctttttctttatgtcttgattcttcttttcattatcccttgtttctatatggattatttttatggaatacacaaaaccatttattggaaatacacaaaaccttttatttttcatgttgtttaaggattttttttatgcctagcccaatgtattagtgttcgtatcacttacacttcttttagtagtaaaattgagtatccacaccataggcaatccgcttgtcaacaatgtgaaataaaattaattttaaaaacttatgttttttgttaaaatatccttctcatttcacccgcaatttttagaatcgggcataaactttctcctgcaattttttagaatcgcgcataaactttcaactgcaatttttagaagcatgcataactttcaactgcaattttagaaccgcacataaagtttcacctgcaatttttaaaattgtacataatattttcacttgctattttttaaaatttgatcattgttatagtttcggcctaagaaaattgcatatgaaattccacgttgcacacaaaaatttcagtgcaattataagactttcacctataatttttttaaaatttctcatgcaattaagataatttgttaaaaaaaattgcgtgcgcacacacggacatacagacacacacacacagacccccccacacacaaggacacacacatacgcacacacaccaacacacaccgacccacacacattgactgagaaacaaagtttctcagtcgacttacacctagacactcccttatatttttgttaagaaaagcctattgaagtgactttttttttccattttgtctatatttggactttccttgacaataatgtgtctaattgttgtacaaaaaacaaaaacagcagagaataggattctaaattctgcacatttccatgggtctcaaaattttacgttttgattttttttgtttgatgcccttgcttgatggtgctcgaagttaaatcttcagcatgagaaatgagatttatttttacgaatcatgcttgattttggaaaattcaaagggatgttagacatgtttcaaactgtttttcgaaagttccaaagtgtagtgggtcacaaaagaattgggatgcatcccaggttgttgagaaaggggaaaaaaaatctttttgttagaacaaaaagtaaaaattaaaaaaagaactccaaaatccatttgtttttgaagtttgtccgtgcatcttaaataaaacgtgcaactcgtgaaaaatttccttgtatattaataaaaaaattatgtcgtacataaaacctttatactcatattgatggaactttatgatgagatggtcatggacttacaaaataatgtttgtgtgtataaaaaatgttcacgagtatggaaagaatttttcatacatttgagaaaagacgtaaccgctcatttggcacccctcatttcatttcatttggtccaaatgaaatgaaatctaatttttggtaggatttcatttggttaaatttgaatttcggattcaaaaatcatgtttgtctaccatatggatttgtagagttagagacaattccagagaaatgatggcttgtagagaggaattgaggttagttgtattgtgattccatgaaattgcaaattgaattcatgtagtcaatttcgtgccaaaacaagttagtttttagaatttaaaatgaatttcacaattctagtttcaaatgatgggcggaggtcatctcacgtcacatggccatgggtgagttggtcatggttttaattatgttgtggtctctagttagcggacgacaaattcgcttctgtgcccagtttctcg

SEQ ID NO: 2091 - DNA, 1552 bp, Brachypodium distachyon
  Intron number 12 from transcript Bradi2g17460.1 (locus Bra di2g17460) derived from phytozome v7.0 (chr-ID Bd2; pos 15 531822 to 15533373)
tagcaccttgctctttttacctctgcagtaccgacgtgcgctagtacagcgacggcccccataaaggaaccgctatcgccaagattgaaatatggtcctgaatcccgatccagatgcatgcggcgggtcaatggtacgtggaaacgatcaattgtttcttttttggaaaattaagcgacttggttgacgctgtcaagaatgaacataatattaaatgtgaaacgagcaccagataaaattcccatggtcgtcgtttcattttgttaaataccacaacttaattagatagtgcgccggcctggtttagctcttttatttgaaagcatgagccataagatattgattgtctctgggcaccaaggtatctgcgttctttttaattgccactgtaaatttacgaactgataaaataaagcaaggtccttgaaaaggatgtttgtattcacaaacagtagccataaatcgccctctccttgacagactgcttgttttgttttggaattaagcatgcaagacgggatctggcaatggtgaattgaagtttgaggcgggcagatcgaatcgcgacatgttgccctattttttattctaattccaagaatatgtgcatcaactcctccacgaattccaaaaaaaatgggaggaaagtagtacgtcttcacgcacgtggataagcccgtgatacatggaccgcagttcgtctgtcccggctgataccgcgcgaccattgcatggcggtgacgatggcgctggacgtctttatgttgccatggaaaacaatggcgctcctctcttcttggtgctgatccagatctcgcctaaagcatgaagaatcgcatcggacgcgagtctacgcgtaggccgaaacggcacggcgttttctgtcgttaggtaggcttcacgacgtcttcgggtcttcggatcggacgcctgagggtaatctggctgacggcctggatagtgggagcagtatgctcgggtgcaaaaaattctgtcaaatcgaaatagttttttctttgcagcagcggaataagctttctgctgtaccatatcggccagcaaactatgccttactagcaatgatgttaaccataatataagaaaaaaaaattgacctgagttctcggttgaatatcagcaaatcaacaaagtttagcaatcaatccaagatacgttttcgctgttcttgtttgctgcaatgctgctgcattctactgcttcgctatcctggacagctgaataattagaagattgctactccctccgtttttaaatacttgtcgtggttttagtgcaatatttaagcactcggtaaaacttcacaaagagagcataccgatttagacttcagaaatataataatgatgtgcccatgctctcggcgggtaactaccaagattattggatggaataactcatggataggtttctcgctctttactgcagttattcttttcatcctcttttctatgatcacccatgtggggattgcaagagaatggaattttcctagtaaatgtttgaaatgattttttgcaaatgggtgcaggtc

SEQ ID NO: 2092 - DNA, 1753 bp, Brachypodium distachyon
  Intron number 6 from transcript Bradi4g33700.1 (locus Brad i4g33700) derived from phytozome v7.0 (chr-ID Bd4; pos 393 92673 to 39394425)
tagactctggactgtaagaaggtattactgcttatgcttgaatttatctgatccctttggatgatgaagtctatcaaatatcttaatttagaaaagcgggaacctatcaaatatgccatttgtttcagttcatctttttcaattgatattcattctccatcaattcaatattcttattatcatttcacgtcaattggtatccttttgtgaatatttattattggcggttgtgacccatcatctttgctagtgctagttgtcacttaatcttccccacaaaaaaaaagtatgtaatcttggtagttggtacaaaaaattgtcttggtgttatcataccctttttcaagaccaagagaatctagtgttgccatattttgtgaatggtcattttgaaataattgatgatatccaaataatggacgatatcccattagttcttctaaattagttaggcaagtgattagataggaatgttaagatatggtctgtctagaaagtagagattagtttcctggatgtcaagttgagtcttccctataaaagggccccctgtaatctctattggtagtcaagaatatatcaatctagttatcccatccacttcatccctgcccttgagttgcggctaccttcatggagttgccgcgcctcttggttccagggtcaccacatacaatccctggagtcattatctcccatgtcatgaatctagttcatgaaagtttctttatccgtgaactgtgcacatattaattttttaatatgctgtcgatgtgtatcaatttacatttttcatcttccttgacagttgtcatccatcattagatcatccccagcaatttgttacctagcccatttctaagaggagtgagaatattttagcgcatcattagaagctcataactagtaagagagaaaaagctagagattcatgtgagaggttggatcccacaaagtgttctaggccctgtttggttaggcttaaagtgtggcttttgacttataagccaaaatgcacctatttaggtgtttttggctttggctttttgcttatgctaacaatatcaagtcaaaagccaaaatccaaagccaaacagggccttatagtaactaggggtctttccaaaaagcatttgattgccacttatgccttggtcaatagcccaagcagtttcatgcaggagtaaacattgtttccactttacttcctctctcctctccacattgtaaaaaaaaagcttacgttggcatgctcttagtaacagctgacgtgctgttgtctttgctacagttgcagcgttagtcgtcatgtaatcttccccacagcaaaaactgtacttaatcttacttagcacaaagttgatatatgggtaccctttttgagatcacgaaaatctataattctgttattctgtcaaatggacattaaaatagttgattcagtgaagtctgagatggtatctcctgatattctgtacatattagtttcatccctgttggaattacacaacccgaactcaggaactgcacatgtaccttcttttctcccttcacttttttagtaagcacattttacttctttgatgaagatacctttgcatactgttccttctaatggtcaaatgatgtaacagtcagttacctccattcacctttttcctgcaacagagtgcaacacttcctatttgcaactcctttattgactgccattctcttgccatttcagatctggaagaaacgaaattggttgctg

SEQ ID NO: 2093 - DNA, 1691 bp, Brachypodium distachyon
  Intron number 2 from transcript Bradi4g02520.1 (locus Brad i4g02520) derived from phytozome v7.0 (chr-ID Bd4; pos 173 5623 to 1737313 reverse strand)
ctaatcgtcgatacctttgtgccatcactcgcgaggtatgctatgctatacgtatgcttatatacttttcaaagtacacatatacttcatgtgttccaaattgtaaaatggtctagttttgttttttaagttcaaatttcaaaacatttaacaagtttatagaaaaatctatcaacatcttcaactctaaattagttttattaaatccatcatcataatatatatagaatatattatatcatatgttagaatattcaacatgagagtaactacacccgggaataccttggagagagagtgggacgcggggtagccgggtaggagaggactctttagagtcttaagagggtagggtttcgtccgccgggtgcggtccgggcagatgagcgcggaagagagatagcgctttgaatgtgcgcaacttttactgaaacattggtctgtgtttcataagaaaaaaactaaaagattgttagtacgaattaaggtagcacgtcaagtaaaatagaaagaattacagtccatatatcttcacatggctccgtttgatagctgagtttttcctaagcatttgcaagaatactgtggtttttagatttactttagttttatctacggtggccggcgtttggctacctaaaaaaagggaaaaattggccacaacatacccttattttttgcctttgccgaaacaccgtcggattgtgtctttgttggtaccattacaattttgtgatcatttggcacaacataccgcctagcatgaaacggaaagtttgattttttttccttctctggattacgtgttttgcttgggaggatgatggctttgaacaattttttcctctaattgaaattttggccccaaaagacagtacataagtgtaaactttggacatttgtagttaaaaaataggcgacttcttgatagcaacaccctttttttaagccctggacttctcgctcgctaattcaacccacggccgctgccgtatcttctgcatcggcggttaatctgacactctcctctcccccttcaccctcgctctctctttctctgtctcccccacccatgcattgacgcgcctggactccgcatcgccacttgtggcatccacgccaagctaggccggtggtcgcctcggcactgcttgattaggacgcgtgcagcggcgatgcgggtcagacgtgctggtgatgagcgaggagcatgcaaatgcagaggacggacgcaccggtctgctgggccagaaagagggggtttctcgggtggaggaagaagagtctgggcttttttttttccttttcgtttttgtaatgcaatttgatatcacacatgcaggtccaaaatattttggatactccaaattactcaagtacaatattttgtatctaaaagctaagatactgtagtttgcaatactttggtttttttttataccaaataaactagctagctagccagtctcgtcgttgccgcttctctcgccggtgatcgatgctatggattgtcagcctcggcaacggcagcgtctacgatagtctcgagtcactctgtttcaaaataaaacattttctaatccattactggaaacatatatagtcatttgggttagtggacttaatttggtgatcaatatatttacttattcgcaggtttgtgggcatcgcatcggcatcaccggtggatt

SEQ ID NO: 2094 - DNA, 6321 bp, Brachypodium distachyon
  Intron number 7 from transcript Bradi4g08190.1 (locus Brad i4g08190) derived from phytozome v7.0 (chr-ID Bd4; pos 716 8226 to 7174546 reverse strand)
attccaagggtttattgtcggctccacttgcgaaggtttgtaagaatatatgttgctattcccttgctgtttctatttagcctggatcttttttatcgttttgaaacgtgcagctttgtgacaaaagattcagaaatagaccatgagttcaagtcgatacaacagatttgatttgttgttttatttttaattaatacaaaactaattgagtgatgacaggtgattcagttataaaatttgaacacacatgtatgtatttgccaacttgtatagtgtaggtgggagattgtgatcttgataaattaaaggagtatggggcaatctcctctatcagcaagttaggcattactctgtcactgtctttgatccatctcattctgagaactcttctttatttcccatgccatcatttgttcatccaatagatctttgttgtgcttggcactccatccgattatttttataaagcgcagtttagcttggcatggtctgtaaattgagctttgacatttcttgtatcatattgttcaagagttaaatgtaccacaaactaactttttgactcacttgccaaggtagtacttattctaggaaagtttatatttgagtgctaaaagtacaatgagtcatcagagtctcttctcagttcctgtcctctccaccaattggcgaattcgtttgtggctgcacagccatcccggcgcggttcgtttactactcgtgagcgctcgttggacttgttaacggtaaaaaaagagtagcctgcaccgcttggttcgtttactgcttgcaagttcttgttaaactcgctaacagagtaaaaataaaagcagcacattaccaaataaattgcaagcaaaatgggcagaaatgattaaggattacaagcaacagccatagctagtgcctagtggaagcaatgaagcatagagcagccataactactacaggcttacagtacaatatgtcagtatgcaggcaacatagaggcactgataacacactaacaattaacgaagtaacatgcattgagccattgaagcataggactattggaggagcctgcagccatagcttaatagctactgctaccaactcaggttcaatcttctgacaactaagcatgttcaacacttcaagaagttaaaccaagcataaacacataatcaatactacagtactccagtcatagcataaagtaaaggttcaacaagcagaagccttaagtctagtagtagtgccagtcttcagtgtccagtctccagtcaactgtgccatgataacagcagcaaaaaaagaagcataacatcgtcgtcgctatcatcttcctgccaaaagtaatgccattttagtttgcacaaaagataagattgtactccctccgtcctgaaataagtgacgtggttttgtatagattcttatacaaatccacgtcagttattttaggacggagggagtactagtgtaatagaagagactagcagctagtaaacttacttctattaatgtaggctttatgatgttaacctttgaacctttaatgaagcttgaagcacaaactagttcctcaaccatattagggcgaagttagttgcggtagtcatctagaactctacctcttgtagggaatgtggactctgaagatacacttgttactggtatagtcaatgtttgttttgccattttttaacaataggaaacctatgagcattcaatctccaccaatgaagacctcaacaattttgtatcctcaatgggatgatttttatcctccggatagcttgtcaattcagacttgctcgggtttgcattcctctctgccacgaatgacttcaaaccactaaacaatgtaggcatggtagtcgacctactagaacttgcacttagtctagactgtctctgctcattgctctcaccattcttatcttgctgttgcatctcatagttggcaaacagatcaaagaattcatttttttgtgtcctctgtctcacacaagtctttctcctctccatacagctccttaaaacactactcaatgagcctcaacttaaatcgaggatcaagaatacaggcaatcaccatgacattgttcttctttttctttttgatcccagtaagtcagtggctacctcagcaaattaagtcaagatgggttgaatagtgcgaaacagactccaatctttattagtaggcttccatagataattaggatccactaaagcatactcattcaaagctgcgctgtactgtgtaagagcatccggctttctgttagtacacctccatcttgttgctatctacgcatgacccttttccaattgggatattcagaaacttgcaaatacccatgaatttacgcatgcgtgatggtgattttttcaaatatttcacagtctctctaagtttgccaatgaaaggttcatgtgatgcaataccatctttgactattaaatcgattgcatgtgcacaacaacgaacatgaaagtactcaggtataaaattacatgaattcctagcagcaaacttgcccaccaaattaacatcatttgaggaagcattatccatggtcattgtgattaccttatcctctatcttccattctaggcagcagtcaaaaacaacttgagatatcacgatggccaagtgtggtggatctaacccaacgaaattaagaacacgggtttgcatacaccaatcatcatctatgaaatgaggaaccacaactaggtaagcacaaattgtggttggaactgtatagatcacatgtcgaacttgtggttgcaataaacctaagttgcttcttgagtctttttgaaaaagaaaaccttcatgctttcagcccgaatggtctttctaccaataaaatatctactcataatttcaaaccaaaatttgtgctacctagttgtggttcctcatttcatagatgatgattggtgtatgcaaacttgtgttcttagtttcgatgggttagatccaccacattcaagcatcgtgatatctcaagttgtctttgagtgctgcctagaatggaacatagaggataaggcaatcacaatgaccatggataatgcttactcaaatgatgatgttaatttggtgggcaagtttgcttctaagaactcacataatttcatacctaagtactttcatgttcgttgttgtgcacatataatcaattctaatagtcaatgattgtattgtaccactgaaacctttcattgcaaaaacatagggagactgtgaactatttgataacgtcaccatcacgcatgcttaaattcatgggtatctgcaagtctcacaatatcccaattggaaaagggttatgcctaggcgtagcaacaagatggagttctactaacagaattctagatgctcgcatacagggcagcttcgaatgagtatgctctagtggatcctaactatctatggaagcctactaatcaagattttgtgctttatttcacattatttagcccatattgacttcaggtgctgaggtaaccactgtcttacgagtatcaaattaccatactaccaacatctttcatccatacatcttagatgttaagattgttgtgaacacatatgttgttcgaaggcaatgcttgataaatttgattatcgggacatcagttctggtgaagaacagctatatgataatcggagagacaaaagaaagaagaacattgtcatggcctcggtttaagttgaggcttgtgtagtgttgtttcaaagagttttatggagaggtgtaaggcttgcgtgagctagagtacataaaaaatgaatgatttgatctatttgccaattgattggccaggagaaagaaaaatgaaccttcaatgagatgcaacatcgagataagaatggtgagagcaatgagcagagacggtctagaaaaagtgcaaattctagtgggtcaactaccaagtctacactgtctagtggttttaagtcattcttggccgagacaaaggcaaacccaagtaagtctgaaatgacaagccatcttgagaataaaaatcatcccattgaggatgcaaatttcagagttgttgattggtagaggctgaatgctcataagtttcttatgttgaaaaaatggaaaaaaaaatcagaatataccagtaacaagcgcatcttcagattccacattctctacatgaggtagaattctagatgactaccctcacttcgccctagtatggttgaggcacttgtttatggttcaaacttcattaaagattcaaaggttaatgtcatgaagcctacaataattcaagtttacttgctgttagtctcctctattacacctgtacagtttttttttctttcttttgtgcattactagaacacattactttttgctggaagatgatagtgacaatgatgtggagctcataccatttcttgagtcttcggtggagagcaactaatgcacttgttatgcttgctgctgttatcatggcacaattgagtggagatgaagtactactagtagacttgaggctgcttcttcttgaacctttgtttatgctatgactgaagtactttttaagtggttatgcttggttgaacatgcttggttgttggttgattgaacctgagttagtagcagtagctattaagctatggctgctcgtatagtcctatgcttcaatggctcaagtagtgtgctgcatactaaaatatttgtactgtaagtctgtgatggttattaatttatgagtaaaaatacattggaagtcctaattctattttaaaggtgtcaagttagtccctaaactttgaaaatgcatgtttgggtcctaatccttttttaaatgttcatcacatgtcctaagtgtgtatctccgtgtttgactgggtgacgtggcggtttgaccaacgccacgtatgcccaggcccacctatcgggtaccacttgcaatcgtatacttgcaagatacccactacttctctgttcttcctcacacaccctccctctgtctgctctgctctccttcaaccctagccggcggtagcaatttgggtggaccggtggcctcaacggcgattaagggagagaagaaaactgcagcgacagtggtggccagagcagcagctcatcctgcaatggagatccctccatttcataccgtaatgtggttgctgtgtgcccaggagccgcctcacgggtccatctcacaggagtggcccgcgggtccgctgcccaacactcccgccggaggagcccgcatctatcgccgcttcgccgttgcgtcggcttcacctgtgaggtgggagagggaggggccgcgaaatggaaagatgaaacatgctgggggtttctgaaagatgacaatcgacgtggtaaactgacaagtgggcccagacctacgtggaattggtcaaacgaccacgtcacctggtcatgcgggcacataaaccactatgacctgtgatgaacaacttcaaaaaagattaggatccaaacgtgcatttcaaagtttaggggctaacttggcacctttaaaatagaattaggacatccagtgtattttactcttactttatggatgcttcattgcttccactaggcattagctatggctggttcttgtaatacttaatacttaatcatttctgttgttcttcactagcgtgatccttgatcatttctgccaattttgcttgcaatttttttttggtgatgtgctgctagcatgctgctctattttttactgttaacgagtgctcgtgagcagtaaccaaccaagctggacatgctgctcttcttttattgttaacgagttcaacaagcagtcgacgagcacttgtgagcagtaaacgaattgagcctaccgagccgagatcttaagattcgagctttaatgaactgagtcgagtcgagcatgctcgttagccagccctaactatgtgtggtaagcaggactactcgcgtgccctctcaggtctgccggggccatcacccacaatagtttgggtcacaccgaatctggcttgctcagtgggagggatgaggtgtgtggtccctcatgcctcggtggcatctttggcaattgttcgacaatttgtagacattgttgatccaccttctttttgaaagcaacggttgggtctttctatcaatgcattgagacacaaactctgttttcttgaaaaaataaatctattgatacaaattttgtaccacgaaacctatagattgatggagaaattgctggtcaaatataaaaagtttagtcttaaattttacgggtgccctataaaaatcaaaggggtctctgcttttttacaggttttattacaag

SEQ ID NO: 2095 - DNA, 7157 bp, Brachypodium distachyon
  Intron number 1 from transcript Bradi4g05450.4 (locus Brad i4g05450) derived from phytozome v7.0 (chr-ID Bd4; pos 451 1832 to 4518988)
ccggcgtcaccctcgtcaaggtcagcgctcagcagccgccgccgtattctcttctactagtactctgttctgagagtacttattgtattcctctgttctttgttctggtcaaaatgacagcggaaacaatgataagaaattcgctggactggttcatcacctattttgcattagttctgattccttttctcttcttcccatgtgcgctgcactactaacagaagacagggtgagctcatcaatcaacatcactgaaatcaaagaaatgttgtggttatcaaaaagaatttgggaaattagcttggactaaccaatgagataacaagtaaaattaggtgattccaataagtaaagaaagtagattcccgttcaactattagcttggatcatgtacagaaacaaattcgcagcatgtctgctaggattcttcagtgttgaatccccaaagttgtcagcaattatattatatgaccggtttgtggttaggttctacactacagaattcaacttctttgtaatcagctagttgacaaactttcctgatgttgctactgctagaaacaaagttatgtttcattacacggttcctctgctttttgacaagtttttcatgacagtctttttgaaaaggccgaagaaaaccaataatctttcacacaaatcaagaagaaacaacaatggcttaatctgtcggtaattataaggttatgtataactgtcggtaattagaaggttatgtataactgtatctgtaacattactgttggaataccagggtgatatttatgatcatgagagcttggtggcagccatcaaatccgcagatgttgtgatctcagccgtgggttacgcgcagctacaagatcaaacccgcattatctccgcaatcaaggaagctgggaatgtaaaggtaacctccaaaactaccagtatcagttactatgcgtgctctttctgtcttactaaattttgtacgttattgagtattcagtactgatttatggcgcttgtaacacgcttggatcaaatacatttttgttacgtaaaacattagagtgattgccctgagtattaagatgatccataacatggtcgacaagaaaagctctgaagtcaaaagtagttcttttgttcaaagcatgttgaaaatgcttctctttgtataaataaataaataaatagagttggatttctggtgtccatatttctttttccactgtaatacttgttgaggtcacatattgatgagctctgtcctctttgcagagattcgtaccttctgagtttggtaatgatgtggatcatgtaaatgctgttgagcctgcaaaatcactatttgccggcaaagctggtataaggcgtgccatcgaggctgaggggattccctacacctatgtctcttccaacttctttgctggttatttcttgccaaacattggacagtctggggtcactggtctcccaactgataaagttcaaattctaggcgatgggaatgtaaaaggtaaatccaattaggctacccaaagtatggtttttcatttttactatataaaaatgtatctatattatgatgatgacatttgaatcaatgaaatgagattatgtctgcacatttatgtgtgtaaattcccgacaacaggaatctttgctgtggaagacgacgtgggcacctacactattaaagctgtagatgatccaagaaccctgaacaagaccctgtatctgaggccaccaagcaacactttgtctcataacgagcttgtctcactctgggagaagaaagttggtaagacatttgagagggtgtacatcccagaagacgaagtcctgaagaagattcaaggttagagtaaagacatgtttttctttgtcaattttactgaatccactcgctcatgctcaccttttcattttcttttcccccagaaatgtgctgcgccaattttgtactgaattcactctctctgatctgatttgtttcagagtctccgccgccgctcaatgtagtactgtcactcggccactctgtgtgggtgaagggagaccacacaaactttgagatcgatccatcgtttggagttgaagccactgagctttaccctgaagtgaagtacactactgtggatgaatacctgaacaggttcctttgaactcctagaaggtcgtataggagggcgcaaatgtttggatgtgttgaataaatattggagggtatgtcttttagtcggaataccgtgtaaattataatgatattaggacgtgtgagatctcaatggtgtgatgaattgttcctgtactcaatggtctgagggaacatggcattgtagcttgatttggtgggaaacagcctagtttattgtaaacaacatggactacgttattataaaaaataataagtttatgaccctgagcttcgtgtgacctctgccttccagtaaaaactaaaacttcaaggatcaccaattcaccatctaacgggacaactgaaacataatgttcactcaattctgtcagtagtctttgttgtttctgaagttgagagaacataaatgggcatatacctatagccgtctgactttaaatattgaagatcggaccaccagacgatggagcgaaaatcatcgtcaaaatatgcactgcggagactccgatactactttctaggactgcaattccccaatccaagctacaattacaaattaattagaagcaattgctaatatatagttgtacgttttactgagccattttgtcatggctatctcgttaattaaagaaaaaaatcttatttacctttataaatgtttgattttgttgaattgccaacaaagatgaacagatctttgcagtaatctatgcccacaagtaaacccaattgaatcatgactacatgctagcggtattcctgatgcctgccatgcctactatgctccgaatgtgatgagaaatgttatgcatgagaatgcgcaagaaacatacgagaacccctggttatatggccatcttgtttctgtatgtatataactctcttgcgcctctatctcctggagagtgcacatgctgaaaataactacaaatctcccctcaccgaagtgcgcaagatattctaaattgatttctccttatgactatctaaaaagagataatgctcatccacctaccaccatacaccatgcatgtgcctagtatcatggacaaggccatgcactattttgctggtggtgcttatcttgacattgccctttgggagaacagttcggactttcgacgactttgaacacatggtgcacatggaggtgaggctggctcactgagtgacgatggtgtagccgtgtagggcggtggggacgtggggtgggaggttgttgcacttgcaccatgtccttgacgcaatgctgggtgagcatctctgcatctctccatctcctccaatcctgattcctgacattaggactctatgctcctccaccatgcgccttgtcttctctctagcgacagatgatggctatttcaccctttctgttgagttcgaggagacagaaatgtgcactttaaacatacaaagaccaaaccgagtgttctcatcgccctgctttccatggcgtgagaatgcatttcactctcaagaataaatattgctctgtttcctctgctatgcactagctcccctgtctttctctagtttcttgtttacatgtttcatcatcaaaccgaacacaacaggaatctccctgcccataccaagactcgtttacattgtgtaattaatcttgccaaaccagctagaccatgggcaagcttgttactctctcttccaatttttctcaccgcaaagtcttgaaaaagggacttcaggtgctttatttcctcgtagatatgccaaattcttccacgatagtacgtcatcattcgatttgatcacgatcacaacagcaccatatctgattccagaatcaccggggcttgcgagatgttgcccgattttctttggacgccctcaatttttatcactcaaggaagcctatacagatctttacgctatcaggaaattaacaacttaactaataacacctaggggcattaatttgcaaggtgactgccatccatgacgggccagggccttgatcgctcgctccacaggctcacatatatatgatgccggtcctccaccttgtgaagaataaacaaagtacagaaccagggcatgtacagttatgtataacctgcgcatgcagtgaatgtcaacggctagtgcaggcgtttcccgaggcgactcgctgggggatctcgctttcgcggccgtccagcggaagtccagtcgccggcgtctgatgcggtattgccggttctcctgtctcgtggttggtactgaacagggcgagagctctcggggctgaggaggtggtccgctctgtgcctctgtgcttgccgccgggcttgatgagaatggggcagcgagggtctgagctcggtgaacgtgtcgaagtttccggtccagccgccgcctatgccgtcgtcttcgccggggtggtttcatcgtccggcctagcttggtgaccaccggttcggaataggtcgtggctccggccgcggagggggcccttgccgcggtgccggcagttgtcggagggtcgcccgtgggaagccccaagatcagttactgccttactggcaatcacgccgccatcttcggatcagacgcctgggctgtttgatccttctttgcagagacccatcgttggctgtgggccagagcgagatgggcccgatcgaggagattcgttcgcgtccccgtttcaggcccagtctttgggagctgtttgcccataaggcctaattcgttacgcccaaccaggtgggtatcgacggtgatgagtgaaattttagttcatacctctttccgctttggtttcagcttcgagagggtatatttaaacgcaagtattggaggcagagttacgtcgcatggtgcctactccaagttaataatgttttcgtggtggttttccctctcgagaggaactttagagggttgtcagtatggaaatcctgtttaaggctcagaaaatctagttagaatatagcgagcggaatcccgaagaggttccgctgctttccagttgcacagaatctggattattgtcaaaggagttcttccattcctgaaacatgtcaagtaccttgatatacccacgtgctacaaatggataaggtacttgttatggatgtactcggaaaccagtgggtccaaaggtgaggaagaaaatgtgtcagcactcacatgcaaaaaggtggagaaaatggaaaaagaaaaccaatttgtgtgttctgacaaaaagcaagagagaagagagaaaaagttgtcaagtggtcacatcggtcacactaaaatagaccaatgtaaaaaaaatgtttcctctcactcatctctaatgtaaggcatactattttcgtccaacagtagtaggcgtattagcttcctgattattctactaatatataattatatgacataaaattgatatcattatatttttattcaagaacttgcttgtggttatgatgttgatcagattaatcacatattaacgaagtaatttgtgatcagaacttggtcaactaaaatctaatatgtccaatattgttgcacggaggaagcagcaagtttattgcatggcacatatctcaatacttcatccaatggctataatagggtaggaatagatactgcatagaataccgcatcggctttaatcaaccaaacatgcccttggtccggttaattacgttctcgccagatgtgtgatatacatgtcttttttttgtttgattgtcggtcccgcggcaaaatttgctccatcaatatatgcaacacctaacgctgaaaaagatcccccaccctttccgttcaattaacatatcattaagtccaccgcgcggcaaacttggttagctatgtatacaaactttattatcaaaaaaatatcgtcaagtcccatcaaaaaatatatatcgttaagtcgacgcaagaaaaaagaaagaagtccaagtttagtgcaaccatgtcgccgctcgaacgaaagagaaagacccttgaattcgacgcaacgcttcccctttctcttttttagcccgcagccagtcgtcgtcagtctccacagtttctgtagtagcatcccttgctgtagatggcggagaagaacaacaacaggagccgggtgctggtgatcggcggcacgggctacattggccgccccatcgtcgccgccagcgcccgcgagggccaccggacctccgtcctcgtccgcgacgccgcgcccgccgacgaagccaaggccgccgtcctccagggcttccgggatgccggcgtcaccctcgtcaaggtcagcactcaacagccgccatattctgttcttagtaccctgttctgtgtgtgcttgttgtgttcctctgtttttcgtttgggaagttggtggtgtcaccttgggtcaaaatgacagcagaaacaatgataagacgtagtgaacttaattatcaatcaacatcactgaaataaaagacatctggtggttctaaatagggatcaaccaatcagataaacagtagattagactttcatttcctgcattgctttccctgtggtcgaacttactgctccattacgtcttttaatggagtgtggcccgcaattttttttcgggccgatgaaaaaaaagaaagataaacagtaatatttggtgattccgacaaagtaaagatcacgagaatttagcctttaccttggatcgtgcacagaaacaaatttgcagcatattgtgctaggattcttcagtgttgactgttgaatccagaaagttgtcagcaattatattaggtgactagtttgtggttaggttctacactacacaatccaatttctctgtaacctacttgttgacaaacttaactcatgttgctactgcgagaaacgaagttatgtttttacacggttcctctgctgtttgacaagtttttcatgacagtttttttctaaaggccgaagaaaaccaacaatctttcaagctaatcaagaaaaacagcaatggcttaatatgtcggtgattgaaggttatgtataactctaaaattactgttgggtcaccagggtgatattt

SEQ ID NO: 2096 - DNA, 1101 bp, Brachypodium distachyon
  Intron number 1 from transcript Bradi1g53200.1 (locus Brad i1g53200) derived from phytozome v7.0 (chr-ID Bd1; pos 515 63745 to 51564845 reverse strand)
ccaagggcacaggtatgtgaataccatcattagtgtctgtccttgttatactacttgagttcttgacaaccctttcaagtgacaagtgttctgctcgttccgatattttcaaatagactctgctcagtcaagcagttcatgggaaagatgaacctgacagatactttttagcttatggttcacgccgttgagtaactcagtgcatcgtcagtcaacatgaagccgaatacatctgatctctgccaaattcttcttgaccatctttgattccaaggatgctaaaattgtagaaatagaagaaaacaaatataggaatgcaatctcatgccatcttgtatcatatagaatggaataccacacgagtttccgccaaaaattgtttgattataccttgacaaaagaaagaaatctactctctttgtcaagcgaatgtagtgcaaataaattcttaggatttttaatatgcaatccgatgatttagactatttcttgaagattccactgaatcgttctaggtggccgcaaattttaatactcacatagaacatagaaacgtgactaaattcttagtagaaaacaaagaaatttatgtggagttacatttaaactagaataaaaaaagttccattatgcagaatggttaattatcggtcacgtatcagagctgttgattaagattaacgtgtcatccttactcttccatctgtcacatgctgtcattagattaagatccaacgatcaagtacgtcaaccaatctctaactaaatgacagaaaccgataagaaaaatatgaaaaggaagcatgaagtacaaagtacaaactacgaagcagatctgactcagagcccttccaaagaacgtatgctctgtcatgtgcgcataatccggtattatttattccctgcatctcagggcggatcaaaaccacacgttaagaatctcttagtacttatattcctgaaagcgatcagacaccaataatttagaatggcatcattgtgtagcctgattgatcaagaacagaaaataaactgtattaacctggcatggcatttcgtggtgcaggcgccggcgccgccgacagcagtggtgtcactgtc

SEQ ID NO: 2097 - DNA, 2898 bp, Brachypodium distachyon
  Intron number 3 from transcript Bradi5g04640.1 (locus Brad i5g04640) derived from phytozome v7.0 (chr-ID Bd5; pos 581 9151 to 5822048)
tctgcggccaccgtgtacagcttctcttgtgagtgactcactccacggctaattaattatccttgtttcctttattatagcttgacttgttttatcgaaatgttcaagctagagctagttggatgattcagtggcatgggtgcattttaatttgttgagccaatgtacaagcgagttagtgatgtcatgggtgcattttaatttgtcacggtcgtctgtgctctacaactgctagctctttttgaacatgtgccacagtaccagttcactgaaatattacagcaattttttgtccgaggagtaattacatttgaagacaaggatgttaatcaaaattctaggaaatgtgactgaaacttccaaagcattaagacaactttcaaataggaaatcccagcgcgaaaaatgcaacatgcagggatggatgcagagggtggcccatgctgaaatttccctacaccatactctctccattttatagtatcttggtttgacacttatatattgataatttttactataaatttgatcaaatttaggaagtttgactgtcaagaaaaattacatgccctacattttggaacgtttatagtaaaaaaataaataaaaaacaaaccgaacctagaccaaagttcatatgaacattattctctattggtccaaacttttggatccggtgggtcggcatggtgcctggttggatggtattcaaacatacaaggacaaatcacgtaatatgagaaattaaagactataatgataaattgatcctagcttgagctcccaatcacaccccctgtgtttgttcctcgtcactaaattgactcttatttgcacctctaatcgatgatacacactgcggtctaatgggtaattaatttactcgagattaaaactcatagacttcagtgcatttctcagaagaatttttctttggttctctcaattctctaatttgtagttgtatttttgaactaagggagtataaatatctaaatgaacgtgtattcatatttttttggacaaaataaaataaaatgaaatatggacttttgatttgagcatggaatgtcaaaacatccgtactcctatgaaatagtgaaaaataattacgcttcctttaaaatgaaaagtaattatgcttcctttaaaatcgaggtaaatacagcttttcacctgacagcgctccataataaaggaattgaacaagccatggatagcagaatgaatcacgcaacagttaaagcatctacctcgggagaccggagttacgtcaaatggtaactgacctggtctgcaaaacagcatctcagtcagaattttacgtgttcaggccgggtagtacaaaccacacagacaaacaaacagaaggctcagatcctaggaatcgggatctaatctctctgtaaacctgtcctcgttctagctagaatccaaggatacggaacaaaatcacagatcagccgggaggctctagatcgaaaccacgcagaaatgggcaacgggtaagaggcaccgaggaagacggccgtggcaaggtgtcaaattaacccgcgagctgagcgtagcgtagcgtagggccgccgatggaggggtggtgggggacgagattctctcgtgtgcgcatgcgcgtgcgcggacagaagttggggcaagacggggaggtggagacgagggcgcgcagcgagcggcctgggcagatggggaaatgcagaaggaaaaaaattgtatgcgcgccagctgcggttccagaggattcgtggccgcgcgcactggaccatcaatcgatggtccggttcgttccattcgttgcctagcccgaaggtaactggtggattgataggcctagctttttggctgctataggatctaatgatcgatcagaatgagcaaactgcgtgcacgcatcctcgtgttctgattggtaattggtatggaccatcagccatatataagccaacaaataaactagccaatgcagttctagctaggttagttcagttattaattcgctggaccaagaacaacaacaaaaatccttatttctaaggtgacaatctatgttatttatgttttattataatattatagactattttatgttagcagagaaatccttatttctaaggtgacaatctatgttatttatgttttagtgagtattcaataaatggcattatataaattatgtgcaacttttgttttacaaatatttaatttagttccacagaatttttccttggaactatatatgtcatggtatgcaagatgcaacttggtccataaagtagatgacaattttcaaagtttcgggccctagacacccaaaattacattcagggacatctggtgccatttgctcatttccacataatatcaacaggtttgctattctgaatcatttgagaattgctacttttatgctaagatttaagaaaactacaaggtctctcaagttgaataagtatgaaaacaaaaactaatgtaagaacaaatgctactattcaccttaaacatattttaattgtaaaatgcatttggactaggcatttgttacaaactgacgtatttgaataaattctggttaccatgttgcattgcataatttgttttagaaaagtattcgctccttttctatttcaacccattttgaggtcgttttaagtctattaatgcttctaggatttttttttaaaatgtttacttttgctgccagcggtgaaatttctgtcctgcatcaaaggaagcctggagttttacgagtagtatattctaaatagcagttctttcttctggaggaatttattatggtacaattatctgctctgataacatcttattgtatggttgattgattatctaggctgggtgagaatcgaagggccagcaactgcccat

SEQ ID NO: 2098 - DNA, 1252 bp, Brachypodium distachyon
  Intron number 1 from transcript Bradi3g02120.1 (locus Brad i3g02120) derived from phytozome v7.0 (chr-ID Bd3; pos 125 0220 to 1251471)
ggccaaagagttcggctccttcgaggacaagagtaagctccattctttcgctcattagtatatccatgtgtttgcatcaattgatggtttagtctatattgttcatgctcctactatgcctaggttaattgaattaaaattgattattctattggtttcgcccttgatttagatagatatagttgagacgtaattgaatcaaaattgatggttccagatgtttcgcccttgattttggtagatagatagataaatagaggtgggatttaatcaaaattttaaatcgcgagcaaaatgatttggcggtggctcttcccaaacgctatagccgctatagcgggcagtagcggctgctaaaccatttagcggggattaaaaaatagacaatatatatcccagaaacaggggactttcagcagaataattatacaaatctcatcagacttgacagcaataacataaccagcataaatttaaggtaccatactggcattacaacttacagcaaatcccaaatggtctaacagtcactcacagcataatttaagggcgcgcaagtctcaggagacagtaagaaaggtacaagagcaaataaggtagctaactgacatagttaaataagaaagcagggagatcctcgaacaaacagcagggagatcagaagcaaagcaaacaaattaagggcttgactgtttcagacatagcacttgccatccggtggagtaggagatggatttgaggaggacatcctggttcagcgtccctcgtcgccggtggcggcctgctgcctggagtcctggccgacggtgtcgccgccgccagtcgccaagctcgtcgtcgcacgtccccaagcaacagccgcaactttttccgagtgggaaatggggaacgggggatagacggtggagtcgagctagggttagtaacttataggagccgggtgcgtatatgggctgaaagctgtgtgggcttcagttttgggcctctaaaatttagctcatgcaaacttggccgcgaacctgtgcatttagcgtgctttcgcgctgcaatagcggcttcgcagcagaagccgatgttttggccattgcgtagcgtcgagtgtgtccagccacaatagcgtcagtttcgcgcgccatttgattctttggatttaattggctcaaaatttcctggcactacatgcctcttaggttaattatctccttaccaaaatgaaatgttatgtcgctgcaatgcagctcggatccccgcc

SEQ ID NO: 2099 - DNA, 2496 bp, Brachypodium distachyon
  Intron number 1 from transcript Bradi3g27990.1 (locus Brad i3g27990) derived from phytozome v7.0 (chr-ID Bd3; pos 292 95004 to 29297499)
attgtcaggcacaaatttgctcttcggtatgtgatgttttatgctttacggttacattatttgcacttttccattatgctgataggtaagcttttgttatgtgattgttggaaaaaggaaattggaattatgtgataatatatcaaccgtactatcaataatgtaaacatggataggtaagcttttgttctgcgaacgaggccttggcgtaatggttaaggaacaactctagtagcagttctcaggtcctgagttcgactccttgtgggagcgaatttcaggctggggttaaaaaatcctctcgtctgccccacgccttaagcacagacctaagacctgcccgctctcacacaggcttcggtgccgctgtgtatggtgtggggcaggggttcgggggtttctcgacctgcgtgagaaggtcttcttaatgcaaatgcctggggggtggctttacccctttgcaggtcgagtttttggatttatctctatgctacttataaagttttgagctcgtggtgagttcattcctcccatccactcgtattggcacttgggaccataacctgtaaaaaaggcacaaataaaaaatttggagagccccctcaagaacaataggagaggagactcaaactcacaatcttaggttccttggcatgcggcgtagcatagaagagaaatgatttaacttatcgtaagctgacacacccagtgtttcaccgagaattcaaccaatcctcgtcctcctgccgtctttcttctcgttaactattatcttgttgtattttatgagatttgcaattgtttgttgcatacaattgatgatcaatccaaaacaaatgcactctcttaaatcattccacgctcttctttttttgttccgtagcaacacacgggccctatgctagttttagcaaatggcccactggtctttgctccctcagttaactccctaatataaatcacagcagtgccacatgtaggatttcaataaacattgtttcttttggcttcctgccttggcatgttccctacttagcgtaagggagatgaaacagatcgacattactcccccccttcgtagcttctatcactgcttgctggtccatgtctaaatggactactaaccctagttttgaaaaccggaccggtgaggctcttggttcaggttttaccggtcgaaccgccggttcaccggttcagtctggttttttatgatataaaatattccctccgttccataattcttgtcgaaatattacatgtacctagacgttttttaggaatggatacgtccatttttgggcaaatttgagacaagaattatggaatggagggagtaatatatttttcaataaatgctgcaaagctgacatgaatttttgaccaacatataatttttcgctcattcgttttaattttcaatacaccgtttcaatttccgagttttcgttgtgtgtgcagtgtgcaacagtgcaagacatatcgatggagtaataagaacaaaagaaaagaaaaaagaaacaatcagatccagctttccttgaggccttgggccgacctgccgatccttgtgttgcttggtctttggcgaaactaggctactaacattgttctttacatggtctattgttgtttaaccagtttggggtttaagatatttgttgatatttacttgaacttgcaattttgccgggtagatacatactaccagttctacaaatagcaattagatcatcatctgtttctaggttagtaagctacctgtgattccatttctgaggagtttgctatacatagaacctcaagataatcccagagcaatgttgcaattgctcagtgttcgagctaaatttatatatttagttgaaacatataataccatttcatcatcagcaattacttaataagcagtttagctttatactacctccgtccaataaaagatgtctcaaatttgtcaaaatttggatgtatgtagacatgacttagtgtatagatgcattcaaatttagtcaaagttgagacatcctttgttagacggagggagtataatattatcatattcatggtaaattgataaccacagaattttggatggaccactataatattcccttcaattcctcacaattcaaatgacatattgtattagttatatactcttagctacagtatttattatttagttggggagtaatatagttacagcttgcatttctatgttaatctttctgctacaaccatccaattgtattttgttaaattttattcctattctccagtttatatatgaataactggaacttgcagatagcaattttgtaaaatgaacatattacatattctgaaacctctgaaataagattgaatgttaagaggaccatcgctaccgactccaatagtccaatatttattggagcaaagatattatattcttatttcctggttttgttcttgaaaggtatctggtcctgctgcaagtgcctacaagggtca

SEQ ID NO: 2100 - DNA, 10601 bp, Brachypodium distachyon
  Intron number 4 from transcript Bradi2g13390.2 (locus Brad i2g13390) derived from phytozome v7.0 (chr-ID Bd2; pos 118 44988 to 11855588 reverse strand)
gattctttagctttttcagtatgctatgtgtgttgtcctacttatttgtttcaacagttgggattttatccgtttcccttgccacgatgaagccacaattcagctcatgcaagctgccagccagaaaggccagagttcaaagctgtcacgtagaaccaattttaacgtggcccggtcaagtactcccaagcctaatggggaactgattgcctgttgaggtgtcgaggcatattttttttattcagttcggtcagaagatagatatggttgtcttgaccacctccaggcttcctagaacatatgtcagtaatactgacacagctagcgtttgatttacgaataacgatgagaggggaagatttgtaacggcagaaaattctcgcttggcgtacgttcaaccctcggatggccgaggcgttgcaacttggcactttgacggggactgacttcagcttgctctttcaattgatggatgccatggtcctctggttcactccggactgcacagatttcatgcaacgtctccaccgtcatggaaccgttgcttggacaccaaagttcattttacaaaggatgcaccacgaaaagaacagccccccgccatagaacaaaggaagcaccatgaccatgacagcctggaaaccgccctctttggctcaaatcagtactgagtagtacaaaacactgactgtttgtgctactactaactgctaagacccttggtgttaaccacacattttcttcctactgaggccaacttataataaaattagggactcgaccggttctgtacgtagggtcttcccctgatcatgccagaaagatgatatatactgtttttttggatatggcacccctacataattagcatgacaaatatttaacagctgctgaaacaatgctcgaatggtccatctgcctcagcttacaatcagcagcacatggacgtacacggtacaccaaatgagctatctaagatcaacgatgcagcttgacagattgtcaggcgagtcaggaatcaggatcatcacagccaccgggctggaaggcaaaaaaaaaagggtaatttggacatgctatgtaacctatcttagtaatatcaaatggtatagagaaccacactctagcacgcgggtgatgcccagcaagttgattactagacaaagttaacttcagttatgctttgccgatgggttattttccagaaatttccaggaaggcattggcggtgcgttctgtggagcagagctcattgacagtaggaggtcttcggccaacctgattttatttgctactttctcctgttccaacatgagccccccaacaatgtgaggaagctcaggctcagttgatgtcttgtgcttcttgaaactgacagttcttaattggtcgttggtgaggaagatgttggttgactttcctgaattggtcattggcgacgatggacaatctgcttgtttgttgatgcagcattcactattttcatgcgcaagttccacttttgaatcgatggcctccatagacgtaccagattctttatttatgcacttttgtggttcctctttattatgtgctggaattttcatgcagcatgagtttgctggaagctttacatccgaatccaccatttcctccggtgcatcagatgctccagtcaggcatttttgtatttccttttccggtgtatgaaatgctccattcaagcatttgtgtacttcctctttaccatcataaggttgctcgatgtcctcatctgagctgctacttcctgcatctgtataccaatagtgaacaaatattgtgcattgccatatatagttgctctagtacaagtcaactctaaaaaagattaatggcgaagtgactgtctctaagtagatttaattccaagaactataacaagaaaatcacaaatataagtcaaccagtgggtttccacaagaactgatcaaaacagtccagtctggttttcttaaaagggtggttccgagcataattgacaccctttagcccaattttagctgaagagatgtatattttttaattttgcacatgatccaataatcaaatcttgcaaactgtggttggatttttttaaacaattaagtaaaacgtcgattttatgggagaaatagttttttcaaacccagcagttaaaaccattaaaaggcaccctgctcttatttttctaaacaaaaaggaacaaacatgttttctgagagcctatgcaacgacaagttacatatcagttagtcctgcacaaagggataattaaattaaattagatggtatggattcaaattgcatgcagggccttgctggatgtttgacgttttggataatgttactgttttttaggtaggattgtgttattattgagacttgacattggatgagagattttcaacagtcgcaagaagctgcattgcagtggtggttctgaggaaatgttctacatttaatatcacagggtatctttgcttcagattgtacaacacccatgctgtgtgacccttgtttagctttggaagggatgctgcggcattggttttgtgtaataaaggcatccctagctctttaccatcttctccaattgctgaacaagtaatgatctgtgcattggaccaattacaagagcacgtgcaccaagttattagaacatgtgaattctctcttagttcaatacgatatatttattaatgagaattttatactgccgaagtctttgcgtctttgtataatcagatttgaggctgaagcatgcatggtgcgtggaggagaggagagcgtgcatgaggatcatcaagtgctggcatccatcatcaagatgtgcacgagggcagagagggaggaaggcgcaccacaactgaagatggtgaatgcaaacaattagaagaatatcttgtgtgcaaggcagccagcaacaagaatgatatgctagagttgcagcaagttgggtacgagtatatggtgcaccaggacaacccacgatgtgttccataaatctaagggtatgacaagtcttcatattttattcatcagcatggacacttgatcggacggccgctccctgtcccgatttgcacgaaacctgaaatcaaacttcagacttatgaggcgctaagcctgagcgactcaaaagatcactcgagctgagcagccccgccggcaacctgccggagcagattcagtcttgagatctgaatcttttgctctactttacaaggagttgttctatatcagcatccattcttgtgcctctacctctccacactaacatttgagcaagatccatgaaacccatccttgttttcttaaaagggacccatctacctaatgctctgctttgaaacccacccttggtctaaccggacctctgagtccatgtgtgagccaaagcctattatggtttggttctattaaatcaagttgagccaggtttgagtccaagtcgaagtccatctattgtaatactcctgctgaattgcgcaagcattcatcttgaatcctctacaccatattccttccaatagcgtgtttattgttactgaaattccagcgttatttgtcgttctgttgggaactgggagactgcgaaaccgcttgtggtcggcggactactgcgcaagtgtgtggtgttgcaaattttcattgggttgcaagttcgttgcattggcgatgggtgatcagccggaagattagctaaatcatactccctccgtcccatattaagtgactttctattacatgtatctagatgctttataggcatagatacatccatatttgggcaaatttgagtcacttaatatgggacggagggagtacaagttatcgacattgctctctgagagattgggtcgtcccttaccgttgtgtgaagtagaaaaggattggccaaagagtcaaggggtttgactgaaaccaaggctgatggagaggttgtgcgatagggaggagaagttgctgcagtttgcagatgaggactctgatgaagacactaccaaggaagagccggaagacagtcttttttgaagaaaagatggaagcactcaattgagaacataaggaggaatttgtagtcgttttttgcactggaagcaaggtggtaatacttaagtcttattatttcctgactcttgtggatggacagaaggaggttagagttatcttatcagctcctgaggatagacataaggatatgcttcattcaggaaatctccaacaacaagggacaagaggcagatgagcactgcccctggttagggtatggagccaactggagcacaattcaggtaagattttgattactttcaagctgatgaggtggacatgtcaaactggaacacactagttagctctttagcggtaaatctgccatcacaattcaagaagagttgtatagaaaccatatgatatacaggaaatcagcaaatcactaatacctgggttctgcgtaatcaaacgagccgtataccagcattcgccattttcctggcacaatagaatgaatagataattcaagaaacataacggaacaagtatataattgaacctgaataaataaatatagatcaatacataattcatttatattagtctctcctggattagaaaccatatttattcgtttatactgtttccagtattccaccctacggaacttactaattggtgagacatacctacacaccaagtcacaaacaatcagggttgtcagtgtcggatctttggtaggattatgtttcaattgacaagtacaaaaatttgtaggatcagattgtataattgtaaatagagagggagtgacaagatcatgatcacaaagttttaagattcggaatttctaatgagcgaacacttgctctttagtctctcggagtgaacgctctgctggccatctgattgggaagactgtgcctgaaatcgcgccatgtgacttgtggggtgacaactttagttctatagggtggcaactttggtccgtgaggttggcaactttagttttgtgtgggtggcaactttaccctgtcgcgtcagaaggctagggaacaaacatttagttccgtgggggtggcaactttaggctatgagggtgacaactttagttctgagaggatggcaactttaccctgtcgcgccggaaggctagagagcggatgttcgctccctatttcaatccattaagatttgtccatgcctagattttcacgtagtatggatcgtgatcataaacttttaagatttttgcatgcctagatcatgatcattgttaggtgaacctacagctttctcctttttggatccttatgaaaaagcagttttcgaatttccttgaccctgagattttaaccagggcacatccaccagtttagctactgaactgaatgccgcagtaccgcttaaatacccccctgcgatggttctgatggcgctcttgcaccgtggagggtgacgtggccgaagatgtgctgctttcttcctttctttgttgatccaacatgtcagcgagttttgctcgatctcggggagtaagtccacctgattttctgcactccacattgtccccaactccagtgagacccaaactctaaaatttctcgaatccatctgctaatacctacaattgatgcttcgttaccttccatgcggcactgtgaactcagaaaacttttaagggacgttttatttgtatggcgttgtccaggtttaataggcgcacaacctttttcagctgtacggtgcctcgaatgcccctgttttctttccccgttctgccaccgtacgcatgcatgcagactaattaaatcaggtccgttggcttcccgagacagctcctttgtttcccaggcagtgttcacacttcccatcatgcacactactaatcacttgcttctttttcatttgcacacagtgctgaagcacatctacataacacaggcagcagtgcaagctaggggtattttcgtccaaaatacagtcacctaagactgccttggtgcctgtgtaaaatctaaggcgcctcctaaaggaggatggagggagtagctcctagcctccagggtgtggacacttccacaacggataagaatgtgtggcacaccaccctataggcacacacctgccctaaaagctcgttgaggaggagcccgccgtgcacatctgaatatctgatgaagaggatgagcacgagccggtggtaaagagaaagactagtagaaagagagaagagaaggaggcaccgctgtgagttgtggaatgagatacgagtaaaccttgttctttgagaaagaggagtgaacacttctatttcaatgatatgtggatccagtttgatatgacagtccatgttggcataagctgaggtggtaacgtcgatgctatctaaacctatcgtcatggccgtctgatctaacttcaacatccactcaaatcactttcgatttaatcacttaaaacaatggattagagtacttttttttgcttttgtgatgtgacaccctaaccattatttctcctctttcaaaatttttcaaaaaaaaaactttctcttctctctttactacactctcacctagtgtacttttatgacttgacaacctaaccacttcttgaattttgttaaactctctctctcttctctactacatatttcggtcaaacaagatgcataatgagtggaggaaaagcatattagtacctatcttcaagaataaagaagatatccaaagctgtagtaattacaaaggtattaagcttattagccatactatgaagctttgggagagagtgattgagcatcacttaaggagagtgactaatgtcacttaaaaccaatttggttttatgctcgggagatcgactacggaggcaattttcttgcttcgccagcttatggagagatacggagagtagaagaaggacctacacatcgttttcattgactcggagaaggcttatgccagtataccaaggacggtcatgtggtgggcattgagaaacacaaagtcccaacgaattacatttctctcatcaaggatatgtactctaatgttgtgacaagtgttcgcgcaggaagtggtgagactatccatttccaattacgataggactacatcaagagtcagccttgagcccttacattttttacttggtgatagacaaagtcactaaggatatacaaggacatattccttggtgtatgctctttgttgatgatggggttctagtagatgagagtagggtgggcgtcagtagtaatctgctgttgtggatacaaactttggagggtttaacctcagtaggactaagaccgaatatatgtggtatgactttagcggctctagttgtgatggagaggttagtctaggagggcaaatagtgcctaagagggacacctttcgatacttgggttcaatgctgcaaagcaatgggggtatcgatgaggatgttagccacaggatcaagacagggtggatgaagtggcggcaagcgtctggaatcctttgtgacaaggtcccacaaaagctaaaaggtaagtactataggaccgccgtcagacctgccatgctctatggagcagaatgttggcccactaaaagacaacacatccaacaaatgagtgttgcagagatgcgtatgctaaggtggatgtgtggccacacaagaacagaccgaatcagaaatggggtgattcgtgatagggtaggggtgacaccaattgaagagaaacttaacaacacggacttaggtggtttgggcatgtccaatggaagccaccagaagcactagttaatagtgggattttaaagggcatttgacaatgcaaagaggggtagagggcgacctaagttaacatgggtggaggcagttagaatggacctaaaagactggaatgtatccagagatctggctttcgatagggacccatggaaatccgcaatccatgcacccgaaccttgattatttctttgtttttgtgtttatttttattctccgcaattttattgtttgggtttcatatctagcttacgccaacttgcttgggacattgctctctctctctctctccattattttgatacgatgacttgacaacctcactttttttctctactcctttcaccacctttttgtcaaacattgttttttttttaactttatcttctctaatatttcaacatgtcctgagtgatataaatggtgtacccatcggcaccgaaacgagtacatcgaggtacaaggagaataaaccaggtgcatcatcaaaagaattccctagtaaaaatacatgagggtagtacaagattctcaacactcacttagtacagttaaagagagtataatcacggtaccatcctaattttgtagaattcaaatcttcattgccattaacaacgggtactcacatcagcacggaagacatgttaccttaatgtgttttactaagcaacttttgagtagcatgttctgatctcaataccaaggacactcatgtactcgctttggtaccaataggtacaacatatgatcgttatggtcccaaggttacttgcccaaaacatgtgagaagagatgagtcataattgaaaatgtgtcaggactcacccatttctcatgtgagctctctcccatgaaaagattcttgacatacacacggggtaggggtggggctgggggcatgaaagggagtaagagactttagatgtaagatgtgaccgtacaaaggtacaatacattagctacggataaattgtcatatcatgccataaggttagaaattttgtacatcgttgcatctatctccaacaaatatcacatcatacggtagactgagatggtatgctgagatgttgtcaacggtagctgacatttagcccatgttggcaactaatccacatcacatggcacttgtgcaataccacccaccaaaaccaccttaggggcttggtaccaacctgccaggcattaaacctcaaggaattatgatgcccgggctccaaaccttgcagggtcaaagagactatttactgaaagggcatttctctcctaagtggtttcgatggtgatgataacatgttgtgtatctaatcatgtgctaagcatttcagattttataaagaacttggcacgagacgttgtgtggaccctcaagaaggaaagaagcgtagcagtgtttagcggctttttcggttgatttgagtcgtaggacatccgtactattaagagggaatccacaagggaaggtaaacgggtgaatcaatttcacgtccagatctagacaaaattgcacccactaaaaagcctacccaaaaaggtgagagaagaaaccaaacttcagagttcaattctaagtgcccaatcatcccaggagcctccaattgagttgtggagctagccccgatcaagtttgtaagggtttggacttcgcccccaaggaagccactagtggagctcacctcacctttgtggtgttgtgagaggagaatagagtgggcctttgtggcgcctctatctttgtggtagagcactcctccaaacggaaacgtacacctaccccaatcggtggaactccggtgaaaatcttcgtctcgtgtggcgtcattttcaccctttacattcttgctatctattgttgcttcggctattgcacttcatactagggttccattcactttagagaatttagtaaaccctagaattaagtgttggtatctttcaagaaaagaaaaagaaaaagtaaaatttgttagtcgcctattcacccccccccccttctagtcgaccataccgatctttcatttactattagagtaattttcacttcttacccgctatttgttactccctccgtttctaaattcttgtcgttgttttagagtatttgatagagagaatcaacaatcacctggtttatttttccactatttaccacacatgcattatttccatggtttagactgtagattgatttagcaacctcttttcatcctaattaacaaggcgcgacatcatgtcacaccaaggtggtggctgattagaacgccacctcacaaaatagtgggtaattataggaattctcttggatcttgaaatccctacatgacatccctaaattatattccacattatattgcaaaggtatattaacaaatttagcaatcatcggctcattcaatattggaggcttgccgtgctatagaatcatgttagttgcataggatttttaacattctagtatgccaacccttattagaaaaaaggcggttctttgaaatgccttctctaacagattaaaaattgtctatagaactaatgttacgtagggtgagacaacgtagtgaaatggctccagagagtacatgctcccgacgtgaccagcaaataagcaaataagagttaaatgtgtcaaaaaaaaaagttctagatatttttacaaatgtacatgttacttattcagagtgtgttcaaatttcatcgtaacatgtacccttaacaaaaaacaaatttagctacccaaaatagcatttcttttaacccataaaattgttctttgacacaaatttcacacgaaggacaacatgtacattagtaaaaaaaaa

SEQ ID NO: 2101 - DNA, 719 bp, Brachypodium distachyon
  Intron number 26 from transcript Bradi5g24270.1 (locus Bra di5g24270) derived from phytozome v7.0 (chr-ID Bd5; pos 25 968111 to 25968829 reverse strand)
caggaaaggtaatccggaagctggaagtggttaatacttgctcattaagagaggagggattcatttcatgcaattatttggtccctgctgaatcaatgcctccagaatgcactacggcatatctgggagctgctgctagagtgtaacccatgacagggataaatgcatccaagagtaatgagctagggagataaagtatgcatcgtatggatccacgccaatgaagtagctcttcgaagccgtccatgggtgtgatccgaaagttttgtaaaaattaaggagggtgtagaatacctgcttcttttttatatataaaagaaatatcatggttacaaattatgcaaattattttagtgattgttcaggaaaacaacctcgtcgtttttatataaaaagattaggtgagggacgtggagaggaggtgtggggtgtaaaattgatacgatgatttgcaaattgctcttggggaactggtaggagtgtattgaatccaactttttccattgagcaactgctgtatttttttacttatttcaacttacacaagcactcgtctaataatcggttgtataggaagtttgcatttatttgttataattggttctgaatctgctttgttaccattaaatcacaatgattcttagtagtttattcagaactaagtcttttgaatgctctctgcagcacaatagaacaggagatagcttgctgctaggctc

SEQ ID NO: 2102 - DNA, 4820 bp, Brachypodium distachyon
  Intron number 1 from transcript Bradi4g12230.2 (locus Brad i4g12230) derived from phytozome v7.0 (chr-ID Bd4; pos 122 23274 to 12228093)
agtcccagagcgcttctgcaggcactccaaggtaaatgcacttcattaactaaccatacttttacatggtgcattttgtctactcattttatcatgccaagctaaatcaagcttctctcggtgcctgttttcaccttttgactatgctaggggtactgatacttttcttatttgcagcttggtactgtagaactattagttgtttgaatacatatttcgatcttcgggattcaactcattttagtgtttcttgttgggcttgggatcttgccatagctccatacactgcagggcacccccttgaacacatcattttgacaattactaggtactgtggcgtgccaactggctcgccatacggactacttcagggtgttgcatcgaattaatatgaagttaggaagtggtgaatagtgccccaattacgagtcgaacgactaatctagactagtcgcgcgactattctattcgacggtcggttcctatttccctgagtcgacgagtctagactagtccacatgtttgagtcgatcgactataggtttaggttttgggcttttggctgggtaaggcacggtcgggaagggaaccctctctatttcagtctctccctggccattggaaacaactggcacagccttaggttcttcatccacttccagtgccttcaaatttgttatacattgccatgtactgtatagtatatactaggtatttcgtacaagctactgctgaagtacatgtcgactagtctagactagtctataagtcggtaccccgacgactcggctcgactcttcgactcataaatcatggaatagtgtgagcctagttaactcgtagtaagagttacaaactacattatgccctggcactgagtgttgttggtttgatatgtgtaaatcagaagagaaaggagatagatagtaagtgttgttggcaaggatttaaagatagaaaagatgacaacgaagaaacagagaacactatgtttggagcatccaaccgcgtaggaacaccattggaaactgtatggaggatatgtagcacacaactaaattgttcatagggaaaattgtagtctgcgcttatgcctacccacttcttccaatcatgtgaagaacaagaaacaatactggaatattaccgaaataggttatctaataggctgggaacatacatctataataaaggagcaaataagaaggagaagaatgacaagaatacctccacaaggaagaaaccatatggtccagcgtaaggaaacaccagcagagcaccaaagagaggctcctgggacaaaatcaccaaataaataaggccatgttattttatgaatcatagctcttccaattgcttgattcaatagttcgttataaatcagggtgaacagcaatcgtttaaagatcaacagttaaagaagaaatggaagactaaggtaaatagaacacaactaaattgttcatagggaaaattctagtctgcacttatgcctacccacttcttccaatcatgtgaagaacaagaagcaatactggaatattattgaaataggttatctaataggctgggaacatacatctataataaaggagcaaataagaaggacaagaatacctccacaaggaagaaaccatatggtccagcgtaaggaaacaccagcagagcaccaaagagaggttcctgggacaaaatcacaaaataaataaggccatgttattttgtgaatcatagctcttccaattgcttgattcaatagttcgttataaatcagtgtgaacagcaatcgtttaaagatcaacggttaaagaaaaaacggaagactaagggtaaatagaagttaggtcaatcactttttctgtattccttccttagtttgtgcgtcacagatgccatttcatgacaaacaatttagctcagaatgaatgaatggcagataaccaattgaccaccacagaagtacatagcttaagcatgcgaaggtccttctgttacatatttacgcataggttaaaacaggcttaggaaggtaaaatgggtgactaccttaccatgaactggtagagcagtagtaatggtagagcagaaaatcggtggatgaaaggatggcatggcagcacggctaggtaacctcagtagtcagtacaaatgctaaaacctgcaaatgaaaagaggataaactaaacccatagaaattgtatggaggaactaaaagagtacagtgagctcacctggagctggggcatcgaggggcacctgcaaggaacgaaatgggggcagaaaagcacaaatcttgtttaaggccgagatggttctggacctggagatggagaaattaagagtagcaaaatccgttagtatttctagaatttctcgatgaaaggcctagaaaaatctagagctgaggaggatgaactacctgcggacggagggtcaactccgctccttgagatggttcctgacttggagaaatcaagggtagcaaaatccattaatattcttcaaatttctcgataaaaggaggatgaactacctgaataaatttagatctgagcaggtcggtggtagacaaagcggacggagggtgaactccgctccctgagatggttcatgacctctagaaatcaaggatagcaaaatccgttaatattcttaaaatttcttgataaaaggcacggaaaaagctagagctgaggatgaactacctgaaaaagttagatctgaggaggttggtggtactgcctccgccaattcgaagctggcgctgctgtcctgctggtgaagcaatcctcctgttcgtcctcccctgccctcacaccgccgaccccaaaacttgactccgcgccagacatggtttttgagtcaccttgactcaacttggcgactcaaaaacgacggcgtcagaacctccttcaacagaatcccttcctacaactctgccgagggaaggggaagaaagggggagcatatcagggtgctgggatggagatgaggcgacagtaaatcaagcactacaggagggcgaggaggggaggaacacgatgcctggaggccagagctggcaacgcgaggggtagtttggaggtacagaagagagtttgggatggaggggtggcggcgcggagaaggggtgggagacgaggtgtgtggaaggatttagggtttgcggcagcccttgacagtgggattggtgtgtggggagcaaccacagccttcctttctcacctaaaaaaaatccaacgctccacgatagatctaaggaacgaacggcccagaagcttgggatgcaagagagttagggacagaggggtggcggcggggagaaggggcgggagacgaggtgtgtggaaggatttagggattgcggcatgcttgacagtgggattggtgtgtggggagcaaccacagccttcctttttcacctaaaataatccaacgctccaggataaatctaaggaaacgaacggcccagaagcttggaatgccagttttgaacgattgtgtctgagctggagatgcagagcccctgtatggccagtgcttcatgcacgggtgacttttagtaaattgaattccgcaaattgataggcatcctctgaacaaataccccaatgcctttgaactaaaaaatagttggagtaaactcttcttagagctaccaaaagagtgaaagctgaagtattccaccatcatgactctccagggatattaacatgtattttgtagaaaaggcatatcaacaacattaaatgtattcaaatacacattctctttttctgttgtttagcgtgcaagaagtacagctggttgggtaatagtgcctgctcccatccagctcatatctactcatctgttgtctgaggcaaccaaaatatatgatgcactctatggttgctgaattgataataatttccatagaagtcatcatcacacttgtttgtaatgtgcataccattttaagatgagaaaaactcatttatagttggtgaattcattatcatttgaagtcaaaatgatttggtttctaaaaaactgatttctgtgttgtgcagtcggattggttctcttctgtgattctttttttggcaagtcgttgttggtctgattaaatacagttttgatgtcaaaagctatgtttgtagtttgcatataactatcatttgattctgttgatcatacaaatgtatagctagaggtctccatgtttttagtgtaccaatgagcccaagagacgagtccatgttcgatactggtctttgttccaactagcacaactcctgtgtgatgatgctcctgtctaaacaaaaaaaaatgctatacatgtttgagaatagttctgtactagtactacatatcactttgttccagctagcacaacatccatgcagtgctccgggtgaaacaaaaaaaaatgcaatcctgtataaagatgatgttgtactatcatttgctgtctcagaccaactagttcgtaagtagtcacacttaaatgtttcagtctaatcaaatggggtgtggtgagaaggtgacagacctttgccacacctgttgagatctctataaccttaaagatacataatattctcagtttttgtgagtttgtgtttctgcatgattcataacttgttagtcgtacttttggggcatgaaaaatcagcatatggtaatttatacgcaattagcagtacaaaaacttgaaggtcaaggcattattttaatgcatttatctgccttctgcctatctaatctgtaattctgaacctgtatttccttccgagaacttgaacctgacgtattaactatattccccagagcttgag

SEQ ID NO: 2103 - DNA, 1664 bp, Brachypodium distachyon
  Intron number 1 from transcript Bradi2g51870.1 (locus Brad i2g51870) derived from phytozome v7.0 (chr-ID Bd2; pos 514 35017 to 51436680 reverse strand)
tcccaccgattcgccttcgccgaacctaggtgcgtatccggtatccctagctaagctagctactcctcgttgttgatcgatctggtgtttggcgacctcgcctccttcggtttgcttgttgcggaagcgggaatttcggggtttccctgggggtaaacgcggctttcgtttttggtatggtactgtattgactggcttgccaaaaatgtaactaatgcagcgcttctgaatttctgatctggccgaggtggggtgagggtggtggttttgttgggacataaaggttgagtacgtagtgcatttttgttgcttgtttcgatgctccgcgttaccttttctgtcctagtccgtttgtggttcgggtacgaatgttttaaatggtggtgctgatttaccggtgcttctgtccatgatccgtcagtgagatcgatgtatgtaatgtttggtgtctcggttttttccaaggataaggaatgcaggaattgagaattgaatatatcatggtgtatagtttgtgtttcgcgtagttcgtttgaatgtagttctaagttttcaggctgagtgcgtcgaatctgtgactctaaatcgactgttcagtgagcgggagggtaactacaatttgagcacttttatttatttatttattttgaaacagcaattcaaatttattactcggtacctctttatcagacttcaaatcgctgcttgcaacagcggcaactacaagttttcaactatgaattacacgagttgatttgggatcattgatgggctgatggctctcttgtttcgattattccagatgaccaattgtagtctgggttgagttttgtgaccaaacagtcattgataattaacactgctataattcatttcaaggatgacagtgacaatgactaatatctacctcttcattggaagggatggatgtgctttcacgctatttcgaacttaaacaactttgaattttgaagcagctgaaagtatacaagtttagcgaagttctttgtcatcatatactagtaatatcaagttctcaaaaaaatgatatagtattattactttgaaaccattttttaataggatgcatgcatgcccttaccaaagacagactgcgcccattatttatcaatagtaattattcagtgtgccaaatgacaagcaaatcaatgcagctgctgttgcaggaaacatatcccaatttaaatctgaaaattggtcactaaatttgacctgcggaaactttaagaaatccgttagtatgccgattgatatctgttcagcctctagtgacatactggcattgttgaaacctactacaaaaatagtttcacttttatctaaacgatcctaatatcatttgtttagcaagcagtctttttactttgtccttactaaaagactcaaatatgctcatggatataaactttgtttctgaattgcacactgaaacctgctttctgcttacgccaatgcataaattccaactaaattttaccgagtattctgtttgacaaactgtacaagggtcaaatcaacagaattgatgtaagaggccactattacatttcgtgcaaaagagcatacccaaaataaacctagtaggttgcatggtcttgtatatctttgtaatgatgcatgaatattgcaggttgcaagatcca

SEQ ID NO: 2104 - DNA, 814 bp, Brachypodium distachyon
  Intron number 1 from transcript Bradi2g25100.2 (locus Brad i2g25100) derived from phytozome v7.0 (chr-ID Bd2; pos 229 50139 to 22950952)
ccgtgccgctccagtctccgctgccgcccgtcgaggtgatttatagcattcgtagtggtttggattgggttcgaatggcgattgccatgcccatgcgtgtgacccgtcgttagatccgatcgatacggatgaaagaggtaaaggtatttttgggtgatttcgtggctgtgcgttggtgtttgctcggtagtttcgtttctctgtggccaaattgaggttccggaggcttcaacatatgcggatttgctgttagaattgatgagatgcgaattctgtagggttgccgaggtgaatttttaaatcctattgaatattggattcggaattgcaggcaaacggagtttgtagtacttttgttggttgattctgcctctttctggctgttgattcagttagttgaatttgaaggccatgctggtggatattccaattagtggttttacctggtccatttttgtaatgcgtaatttgaacttcataatttagtgatcaattctgtcttcatttgatttgttcccagttcaatggaagtatggaactgcaagcgctgtagtcttgctttgttctacaagggagtaaagttgcaatttgcagacaaattgttgacaatatcttatagctgcctgttaaatagtgctactaaattccttggattttgttcttttggttttaagtactgcctacacctttcaagtatagaaaaacacgatgcttagaggctataacatgaatgttgaaatcttctagagcaacgatgactaagaatgatgaacgacactaatggtgatacgtaactttgctattgcaggaaatt

SEQ ID NO: 2105 - DNA, 10979 bp, Brachypodium distachyon
  Intron number 5 from transcript Bradi4g02600.4 (locus Brad i4g02600) derived from phytozome v7.0 (chr-ID Bd4; pos 187 1093 to 1882071)
tctggtgtgtcaatagaacaagtaactattgcacggttttaaatgttaactgtattgtaatatgagtattgcatggtgcttccttctgtcatatttcatttagtattgtatacttataatgttgttccattgaatcatgagaggattcaatgatacagatgcaatgtttttgtgatgtattatatagacggtcacagagaaatgaatatgtccacttggccgtccatgtattatacgtgagccaactgggagctaaggcagaagcatgccatgtgcatactgattttatatgcgagtcactcattactattatgaggcatcacactttgttgcatcttttgctgtcttgtactattatatgtgccattgtttggtacattgtgccctatgtcatgataaagggtgcaaggttggacaaagttgagatgttctttccctgttctctagagaaggggggtagaggaaagagagagaatcctaagaaatgaaaaacatggaagtgctggaaggtgttgccatgatttttgggaactttcagctgtaccttcctagcaatgagtatctcccaactaaaggtgcttttgcatgttagattaagcaaaacatatttccctttggagatcatgtccccttataatgatggcagttttgagtcttttcaagtgccccttgtccatctctgaagacaatcttgtgttgcttttaccaagaaattgttcagtacaaagaggtcactaggatattgtttcctcccagtcatggatcaacttttgagtaaatagacaatttgtctcttaaggttacaacatgttgcatccctcaactatttaccatcaaagcatgaacttaacttagttttgcagattccgaatggtaaagataatattggataaattcttgaagagtatctctagaagaatgcagagaaattattaaattattcctttactgtgtgcaccaggaacaaattggtggagggatagcttattacatgtacagagatcaccatggttgaaacaagcaattatcttaatgtatgtacgaaaattgccatcaaaacctgtagtctagctcgagaagtccaccgatctaattacaagatctgcatcctttcttgattgcattataagctcagcatttggccggtcgttgtacgaaatctgattcacaaaataaattttgagaaggtaagaacttgcagtgttcagaaactcttgtgattaaaaaataaaaacatggaaatagtttgatgtcttcattgagcggggatgatatgtttagccggaaaccttttaggaattaactatttgtgcagaacaaatatatccaaaaaataagcaacatggcgaaaccattttgccttgaatatttactagatgaaatatgttagtctaaactacaagcacacttgatgacattagccttcatgacatggaatagtagagcagttttatctgggtgtacgtcagcagcatgtatgtgcacttgtgtgagaaaggaggtacaaatggaagagaataattacccgccatgctgctacatctggctcttttcctggcaaaagagaacagaaaatggaattaagagacttcaattacaatgcatctgaatgagaaggctatggtgaatagggcaaacctgtgccaatatgtctctggagcactctttgcatggagacatcaatgtcaatctcaataaacctgagagggtaaagttcgatcattaggacacagattgtcccttttcagaggaataagcacttaaattgcactgcttgaaattcactgtcaagatgaaattgaagaacttgtgaccaacgaagatatattgctatggattatggtggcaaagccagtatactcaccatttttcatcaaacatgcctctaatgtccctccaaatattttcttccagtaataaataattcccttcgactattactattttgtgcctgccaaaatcatagcaagtaccgagcatcatgggtcaagcgccacctgtggctgtactcaaggtaaaacggagcaattgtggcaggatttatgcattacacatagatcagttatgacatttgtagcgtacactctcatcgaaagtgcaaagtggaaacaacgagattaacaggatactaaaatcgagttactccaaaagtaacggccagtagtcattgttaatttactactatgtgtttacgttggatgtgtttcatttcacatttaaatcaagtcaactaagaaactgcccgagtattctgcaaaataacttactgtggcttcacaaatatgtcattctcaactgggtcaccaacaccatgatcaaatgatggagcataaactgacccctgcaaaccaagatgtttcagagataagtgaatacaatattctgttagagagctcatattatttgacagtgaaattggtagtacctcttttcgtagagtctttaggcaattcagaaaaagtgatgggttgaatgtccacggtgctgaatttatcgaatcaaatgttagtacttctgaaaatagtgatttgttaaaatagatcgagtagagaacctttctcacctcctcttcttgcatgtgcttctttcggatcctagaagcaacactatgtcaataacttcagtagagataatcagaagatgaacttcatgacagagagcaaacctccattgcatcaagctgggaccgataaaggtggaaaccgtccatgggaagcattgtagcaatatcttcgttcgaaatcagtgaactatctgttgcatgcttcttggaccaatgcatgttaactcgtcgaacgacttcagaggcaacagtagacttgcctgcaccaggtgggccagctagaccaacgatgtacctgttcagatttggtagtagtattattagtgatcagcaggatagtaattcgataaatgttctcaacagaagagctaacataaactgatttcatcacactgactacattggtttcgcaattgtcaaatgttgtagtgccccaaaaaagggggaactgaaggagaaaagaaagaagagagagttaatctattcatagaatgccttattctcaatgatattcatctcttaactgatccacttttttcagaatcaacgtgtttgtctgtctaggttattgcaaggtattcaacaggaaaaatctgcagactcttcttgtgcatcattggacctaaaaatattgtgtctggttcctgtttgactataaaaaaaaagggctgaaaatcacaatgaaatgcttatagtgaatagataacacttggcagtccacacttggttaaagatgttcaagaatcgatgttttagtgcagaagaaacataatcgcagtaccaattgttgcaacagaaataattcactgtatcccgaacagcattgctagaaacagcttactttgaatcaagatgatcaacatccttcaagacagaaagaaggtgttcagccaaagcatcatatacttcctccattgaccttcaagtttaaaattagtgacaacttttattagcatcgtaagctatgtatccagtcaaaaaaatgttgtgtaatttaactcagtgaatgttaataaatttcaaagatgtacagtaccatccagctactctagatacagtccagtttaaattactgcagcaaaaatatgagagacatttgcagcatattaacacctcatggtagtcgaaaaagaaatttgttttacttccctgattgcattagctaattttcttatgttttagaaaattattttcccttctgaatcaggatttctgctgctagtttggaagctagaacaggagaaaatacagcaagtcaatggctagtgcatggatttttgaatgaacagactattatttagctgggatggtggattgtcatgacaaaagttcaaattacaaatttcttaggacagctgtctaaaagaatcaatcattttacataataacctgcccacgcaaagaacacagctaatttagatggttcaaatcttgtcatagaggaccagcttcataactgaaatactcgtaaggaactgattttaatagcaaccgattaaaaaacagcgcaccccagaaaaatgcaagggtgacactggcaccaccaaaacattatgggagcaatggcccatttatgaaaccaaatgaattagcagttgtttccttcatatatgataataagagtaacatacttggcttctatctgtggagctccttgtctctgatagcatgtagcctggaaaaaaaacataggagtcaaaacacggcgcgtaacaaaactccgtgacaaggaaaaaccactcacgatttgtttcttcttctgcgtagctggttggagcattcggggcagaaagccggtactcattgacggcattgacctcgccaattcgtttcgcacagcgaaactcctacaggatatgtatcctgaagaggcgtggaaattacacatttggtatatccggtgaaaacaccatatatatatatatatattactgcacatacaaaacatatactagatgcattcgttggaacagaaagagagaacatcagttggcaaccaggcggaagtaaagtaaacttctctcacttttgcactgcagccatttaaacaaaacaaagaaattgtgcatgaaactagacgctggatagcaatcaaagcaagtgccaccacatgctactagttaggaatgaaaaccaagcataagaactacggcaggtgttccttcaaacaaacaaaaaaactacggcaggtgacccttgttacttacatcagtcaaattaagctctgctaactaagggcatgtacaatgaggtgacgtcagccttctcttagcgatgccacgtaggataaaatctgatgtggaagagagagaaatgaagaaaagtcacaaaccttttcttaattaagagatgatctcttcataagaatgataaggcaaatttaccattgtactagatttcgccttttcttatcatttatttagttaattttattcatctaaacattaattctaagatagaacactaagaaataacccattgtacaacatgttttgttgtcttttctaattgacgtgaaatgactaagatatgtacatgccctaacaactgaccagaacaggtcaacaagctgcagataacctgcaagaactgcagcatcggatgcgataaatctacagagaatgcggcaggaatcggtgattacaccagacagtgtactcaacgatggtcgatctgggtttaaggctttaagcctcggaaagaaagcaatcaactgtctgatcccccacctgatttgcggtgcagaattaccctaatcgagagagaggccacagaaggggatcgggcgcttacgaggcgaggcgagccggcgaagatgggccggcggtgacggcccgagaagccgcgcctgcgccgccgccttgggggagacgatggaacctggcaactccatggctacttctcgccgtgaatcgacagaggcgtgtgttcttcttctagagtgagactatccggtaaaacgctagagcttttgctgctgctgctaatcttgatttttcgggaggattaagtaaacaatcgaaatttttgtgtcgtaatccgtttctgtaaactcgactcggtttcaatttagaacccagattccgagaaaacagttaaaaccgaaattatttcagaagagaaaaacagaaagcgaatttatttcagaagaaaaaggcagaaaccgaattagcatggtgagtttccatctaggcccttcggtactagtttctattgcagatgcatccacaggacctgctgttaagtagttgtaggcttgcagaaacagcaacagcattcatgccaaacagcaaataagtcagcgaaaaatgtgaataaaaaagctagtggtaggacagatgaaggatcataatccataaataagtcattattttcctgtaagaatcaagaattcagagagtacaccataatgctgttattgtccgaaagaattcggcagggacgaaacagaagattacaggaaaccaaggaatgttgatagtacattttacaacaaattcaggtaaaaaccaccaaccagtgaagaagaaaatctcaagtctcaacacagtctacaacagtacagcctagctgatctgcctttcctgcccccaaattcaaagggctacattcctctgcaagtgactgcttgcctcagttcagatgaacggcacactggatacgacacgccccaccgcctgatttctcatcctcaagcagctgaaaaaggtacggaaatggtgagcgatcggtccacggagaacaatgaagtgctgtgtttaaagatgagggtagagattggggagggttgcggatgcaattcatacctgttctagcatgaagtgagggacttgcacccgcttcgagccgtcagcaaggcgcttgcaaggtaagcgaggctcagccatggcgaactcattgagaacctggcagaattcagagtggacttgttcagaaaaaagaaaaaacaggtgatcatcatggcaatgctgctccttgcattgtccaggagttcaaatgcaacttggcaatgagattgtcacagacaatactcttataccacagtaggtttacaacttagcagtacctggtttctgattgctccaatcaacatgtcgcggcatccagagacatgaacatctttcaagttcggacactgaagaagcagccgttctgtagatagtttaataggctgtcaatacttaatgcactgatcattcaagtttggacaatggaagagcagccatttcagtatcgaaaagaaagaacatgatgtcacacctggattgagatttgtgcaagagttgaggttcagatcattcagctctggacaatttacatacagagcctgtcatacatgaagaaatagcaataagaacacagaatcaccatgaacataataaaccagaaaagaaataaatcagcaatcgtgaatttcaagcacttacatctatcgctgaacagccccaaagacttagctttctcagattggtgtgctttataatcagtttttggccagtaggttgctgcttccgcacagcctgtggtttcgagcaaaacctaatccctccgctgagatcaccaaagtatgatgacctctttgcctcgggctgcgtgttagcacataagctcttgccacagtccaggagctgaagaaggggcagctgtgctgctaccatctggaccccgcctacaaatcacataaacagggaaacttttagatatttgaggccacaggcaatgtaaaattttgaaaccagagataggctattcgaaggttgggacttacatgaggtaatatttaggcacatggcaaggaggagccgagtcagagtattagggaatgtcttgctgatcatcccaagtgcattatcagtgatattagacctggagtttaagcatgtcagattattttagccatgattttgaatgggattgcgataagaaataataaaatttgatgtctccaaagtccaaactattagaattaaagaaacacacgtacccacttaaatcaagcaactccaggcttgcataagaacgaactatagatgcaacagctgcatctgttatttttttacctagaagcaacgacagcatgcacagccccctgatgaaacacgaagaaatttaatcaggtggttcaatataaaataaacagatttcatctagtaaattcctgaaatatgagcagtatcccataagcatagcaaagatgtggatgtacctgaggttagcagtctcaagagcaaacaccacttcattgcataagtgaactgaagagatgtgcaggtttctcaaatctgggcaagtatggcctagactatccatcagactaatcagatcagttgaatcattattttgttgtgcaaaatccagtgagagttctttcaaattaggacagtttatgacctgtgagaaatgaacaccatgaatttatagaacttcaaaccaaaataactagaaacaatcataaaagcatggcaacttacagattttgtaagggaagatagatctgatagccaaagagttgaaaggcttggggagcttatattaagaaaatcaagactagagcaccgatctactttgagaactgagagagatctcttctctgaaacaaacctagctagctcacccctgtaagaagaacaagtgttggttaaaagatgatcagacttaaattccaatttaagatcttgtgcatattgcagcatcaaacaacaatctgaattgtaagcatctccaagcattttggtagtgtgcaatttcaaattggtgtgtacagattacagaatattagtcatgaacccataattttcaattcaacaaacatcatagatcatacagaattaaatttcaggtgaagaaaatgcatggaaactgtaaaagaaccattttacgaaatttatcattacgagtgttgagcttacccagtcatccggttgactgcactatcagccatgcttatctccagagattgtaagtttgggcaggaaaatgcaaggcatgcaagcattgtggcatcaacatcactgcagcaaatgtcagaaggacatgatattagaacatcccttgtagctataaactactctggaagcaattctaaagtaaaacacctaatctttagaaaattgatgtgtttttcctatggtgcaaccaaacaacttctacaatcacaacattaaagttttttcaatcactaggcttttggagtcctgcaaatcaaagagggcctaaatatatgaattaagccccaaaacagtagatcaagttttttccttcagtgacaaaaaaaattaaacctttctataatgctaaaaaggtaccagatctgcctaatgattcccttacttcaaacaaagaacctacaaaaatcctctgaagtcagcagatcaggaaatcctgttcttccaaactgaatctgtgacaaaactgacctgaattatgtcttgcacaggttgcagcacagaaactgagctagatcggcatatctacaagagtctagtgtcccaattgccaccacaatggacttttcagcacgttcacccatctagtattggcactggggacatattatgcatcaaaggcaccagaaaaatatcagatccgtgattcagacaggcaacggtgagagatcccgtcatccgtacaacgatctaggcggtgccattgctagaacttccaccaagaatttcacttccgacaagaatccaaattcagtcaagcaaatcagatcggcatgttttcttccagtctggagaattgcttgtgtattggatctaatccagcaccgctcaaggatccacgcagcggtgagatctcacggcaccagatcagatcacacatcggcaatttggaaagaaaaaaaaatcagccgccgatcggagaacatgacgtgttctccatctctgagcttatcgatctcgtggtaaattaagcaagaacgttccgtcagtgggttatcccatttcgaccgagatcggcagctatatggatcgattggctcgtcgatcgatcgatctcgggacagcgatggggtaattggtcggatcggggtgagttcgttcgttcgttctgagtttcatggtctgtttcctcacctctccatgcggagcacgagccttgtcagagcggggcaccggggcaggagcgcgccgacggggccgacgccggcggcgcggaggcggatctcctctgcagcccgccagaccctgcgcgcagagtcccgccacccgcggctgaccccggcagccgccgcaacggccctcggaggcagccgcctgagcacctccacgagcacctccccagccacccgccgccgcggtccgagaccgacgtccacccaccgctcccacgcgggctccggatccgacgacgccccgtcgtccaggtccaccacggccacgtccacccgcgccttcttcttctccggcgggcgcggcagggccagggccggggaagcggacgccagcgggaccgctagcagcggcggctcctcgtcgaaggagagcgcgcgcctcggcgggagagcggacccggcggcggggggtcccggaatggggcagacgtggcccttcttgggcatcccgcaccggccgcagttgtagctcccccgcgccttcttcttctccacgcgcagcagcgccgccgccgccgcatcggaggtttccgggggtgcgacggcgacggggtgagggacggaggaggtggcgtcggagccggtggcggccatgggtggtgaggcaaggagggtgagatctggacctcggtgcgggggataggataggatggggcagctagggtttgaggctgggagcccaggacgcggtgaggaaataggcgcggcgggcgggggaagagagacaaggcgggagagttggcgccatttcggtggcgcgagagagcttcgcgcttcactcgattttttcgctttttttgggaccaggggttttcttcttcgcgccggcggggttttggttacgggcggctcagatccatgggccgtaccaaacttgtctcagctctgctaagctgctcatgactcatgtgcaggaagaagactctactcatgttctggaagagaagaaaaaaaaaaaaggtctctccggtcgacgtgggcgttttaaccgaaaaccgaatgaatcgaccgaatccgattaggaattatcgttggattcgaatagaaaggacttgaaatttccggtgcctggttcggttttgactagttctgttttgaccgtcggttgatcagagttcataattcataatgctcgtcatgttgaggaagagaaaaaaaacaatcgatggggagtgtcatgggcattttaactgaagactgaatgcgttatgatcaaatccgattaggaattgtcgtcggtcccgactagaaagaaactgaaacttccggtgtcgggttcggttatgagttttaaaaaaa

SEQ ID NO: 2106 - DNA, 3120 bp, Brachypodium distachyon
  Intron number 5 from transcript Bradi1g54110.1 (locus Brad i1g54110) derived from phytozome v7.0 (chr-ID Bd1; pos 525 24776 to 52527895 reverse strand)
ctcagataaactggaattcgaaggtatgctgttcaggaattctctgcacttatcttccacatttaactctattttattggaacattagtggtgtcgtagcccggggcgtagacaccgggggtgggcggcaccccctttaggttcggcagagggcgtcggggatcgctccggcgatcgccggcgaggccaatgtcaagcgtgacggaacacaagatcgcttttacctaggttcgggccaccctgaggtgtaaaaccctacgtcctgcttctgtgcttttattaaccaatgaacgaggatttacaggttgccaggggagtccttgggtgctctctcctttctagctaagggctacttgctattttcggctaaaactagacaggaaccgacccctttgaccgtggacaatggtcctccttttatactcaaggatggatgacaaatggcgagcaaagaactcgttcacagcgggccagtcactgtgggctgactagacggggaatcccctttctgtcggaacattaaatgcttgcttgcgcttcactccttgccctgacgagccctgcgcacagggaacctgccgggcggccacgtggcgtcgatgctctgtctgtttggtaccgtccttgtagcaagcgcccgcgcccggggacaccctccccggcaagtgaccttctcggggagcgcccagacggggattctcttgttgccttccagggcaacccccgcagcctggctagccttgctaggctggtggcttgccgggcagcttgtgcggtgctgcccggggcgctatccttccggggagcgggtgaggcgacccacgcgttatgcaacggtggtaccctgggtgccactggtgcgacaagtgaagagccctactggaatatattaagaaccaaaaaatatgtagagaagcaatgtccagaagacacatataggttcatagaatacgagaagctcttacaccatagctgtggatgataagacataatagtactatgggtgggccacactctagctactggcagggcctcccctacagttttcccctataaaaagcgacacactccagctacttacccaatcacagagtttactctaagccatttgattggttgtttctacagccttttagctcattgccaaaatttagtaagtcgatgttggtgatgaatcgtaacaatggcattttgtgtgataggatcatatcatatgcatgattttttttcatctgtgttagattacatccccactgattaaatttactcatgagtgatcaattctggttggtagtctgctagggtggtacagacagaatttgtaatcatttgcaaaatcctgaaattattctttcgatattaaatttgtttgcttaattttgtaatacaacaatacaatgcgaaacatgtaaatctattcattgagtcttaagcaacagcaatttctgcaggggagctttgccatgctaccttttccatcagcacttcattgatgtaaaacactcattatgagtagatacttatttcattgactgtaattatgaaaagtttctgagcatttaccaagttgaaagtgtgaaattggaaggccatctagtctatattgctgcttcagttttgagctgcttgctctcctccattttgaaagtgcatctatgcccccgtagtgggttatggatgattagtgacaattgaatcaaggggcaaggggctaagggtgtgttaaggtgttagacatgtctttagaccaaagattctcaaaggaaggatagttgatgacccctggaaagattagaaaagaaacaacaagactaaggatgattctatggttttgtgatccatgatcacattgcgtccttggaatgccgtactaaaaagatgggaactagtcaacgactgaggaaaagataagttgccaagtgctcaaggaaaatctttttccatcttcatctttcttccctgttgagtttcagtactactgactgactccctcccggtactatcgacttgatctagagaactgatcccagtgctgagtatcggtttggaagtttcaaatgggaactgcctggtacctctgaaaagggtcggtggcatttgctagcagtttggcacctcagagttttaatctcccagaaacccagagcctccaaacacaaacagaggctctgtaagctttcggtaccaccaattgatttcggttcagtactaccgaagttagcctgatgctacgtagttaagttctgatgtcatccggtacctccgagtcaggacttggtccctgtccaagtttgcctgtttcttcagatacgtttgacagtttgagttggaacagctaagcggagcaggttgctctctgttgtggttcggtacacctgagcaaaccctagttccaggacagagactggcttttgatagttggtacctctgaatgaattccagtaagtacctccggttgctgattttgaacaagctgttcttttcattattgaactacccgttgtttcaaacttcggtactactgacatgagttcgttcggtagtaccgaaggtcgatttcactgtgcaacggctagaattttggagacctccccacttcttggggcgagtagttcttccatttcttgtatcatctttctgcttcacaagtgagctctcttttgttcttttgagatttgatctttagggagagattcttggagatttgggttggattatcctggaccactcaataagggatttatggagaaggcaggaagtttgtttaggcttggagattgcctcaaaatccaccatgagtgattgggcattgttttggtgacctagttcaaggagataaggtgacgattttgcgtccccgtaggtcttcttgaccaagcctctcaaaaggagacgtaggatcacaccaacgattcaaactctaggaaaaatccttgtctattaactttctatacttctggcacctatattcttgtaagttgtttctgctgagtagaattgcacataggttatttgtcgatctactttgtctttcacattacttgtatgctgcatacacattttggtttctcttccactccctttcaacagtgaaaagtgaccattactgtattgcagaca

SEQ ID NO: 2107 - DNA, 792 bp, Brachypodium distachyon
  Intron number 20 from transcript Bradi2g00630.1 (locus Bra di2g00630) derived from phytozome v7.0 (chr-ID Bd2; pos 29 9127 to 299918)
gtttcaaacgaggttggtatatatataatctagcatgtcttgttacctttctgccaaatgttggtcttaattatatagcttttttctgcaattccatgatcttatgttatggcttatgattttaatatgtgaacatccatttttctacggacaattgttatctatgataaaataaatcaactaacggagtcctcaacctgagtcattaaaaaccttacaatcacagtaaatcaagatattgccgaccaaggacagtgggatgggatcaagtgtgtacttatataaggtggaatttatactaaagatcttttccccctccccttgcatttttttgaagcaatcatttttagggcactcacattttttgtctggttatctgtgaactcggtcaatcttttggtagatatttccacgtcaactttgatgaaccttttctgcttgcctagacttctttatatagtcaatttccatgattatttttgtttagtggttcaaactactgaatatattcaacgtgccagagtaaggattctgagaactttaattttttttaaatcgccctctctagtttcttgaaaaccccataaatcattggtaatagctggccagattcgttcattactcatagtactgagtaaatcggagttaatatgctgactaggagctggctgcaaaattgtttttgaatccttgttgactattgatccatactagaggttacaacttacaactgctacatatgttctcactattgcagaaccaggacactttattagacttggtgactaaagg

SEQ ID NO: 2108 - DNA, 5298 bp, Brachypodium distachyon
  Intron number 6 from transcript Bradi5g09460.2 (locus Brad i5g09460) derived from phytozome v7.0 (chr-ID Bd5; pos 127 17913 to 12723210 reverse strand)
gttgctacttatcgttaccttatatttgccatggatgttctctgttaggcaaaaaaggcacaacagatttcatgcttgtatggttgtgaaatgtggcgaaaaaaatctatttcgttgttttttaacgtggcctgattggattgttggttgatgtcgaaggcgaaagtacgagctgaatgggggcagctatatacaagcgaaggagatgactacggtgcaaccactggccgctttatggatgggaatgggttcaaggagacccagtgggccattagccaacctaaaagtcctaatgaaagaccaaaatcacctgtacgattagttacaaaagctttttgacaagcgctcgctgccattggtcgtgtaaaccaaaagcctatgcctatggtcgtgtaaaccaaaagcctatgcctatcaataaatacgaacacattctaaaaaaaaattgtatcaaattggaactagtaaccaatccataccgtgatttgattgatggttggtgtcttgtatcggacgagaatcggacatgagtccgtcgtacatatagcattactccttgaacaagcacatggcattctcttttgatgactagagaaagcaatatgttgtggtgtagcaaaatcaatcaattgagccaagttatcgaggcaaacatggcaacgagatgctatggttcatgactgtttctcatgtagtctcaaggatagcaaaatttctagcagctagtattttcagtacaaaacgtgcattcggagttctccagagcttgtgtcgatgttgattcacattaagaatcttgatttgtgcatttggggtttataatttcctagtttgttgatttttttgcgaacttaatccacgtcgaatgtaatctttgttattatccagagtttgttggattggcttcgaaaataatcactatcattttggttttagagattaatctaccactttcaattgtacctacaatgcacatttgcccggtaagtccatagagttgaagataaatggatgtgtcttggattcagcaaatggccttgtgggccatcagggccaggcccaattcaacttgttctagcggtggtagtggtctacatcgatgtaatctttattatgttttaggcgtgtatatttttgtttaggagacacggtgcataggcaaacacgcgcacacatacacacactcaccctatgaacttatgcccgcacgttactagagattgagccgataaatcttgaaattgataaggtcaacacatcagtaaataaatgtgtctttttcaggagaaaaaaaaccctacgtgccattgttgtagttctggagttgtaggactaggtttaaatttgcgcattcgggtcgctacaccaacgcgaagctaaatttaatcgtgtgggttcgttggtcaatccgcagcttccatactgctaagaaaaccgtttagattacaaccccgaactccactttggattaagttagccccctaaacaatggaaaccatttaaattacacccctaatcaggttttgactgatctaactctggtttaggtttgttctcaaaccatttgcccgaatgagctgaaatttcccagaaaactaattatatagttttttattttctgtatatttttagatacttctgtgcactttcaatattcggtccaaagttgaaattcaaacttaatatgttgtttatttttgaaccatttgtccaaatgagctgaaaatttctcagaatagtaagcataccatttatggttgtatgtaatttttttcaattttttcggggaactttcatcagtcaaaagggtgcaatctaaatggttttcatagtttattagggagtaacttaaaccacggtggagctgcaggttgtaatctaaacttttgcatgtttttgacggggtaatctggacttatctctctgacctatttgcagtttgttggacgtcaaaggccgacgtcaaaagatcattctctgaaaaaaggcaacgacaacgtgaatgaactagaatagccgttttgcgcacatggatccacactactgcagaataggtcatagtggcggacaaaaatcgcccttgtagtgcataactagccgtttactgtcaaagccaagagattagattactttgttccgtcgaaactacacggctctcttacgctaatggcgtcactctttcgtttccggaactcatgcacggccgctgtatcaccacgtagctagctctagctgtatcggtgccgaatctgcctctctgaatcagccaacggaaaagtgcaacctcattcacgctgtacaatctctaagcttccaccaaggcatgcaccaaaacatctccccacccgcatcacaaatcgccaccacgcgaatctcttactacctcggaaatcgatcattgcctccacttcacatcgccgagaccacaaatatgttgtagcgacagtttgcgtcaccttggagctggaagccatttccttcccacatgcacatgccagtatgccactatatcgccgtctgcccgtctttgcatgctgcatgcaagttggggctcctctgtgcgcgccatctcccgaaaggtggatcttggccggaggcatgcgttcgggtcgagcgagccgctgtcggtgtcagtggtttgcttcatagacagtgactcgatcgtgtctcacttcacttgcttggtttggtctgtccgtcccctctcggcctgcgaccttggtttggcatgctccatatattgctccggccatttctattggtgccgatccacatgcatccgtgcacgcattgaggttagccaccgcatgttaccgcccggagtccccttgccaaatgccatataccaaaggaaggataaggctaccgcagctggttcgcagcctatacgtaccgcgtgctgcatggtttcctcttgcaagtaattaaaggctgtgagccgtgaggacgtcgtgaatcctaagaaggatgcaagctagagtggacgtgacgggaccggtctagttagtgcaccgtggcctaggtttctgaggccctcttgcatgaacatgagtagatcacatcacatcatatcgcatccaggggaccgattcgtggacggatctcatgatttcttcgtgtggatcgatcggtgtgttgctgctttggtcactactgtatgtagtggccattagataaagtggcaggatcagatatgcagataccatctccgcactcttgtcaaatgggcaccgtctccagatgtacggtaacgagaatactggagaggtaaagttcagtgatggccaaatacgtacgtacgtagcattgtcaatccagacggcgagtttcatgcatattgatgtctgtccacttcgatcttgtcttgtccgccatgtgtattgacaaaacagagtcttgtttcgataaactcttcaattattttttgcaatacaattatcttaaagcaagacatatgagtttgggttaattggatctataccaccatctattccaccggttggagatatgccattataaaattttgacttgaacaaatgccactctaactttcttttacttctatcaatgtcattttgtccacttaagaccaataactgtttataaaatacatttatttcaacgtgtacagcagtatttatcataatacccctatttacaacgttcaacaatacgtttgagtcttccaggcaccataaaggttcaaaaaattctatgcctatgtctatacgtatttagacagtataagttcagcagtagagttggggacgggatattaggagcgcgtgggggataagaggattagaactgtttgacttgcgatggggaaaaaaactgtccgtatagaactatttctatacgtatttagacaatatatgtgctggtattggacaaaagagcactgatagaggtataagaaagttagagtggcattttttcaagtcaagtttttgtaatgacatatctccaactggtggaatagagagtggcatggatccaattaaccctatgagtttttgctttttgcaacggtacacttagagctgcaaatttttgaccctccgggtacccgctgaccctaactagttcaaccgaatgaactaaaattttgaagtgacacaactttttggaaaactaattcatttgtttgaactaaggagggtcaaaggataccctgagggtcaaaattttgcagctctaggtacactcatattgcacaaaaagagatcttatagcaaaatagacaattctgttcagggccagtgtgctcgtttaaaaagtttcaaacacacaaccatatcagatacatttctagtacaattaccccctctattcataaatataagatattatggctttgtcctgagtaaaccttcttaaaactgatcaagtttataaaaaatctaccaacatatacaactccaaattagttttattaaatacttcgtgatatatatcttcgatcatagtatacttatacaagaaaggcaaatatgaagacatgaatctgacccggacttctatgcaagaaaaactcgatcatcctctgacgttttattcattcatatttaatttcctgatgttttgctaccagtgtagtacacatttggttgtgcgtatcattttgatgcagaggctacgggtttcaacctctttttcgaataaaaaaatactcagtacacatactcctggcagagaaaaatcctaacagaccagaccatcaatttccttctctaacaaccatgcatatttctggccccatgcagctagccttgtaattaaactacagtaataagctacgtagccagttaaggctcgaaatactcctactcctggatcggactgcgctgctatatcttcgttcatcttgggggtcttcatctcccatgcgcgcaggttggtgaccttgatgtccgactcgccgttgttgaacacgaagaggtgcgtgtcgtcgccgatggcctgcctcgggtagaccgcatccgtcgcatcactttactcttccttcgtgttctactacgacatttgaacatgaaaaaccaaaaatctacccaagtccaaaccgaattctgctccgtcagtccgaaatgcgaattttcccttctaagattagtttgtgaaggaagtgcctcataagggctttggatttaattcacaaaacggtagatttacatgagaaggattttttttttcagaaaatagtctttgccgggcgcttcccatcatgcctccggcaaaggtctctttgccggcggtcttttaccgggggcctccggcaaaggattcttttttttttcc

SEQ ID NO: 2109 - DNA, 5108 bp, Brachypodium distachyon
  Intron number 1 from transcript Bradi1g10050.1 (locus Brad i1g10050) derived from phytozome v7.0 (chr-ID Bd1; pos 723 9390 to 7244497)
caacggcagatcgctgcgcaatatcctttcctccggtaaagaaaacagccgccggccggccatcgttcctccatgatttcctctcttggtcattgatcttacattttctttcttgctcctctctttcttgttgcgcatagtagtcccatagaagtgtggaacattcttggcacaatttccttaattttatttctattgttttctcctgcgtcttatgattgtgcatgcatgtgcaaaactgtgcgcacgaatggttgtctggtgttcttgatgttctaatggtcggagcattcctcataaaggtttttttgccccccaaaagattcttccctgcggccgcttgcttctcctggcggagcatacgtgggattcttctacctgggggacatccatggatcttttcttctcttggaaaggaattgtcctctgctctactcacatcagtgctcagcagctccggttattcacacctcctcctcatcccaatgtctcccaggaatcaccaaccgtacactatgatgattacttctgctaatgagccgcacgaattaagatcgccattctagtctatttcacacactttttaattcttgcaatctataatatactctcctcttggaatacatatcgattccctttcgggaagaacatgtgcatgtgaccccgagtggttcttgcttcggccatcttttccccatgatggaaaccagcctttctccttccttcggtccttccttcgtctctagggttttggggaagaggacaggccgcactgttcaacccaacagtgcaaggccgaggagtctcactgccgtatgtcagtggagcaagtacacacacatgtagagagaggggggagagagagaggctcatctcatctcatcccccatctgtcacgcaaagccagaacacaacattcttgtcatctttctccccccttcaagaaatgtatgcagctacctcttgtcctagaatctctggtgcctggggcggggtgtggtctgatcgatcttccagatgtgcatgtagatgcatgcatgcaaggggtcagagagaggtgttcttagtctttgctaattttaatatgcacacatcaggtgtgccgagatgacgatgcatgccaggggcctttctaatgacctatcacgaggctatagtaactagtactaccacacagttgttcagaaattttactcaggccagggctggctgcactactggtgctagcagtgctaccatcttccatgccacacgatgacagggatgaagctagctagctgccatctgatgtggtagatcaatagtgccttaagatttactatatgaacacctcacagttcttcagcccattcctttggtaaattgaactaattaatatatggaatgatattttcagttatagtatgcgtaggtagacagacgagtaaatagcatatgtggtttggcttagttctttgtgtgtttctgagtcttctgaccagcagtggcatggcatggacagcagactggtctgtgtgtgtgtgcctcgagaaccatagaaacagttaagccagtgcactggcaccattatttgatgtgagatctccagcattgcttgtgtgatctccttgccaatattatatgcatgcaagttattatccgtagagtatagtatatatagctagactggccggacatgttgctgtattttgtgacagccttctctctgttctctctcataaataatggcggtcatgaaacattggatgcttcccgaggcaagtcctaagttcaaccccgactgcatttttcagacgtcaactcatatttcttctcgagttcaattgttctttgtcctatatataccaagttggtagacaatacgtctctacaggtgttctcctctacatgtcttttatgttttctcaacagaagaaatatgaatttgtttgcctgccttatctcacaagtttaactgaaatctcactaaaacaagggcaagatgccatcctaattaagctactatatctcctgttaataggagctaaaaatatagagcgaagttaatcagaaaacaacaatactttttcctgattgatgttgcacctgtactccaagattcttggttgcatgcattctttcaaggccatgcaaaagcaggggacacagatatcacgagtttccgtttgtcttgaggtaaggccaaaagagatactgaaacttgcttggtagtaaaaagcaaccaaaagaaaacaaaaggataaagagctgactgattttgcattggaacgtcactggaaaagacaatgcaactgggaaaaaaacgtgcatgacttgacgatttgatactttcacctgcatgtcattaacagattgttcatccatcctgtgattcgtaggtgacaactgacaagcagattctcctttgggtgttttgtgtttattatttgggtaacacactaatgccaggcgaataaagccataatattttgcttgtgtccatggttgatgacattacagcatgcaataccatgtccaagttctgtaaacagtgccacgtctagtccattattatgttttattcgacaatgcatgcaaactgtctgttgctgcctgttttcttcaaaaagctgggttgtgtgcaataacaagtttatgatatacatcagtggcatggtttgagggcgtggttttgcctaccgatattccacatagactacttatatatattgttgatctggtgggtaatcgttggagggatatatatacatagtcactagttataaatgattttcagggagttggcggtggttttaagacatacattttatagataaaataactcctaacacattgacacaaaattaaactatccttcttatgcaaatctgttaattaataaatactggtgatttttatggtgccttagaatcttatttgtagaagtgtgaatctatggttcatgaaacgaaaaaaaattgcacaaatcctaaggctacttgatttagcaagggctttatattttttgaaaaagttgcagatgattcttcagtttctttttacactggttatgtctttttcataagtcatgtatctaaactttctaacgagtctaggtgactaggtcagtaccatgccataagacattgactacctctgaacttgtacagatgcaaaataaagcttacatagaacaagtgataccccacatataaacataaccaaattctgtaaaaaaatgagaacatcggcaacaacttacaatttgccggatcatcataaggtatactcgtgttactgttaaatgtatggagtatttataataatatatgttgtaaaattacatttaagatgaaatattttttgatggcaaatctacaaactattctggacatatgaaatcaaggttgggaactactccctccgatcctaaattcttgttgttgttttagttcaaatttgcaccaaaacaacgacaagaatttaggattggtgggagcagtatgcggcctaccctttataggtgggttataacatgcgaatcggacaatctttatcgagaattcgttacgaaagaatcaagaaacattgataatatttacaaaacttgcatctaccattgcacaaaatttgaaatccatatttgatgcatcttcaaaatataaaacagtagaattccgttatgaatactaaaaaattacactgttcacaatacagctattatacccagctgattttttctttttcttttgtttctcaatttacggatctagtatggatttgaaactatgtgggaggtcgattcatatcgtgtgaacgttactaaaattagttcatcgtattttattttcctttttttggatctccatgcggaaggtgttgcaagcaagcacctaaaaaaggtgaggtctgagttaattcccttcagagattgaccacacaattaaataagtttcaccgtaacgccaattgtctagagatgtaagtgggtttggttgagccgacctattgatgcaaccttctccatctgcttggcaaaaaatcagtgacatgtatagacagtgaaccaccaattaagttaattggaagtggtttctcaaccaagaaacctcattgggggtgtccacttgcatctctaaacatgagacctatatttagttaagtaatagatgattgagtagcaaaagcttaaggccactattgaacataatgttgaatttaagtagaaattaactttgtttgcaaggaaatgtcaactctcattcgacatgtctcttacaaatgtttgtggaaatccacatgatgcttgatggttaaaatgttcattcagatttgttgaattgttctcaactttgtcctaaacaattaaaaagttggaaagaaaatttaaatcttttacttaattagtcattatagcttgtaatggggtcaccattcagcccttatacatggcactttaaaatgtttttcacaaaaaactagatttactagctaaatgcccggtgtattgctacatgacaacacattctgccaaaattatactattgagcttatatgaccttgatatcatccttgacttcattttctgaataaaaaatagatgaagtccttatgcttagagattaattctcaccataccttcctatatcagcacgtaaatacaaacacatgaccaacttatttatagacagattatgatctatcatacacaataagcttaacattgtaaacttcgtgggtggtatactttccagcatgttacttgataagtacccaaaactgaactcctgcagattagtccctgttatttcagttttcacttgtgcactagctagttcatgtttccctgattccatgatggcattctctcttttattagaactgttattttttttatctattgggtctagttaattattcttgtctaatctcatgagcaactgtaattctgtaccagcttagtgtacctagaatcttaatcctatctagctttgtgatgattctacatcctatctattgtataatatttactaacacatcatatctcttgtataacatttactaacaaatccatttggtatgtgtacttttaaggctcttctgaagaagatcaagaaggcagcggagga

SEQ ID NO: 2110 - DNA, 4891 bp, Brachypodium distachyon
  Intron number 3 from transcript Bradi2g26590.1 (locus Brad i2g26590) derived from phytozome v7.0 (chr-ID Bd2; pos 252 71312 to 25276202)
cccaacggtacgcctccctcccccccaaatcccaatcccttctaaattttccaaccgcgtcaccatcgtaaagttaaatcgcccacaaatttcgccgtgcccccgttttacgctgcgacgtcgatttgttggttagttagggatgtcattgttctgctactaaatccgcatggccgggcgattgcggttggttttttccgttggaatttcgggatccgccgcgcgtcagcaagctagcggcggcttgttgcttaatatagcgaagaagaacacaaaaaaggcgtgtgaggtgtgagaattcgcgcgcctcgatcgagatccgtgcaaaccctggtcggataaatcattccccccaactcaactgcagttcctcctccgagtttattagccttggccgcagttaattactacttctcagaatcaccttttcacctctccggttttagtagcagtacccctgctacagtccagtccttactgggttggtagaatgcgatagatagattgcaagtgacgcatccgacgttccacgagccgatccgctcggtcagcgaaaacgaccgaccgaccgaccgaccgaccggggctgatgatcgaccgctgctcactcacttggcgacgacacgccgcacggttacacggtacacatgacacatccgagtctgtctgacacccctccggctgcgtgcggggccgtcggccacctgctcgcattactcctgctccggtccggtggcgagtgagttaacggccatgggccctcggaacagggaggcgggtgcgcttttctgttgggaagggaaagaaaaggaggcgccgcgaggaggaggaaggaggaaggaggaacgggaatcttgcggcgatgatgaggccgcccgagatgatggcggggattattattttacggggaacgggcaggcaaaaggcggcttttgcgaaagctagcgttaggaggggggaggaaaagcgggctcgctcttcacggacccgatcggcgcaccagatcgggtgctcccatcgccgtcgccgccgctcctagagtacttctgtcctgccgttttcgtgctccccgctccgtttccctttccgttttccttgcagacaatgtcaatgcgctccactgctgggattaacgacgctagtactaattcactgccagtgggttgggttagtctaattggggatgcagttaaagtgttgaatatagcagcaggagttcgatcacggccatcagggtacgcacgagttttgaaagcggctctggctctgcctggcttgatgagagcagagaattaagtgtactggatttataaaatctttggtcagatttgtacatcgactatttatagggaaggaaatacaaggggggctccacgaaggcgtagtgtgtacctacctccacgctcggcttcacaacccagttgtggttgggtgcacagcacagtcccaattaatctggccgaccccgtatcgcactaatgtgttccttcatttatagcccaataaaacccttgtactgtccggtacactcgtaggacacgcacagccaagatcttgggcctgctgtacaatctagactagtgctcctactggagcagtagatggtaaattactattgcagcagcacgttacctgtgcagagcgtaatgctagtaaattagcagcagcgtgtctgcaaacagaattggagatgctgcgtgccacatagaatatttctagttgctggtccgatggatcgggcacgcagatgcagggggggacgaggcgtgtctctgcaaaagtaatacccacctcgctgccgctgcttaacatgtcggaggccaaccgcgcgtactttcccatatcacagaaaataacagcttggctcggttggtgcttgtgtttctaaatcagactaggcgttaaaaggtcactagctagcatatacaacatgtgcaaggggcactggtggtgattcgagttcgtgtcgtaattttgttttttacacccatccacgtgcgccttttaaatagccgtcccagttttaggaccccagtttttaggccttcctgtcctttagcgatgaagttgagaagcatgcggcacgaggagggtacagcaaggtcattttcttcttctacattttcatcgccgcctcccacgaaacaggctggaatccgcctagctaattgtggaagcaactgcgacgacagcctcatgcgtgctagatgggtggaaggaagagcacggaaagataaacccctacgtttcttttccctaatctatgaccaagagccgttgcatctatcgctgattttgttggattccactggagaagatagtgggggcatgcacggtatcatttactagcatatggcgacgatgatatgttgtccatgccctgagcctgacagtggtcttaggcagctgcagggagggaacagtaccatggccggatatgcacgacacgcatcgaaatgttggtgataagagaggattatggattgtggcatttgactaggacatgtagggactcagaggcgccggccggccatggaagctgacttgctgtgcctacgccgcccatagtgctaaggctcgtgtcctaatcagccgctccatccagtggattagttggtgctggctgcagatagacagcatgctcgaccggctagtctgatactcggacggacattggcaggtatgccgttgctgtcaatggagccaaaagcaccaagaaacattttcctttcccttttcttaacatgcctgcctgaattgtgatgtgtgcgagcgatggtgggagggggagggtgaccaacgtggctaagcttgttgggacccatgcgatgtgagagagaggaaaggaaaaagaaagcaagggcggttagttaaaaaccagatcacctacccaaacggcttcgtgctgcatcatccttcctcgctaatcgcccccatggccttttcggccaaggatggttggacgagtgggtgatgatgtctctgtactcttcactctacattcccccgcgtcacctcgcgtacttaggtgtgggccaaattttcctttgtttgctttgctggctggctggctggcgtgtgggtctcggcctagtatatggacgactgtcaagtgttaccggttgctgcaacacgatgcatcccgcattgctttgctttctagggtagcactgcggtgcagatcgacagccaattgtagagcccggataaccccgttttcttttatattaccaaaacaagtgtagcatgcaacatgagcttgccggaacgtatagtaattaatggtaagtataataataagatggaccgacgatttagctgaaaatttagttctgctgctgtcgacagaacctgttcatggagtttggtgtttttattatcgactgaacctgttcatggagttttttagtgtttgtaatgaaagcactgcacgattgtagtgttgaacataaaaaagctcgatggttggtaacagatccgagctaaaaagaaaagaaatgcaagtagtactaagtactaacccatacagataatgcgagtctattatattcggctaaagtaaaacacaaagttgattaaaagaaagcttatgaaggtgggagaaaaatggtgttgatttaataattgtgagccccgaggcaaaaggctccagattgaccaaaggccgtggaactctttaatgaaaggatgtgaggacttgttgctacgacagaaagctcacaaagaagtcgtaaaaagggaaagtggacatgggagggggtgtgcctagagactgtagtagaggggtaataatgatggatttacgacgaaactgcagttgcgcttattatgccacttgtgtcggtggatttgcgtcggcacagcttggtggacgccgaggttggatctcaagttctcagcaacgtttatctctggcaaggaaccaaccactttctcttactcctatgttagtactagtactggcgtacgtttagtctctgaaatgcattgaaaatcatgcaagtactgtcacgagtctcttgcgcaggtggtgtttctatactctctacggtaggtaaattagatgctcggttgacttactgtgctcagtgatcagcatccaaaatggagtaagtactatagctgcctacgggcttggatcttgtagcgctgacctaaaaaagggtctcctctgctgcattgggtgattacgcccactttcaaggcgcatttgtaggtcgtcgatggttggccggccaaaattccgtcttggcgtcgcagtactctcactttgggttgccgatggttggctcttggtccagtggatggaaatggaataaccccgtcgtgccggaggctaccaccaaggcacgcaaaggcgtcttcggcagcggggcgcgagctgtccgttttgtccccgtttaataaaggcccaaggagccagtcaatctcggggtgcgacgcatggatggaccatgtcatagctggatctcgccggatagaaaggggttgttgctgtttccgtttccctttggacgccgtgattttagcatagctttggtagctcgggtagggtgtcatcctagactgatgattgctggtttccggcccaattggctgctaatttgtgtgtcatcaccatcctatacactccaactagctaggttgctctgggcagccgaagtactatctctactttgttaatggaaactaatgcaagaacacagtttattaatgaatattaatctctgaaactaatttccaacttctaaagtttagctataatcagcatacttcacattttcttgcttatgagcacatccattgtaaacgaatgcaagtgctcaactctaataagtttgtacgcacgctcgcaggcaagagcatcaaggacttccaggcactcctccac

SEQ ID NO: 2111 - DNA, 1384 bp, Brachypodium distachyon
  Intron number 1 from transcript Bradi3g44910.1 (locus Brad i3g44910) derived from phytozome v7.0 (chr-ID Bd3; pos 468 54535 to 46855918)
cggagttctgctgctcctctccatcctgctgacaggtgagtttcatcaatctgcatccacaatcccataagacgaagctatatctctctccgtgccaatacgtacagttcgcgcgcctgttgccaaattctaggaagggtatatggttatccatttgcctgttactccttcgtgcggtaccttttgcatcgccaatcctggagttctaactgcgagcgtctcgtccctttggcttcttcactgcgagccttggttgatttattactccctccgtcctccgattctagattcttgttgttgttttagttcaaagacaagaatttaggtcggagggagtacttgtgttccctatttacaatgcttacgaagagcatttcatcaggagctatttcaaagttgtgccagtttgtgatcagtggttgcatttgctggtatcatcttatattaactagtagtagttgcatttgctggaatcatcttacattaataagcaggtgcatctgctcagattgaccttatctaggtgttggtgtttttggctaatactcagcagatagcattattcctcatctaggtcctccatggcgcgtaaggaagacactgcccactgtagcgacaaaactgaacgaacgtatcaacttttaatgatacgctgaacttttgcgcattttagaaattaaatcatatcaacttttagtggttctttgcaaaccgaaaaagcccatgttggcctctgatccgctccattgttttctctccattttcgcgcatctgatctgattctgagcagtggttgctttgtccacaaagtttctctggaaagacattttctctatcatttcttattccagtctgcagctaattaaaaattcatttttttgcgggtaagctaattaaaatttcgtgtgctgcaacttggcaatatcgaaattaaaggactcgccggcagtcgaccttgtagcggaataattggattgttttattttattattagttcatggtgggacgcctcagtggctcagacatcacttgcccatgtggtccagtgagatcctgcttccgttggatcacgcgctcgttcatctcaatatgatgatacgaatctaactgtacgtctcgtcgaaaaaatgcaactggatgcttgtattctactgcccatattacttttctcttgtcccgatcgtgttgcactgatgaactaaactacgagttcgtgccggcaagcggctacacacttgctgactgcccactcttgcgatgcttcgtgacaatcaaatcatcaacaaaatgcaacagaagcatgaatttgacatcatactaatgggaggtacacaaaattcaatctgcagagcaggtggtggtgtgctcggccctgtccatcggc

SEQ ID NO: 2112 - DNA, 2082 bp, Brachypodium distachyon
  Intron number 2 from transcript Bradi1g01720.1 (locus Brad i1g01720) derived from phytozome v7.0 (chr-ID Bd1; pos 114 0922 to 1143003 reverse strand)
ctggaggacgcacctgctcgaggcctcccttattggttagttcgttgtcttcttcgttcaattactcttcaccatcgaatgtctctagttcttaatttcttggtgacatagtgctagctagcaactgattagcattggtggttgctatgaattcttggactgtaaagtccccaagtgctggtggtgattactgcttagctggtgaaggagggactttggaggaggaaagtgtaatttaagatgcttttgcctttaatcaagtacagaaaagtgttagtaataccaatttgccctttagaatatgctatatatatctagtatcaggatctcttccccatcaggactgcggcctaaggtcgggatccaattgctaatttacagttcactatggaagtattcctatataattagaagcaagatttggggataaatgtgccatttcagatgcttttctcgtaaaagagcagtcacgggtgttataatactaccaatctgtatagtatttgattcttcttgctgcgcgaaccgaaatatactcttgacatccagttggtagtttgtagttccattaaaaattacagcgtgtaatttgtgcaatttaattcaaaccttaaatctagtgcaaagcttcagtctgattttatcatgaagaatacaccgttattttaatttttttgttagtagcattagtcttccatgtggtgttcctggtggtcaactggtccagatcatgtggtattgtggtgtatctggtagtcaactggtcagaaatagtagaggtctgcgttggataaaataagaactgatattgcttaggcttgcagtagaattatgttgcgctcttcttccctgggtctaacagatctcctttgaccaagtacatgttatattaatgaacacatgtccaactattagcaaggattggaaaattatatggtaaatgttttaactactgaggtatgcaagaagggagatgtataacaatgcaagcctctaaatatttcaatgaactacactgcatgttctggtttttgttatgcaagacttccgtctgctgctcctggtgatttaacatttgagtatggtttaagtcttgagaataactgatcttagtggaagaagttaagttttatggtaataaaccttaaagtggtaggttagaataactgaataagtaatggacaggatctagtatgtaaaattttgatggccaaactgtcttactgaagcatacttaggattccatatgaaggtttaaaccaagtcacagcttgaaaacaaggtacattttagttttacctaaaataacttaccttttactgtagtaattgtagtactgtttgcttttacttggtctttgttaccagagtactattcttgggttagaacttggaagttagaaatcttgcctacagcttgggaatcgtaatttacaagccagcacattgcagttaagaaaaatcagagataattgagtttgattttcatggataactgaattgggatttagggcctatttaaaactgaatctgctgcagtcgcagtactaactacggtataatgtactactccctctgatcctaaattcttgactcaagtttgctcaaatatggatgtatctattcttaaaaagtgtctatatacatgtaatatttcgacaacaatttaggatcggagggagtaggagtatattttatggtgcacccatttggacttggtatacaggtctatacagcggaggatttgttgaatctgtagcatactgtatccagacaactacggaggggttgttggctgtttgaacatgatttagtgtagctattaactaatgaatcatgtaggcaccaataagtaatgatgacagcttgttctaagtgaaatggacgccattctgtttgaaagtttaagctgttagtccagtcttccatacttgaaatgttgaaagtagggctaaaaataaaacttgtcagttttagccatgtgtgtaatagtgttgtcttctttcaaatacatagtagagaactgattacgcattcactccttgcaggatacaccctattcctcgcatttgtcattgaccgg

SEQ ID NO: 2113 - DNA, 2886 bp, Brachypodium distachyon
  Intron number 4 from transcript Bradi5g00480.1 (locus Brad i5g00480) derived from phytozome v7.0 (chr-ID Bd5; pos 447 122 to 450007 reverse strand)
aaagtgagttcacggcttcatggatagtgtcaagcctctcttttaaagaactatctcatcaattacagtatccagtatgtgcatttatgtcctattcttatctctgttggtctttaccaaaaatgaatctcaatttaactttgatctgttgatttgagttgttagagaattgtacaatgtccttctccattgacatatgcaagccaatatcaagtggtcataaccaatgacacattaggacattgtttatgaacatgcaatacatcaagaactttaaatagtgactccacttttcaaagctttagtttgcaccgaagcacacgtacatagcttgacacaccaaactgtcacaccttactctgattaacacacttgctaggtgtgcatggctgccagctctttaaaacagtccactgattgctgcaaattgaaaatattacaattaattatctctagctcgtattaaacatatcctcatgtttatctttctgtactcccagctctggcaatgacctgatggatgtggatgtagggactacatcaaatgatcaggatgtttcttcgcagaggttactacacttgcgaagctcgcaaattttgattcttgtatgcagctgatttattatttattacttttgtttcttgcgtttctttgtgatttcataatgtacaaaattgaagtttttggagctattcttggtcaacatgtgagcaaaccatatcgatcaaatttctcaattgatgacattgagcagacaattaatagagaagcagctgcaccgtacattagaggccaagtagatttctctaggtcatttctcaatgtaacatcaatatgtagtatccttgtgtgcttgagtacatacttggcaacataccatttgtaggcgaaagtagatacccaatgttttgtgttcatatcttttgcattcatgcctagcaagaaaatatttaaatgagattgacgaactgttggagaaagatgagatgaaatggcatcagagatcaagagttgactggtttcaagctggcgaccgaaatacggcgttcttccacaggaaaggctcgtggagggtgaaaaagaatagcatcgtgaaactccataaggaagatggcacgcttacggataatcaggctgaaattgagaatatggccacggactacttccaggccctattcactaaggatgcttctgttcagcctgctcctctcattgattgcatcgaagctgttgatgccgaaatgaaccatgacctgtgcaagatgttcaccgatgaagaaattagtgatgccctgttctagattggtcatcttaaagcgccgggcccggacggatttccggcacgtttcttccagtgacgttgggcgacggtgaagcatagtatccttgctgctgtgaagaaattctttagactggatccatgccgatgggcgtgaatgacatggtgattgtcctgattctgaaaattaaaaaccccactcgtctcagggatttccggcctatcagcgtttgcaatgtgatctacaaggtggtggccaaatgtcttgttaatcgcttgcagcctattctgaatgagttgattgccggggcccaaagtgtcttcatccccggcaggatgatcacggacaatgccatcatcgcctttgagtgcttccacgcaatccaacacagtacggcgaatggggacttctgtgcttacaaacttgatctggcagaggcttatgaacgtgtcgattggggttttttggaagcggctttatggaaattcggttttcaggagagatggatttcttggattatgacttgcgtctcctcggtcaggtactcggttaaagttaatggccatctcctggatccttttgttctgaccagagggcttaggcagggagatctgctctctccctccctgttccttttcgtcgcggatggtctctcttcactgatcacaaggcgcattgaggatgcttccctgcgagacttcaggatcacccgacggagccctggtatctctcacctcctctttgctgatgatagccttttatttttccaatgtaatacacagcaggcccttgtgatcagagatattctggcatcgtatgagaactgcactggccaattacttagcccgggcaaatgctctattttgattggcaagcaagtgccccaagctgatggtgacgctgtggctgccattctgggtgtgactaacactacctttgatgagaaatatttgggcctccctgtctcggacggtgcaatgaaaaatggccgcttccagactatcaaggagaaggcagggaagagactcgacgactggtccgagaaatatctctcggccggtggaaaggagatcctaattaaatcggtcatccaatctctgccaacgtttactatgagtgttttcaaattcaccaaaggtctgtgtgaggatttggagcatattacacataatttttggtggggcgacaacataataggaggaaggtgcactggcttgcctgggacaagctaatcagaccgaaatcaaaaggcggcatgggattcaaggacatggcaattttcaatcaggctcttctagcaaaacaggccttgagactcgtggagaaaccagacagtctttgtgcccgcttcatcaaggcgaagtactaccccaatggcaatctgctggatacggcgtttatcagatcgtcgtctccggtttggcaagggatcaagcacggtctggagctgctaaagagtgggtacatatggcggctcggaaatgggaagtcagtggacatttggagacacaattggctgcctcgtgggaatcttcgcgtgtcgggcaaagctgcgcctaccaggattcgccgtgtttctgatctccttatgccgggccagcgcga

SEQ ID NO: 2114 - DNA, 1525 bp, Brachypodium distachyon
  Intron number 1 from transcript Bradi1g45350.1 (locus Brad i1g45350) derived from phytozome v7.0 (chr-ID Bd1; pos 435 66912 to 43568436)
cttagccagaagactgaaaagtaagcttgttccggggatgtaaagaagactgttggacaacaaaggaaagcgttgaggttttccattgccttaaatcctaattcattctggcatggactaaaatttgctacgaattaacatgttgataattccttacagaaagttctgttcctgatatgattctcaccacatgttttgtgatcaaggtttttttacaggttcagttatgaaagttgaaaacagtaatgagtaaaacatgtagcatgtgtagctgttttcaccgccatgaatttttgcaaaatgtctcctgctatgctgttataatttcggagttcctgatttaagagtttagaccatcttttcggaagttcaccgcagttgtgcattgttgcaatttttttagtttctctcgcatttaatcttgtgaaatttattgtgtaaagtgctgttctgatgtgatgctaccctaaaattaacttggatatccagcagaaatgaatgtgtcgttgcatagttttgagtaaatttcatacttagttcaacttgccgcaccttttttattttttccacaaaaccacatcttcactgcaaattactaacacaagcccctaatgccatgtttgaccctattggctcttaataacaaatcatggatatgaaaaatctaacaaaataatggacaaggaccatcttctcacatgtgtgaatataccaatttgggcacaagctcatgaattttatgcataaacatgccctgtcttatcaaaaatatcattgcaaatgtttgacctcaaatttcaaacatgaaacggtgcaattttcttacggagtaacataagtcagattcacacatgggacaattacaagattgcagaataggaaacaaatggttttcatagcagctacttgtgggcgaagaagagtgtgactcctttttgtagcttctattttgatagtactcctccaaactctaggtttgtcttgctcctcggtttttcaaacataccgtgcatctttttgtgaactgcgaacaaaaaccatcagagatcatccatacagctacaaaccagatatatggctggagtaacggccatgctacctgcgggttgggtaccggcaagatacggatactgctgccgctggcacacacatccccattaccatgcatgaagcggagactgaagatgatgaccacatatatgtttctgaaggaccaggaactaggagaccacatcgccacagttagtctggccgcactagcaggccacagagcacaatttatataagggattttgtaaatttttatttctccaagagagattaataaagtttatgttccttaaacttttatttgtgtacttgcactggcacacccgcgcacttgcttatttatttttctctggtgcgaatgagagatacttcccctcatcgaagtgttttctcgtgtcaaacactcaggttgtcacttttacaaaggtactgcaaggaaaaatctcatttagttcaatgcctttgttccaggtct

SEQ ID NO: 2115 - DNA, 3772 bp, Brachypodium distachyon
  Intron number 15 from transcript Bradi1g59030.2 (locus Bra di1g59030) derived from phytozome v7.0 (chr-ID Bd1; pos 58 133726 to 58137497)
attgccgcggctttttgccaaatcaacgtcaggtatccctcctggaatctctgcagattccttatctctgttgcatctactgttgttcaaatgttcaacttatctgacatagtgagatgggttgttttttagatggatgattatggtgttgcattacgattccttcctcttgaattgttaacatttgctgcaatttaatgaggaacacatgcccacctacaattttctttggatgatggtttttaagagcttgatgccaaacaacgtaatatactagcacaatatgtgtgcttcgccgcactggcgagtgtggccttgaccactgtgttgtttagaacctcttcagaagtgactctgtatcaaatgtataatatcaagagaaagaggaccgtaagaaatatagggtctgtttggtttgagcccaaggttgccatgctaaatttttggccaccatccaaacatattcgtaaccttcaaattcgtctggacctatttgtaaactacaaaaatagcttctcggaattatattaataacaaacaaatcctttaaagtttccacttttcaagtctatcgatcatgtcacagaactgaacaacctgtaactaaacaacctatttctaaataacctagccaagcacgtaaattaatgaccaccaccctaccatctatatattggctgttctagttgaattgcagtaccggtttgctcaacactaaacatatgcaacctgagattctaacaacaaccaagttcttgaacattttagcctcaaccaacttaatgatttaaaatacaccacctggacaaatttgggtgcgtgcttatgtcaattgaataatctcataacaaaagcttgatggcatgtagcaaaatgccaaacataagcatacatacctctttcccacaacatgttgatctgacacagctagccaccgcctggatccacatcgacacaaaccttcaccttcacctttccacgctgcagaggagagaaagcagcagcgtttggatatggctatattgtggtagtcatcaagtgccgaaaaagcaaatttgattctttagcttggagtctccaaataaataaatatcacatgggcatatattagtgcataacttagttgcttagccagcatggattttgatacgcataacattggccctatctgtattgcttaccttcgacagtccaaatctctgtagacatattttgtatttagtaaagagaatcggcagatggtcacatgacgcaccatttgaaaaaaataaatcaaacagatcaaaatttataagatttctgtagaaattatatgaaaattaactctaaagaatattactgacacacatcaagggaagtgcgactgcaacatagtacactcattcgctgaaaagtgagcaagtaccagacatacgactaccaagcgaacatgtggagaagtagcccagtcaatggctacaacagtaaccagcagggcaagactgatgcttaaaatcaaatgaaggtaggaatcgctggtacgcaagagcagatcactggatgatgcactagaagacagcatctgcccaaaaacacaaaattcaacacaaacagagtcctgaaatgaggaagaggagtgataattatgctagtttgagcaccaccaccaattccaatactacccaatacaccttagatgtttccaatctgatcttgcgaacacaattagcttcctatttagtttttcaggaacacaactgcacaatactattacgccctcttcagtttattacgcccatctaaaaaatcacaagaaccaaggaggacacagttaagtgctagaccacgtatcaatgaacgcagcatgcatggccatctctctccttcatgcattggttggttccacattgagaaccaaaattagacatacattaatgttgggtgtaattactttttgcctatacccaaagaaaatgtgggctaacatgctaattttggatttttaagatgggcctaataaactgaaaaggagggagtagtttatggaagcctgtcattctattctattccaagcatgaagctagcttcctatttagtttctcaggagcacaattgcacagtagtctacagaagcctgccatgttattctattccgagcttgaagctgcagaaacttgaaacacttcatcaaccataagaaagattctacacaatgctaaacatcccatagataacagaagacacttgtcatcactaacaacattctttaaatagcatccacaaggttgtcctaaaagctagcaaatttaccaacccaatttgcataggagaaattaaatgatccgtgccatcagatcccaaatgctacaaaattaccaattcaattgttcagccagctgggggccaaactggacctaaatttcctccctcgcatcctcagatgccatagagcagcaccgaattcacttatctagcagccaaacggcaaggcagcctccagcagcagaggatgatgtggtgagatctctctcctttctcaccagatctggagagggaggggaggagaagaaggggaggggattttgtacctctaaaggtggtgcaggggtagtccagcgtcatggtggttgccggggatggattgcctggcatcgcagcagccgacatggaagcctgctgggaggtcggcctcaagcggcacgaggtggtggggtcagcgggaggcggtgctgagagtgcaggggaggacgaagaacgaccgggcactgagaagcggcgcgatcgctctcaccggtcggtggcgtggtggagggtgacacatcggtggaacagcatcggtagcggcagttgcagcttgaagtcctgaagagcagagagatgatgtcaagtaggtagggagaggatgcgagagttttccaccagcccaagactggctacctcactaaactgctggtccagcaccacgtgggacgcagtatcagtcagagggatgctagcctcagaaacaaacaaatctacctcaccaggcaaacgggtgatccagctggctcccatccaagttttgccggctggaaatgtgtctctctgggagggtctgaggaggtgggtacacatctcgccttgcaggtttgatctaagataacacagtggtattttgagtaactgcaatctgttgaccgtatagtgaagagataaaatccttttgatggtattttgcaaaagaggttatcttttattggtgcggagacaaaattttcttttctaatatatacaaggtatgggtggtgattgtacagaactaagtgcgtttttagaatgagctatttggttccttctttttaccgtgggtgattgaacaaagcactcttgttcacaatattggtgtgatataggtaaagcttgattatagaatacatatgcatagctattagctaatgcctgccttttactgatttcttacatgcatgccttattttaaattattttggggtttgcggatgttggctacggatgcacttgatgttcagggccctcttaggttgtctaccgatacactgtttactcttctttgtgctatttttcttttgtcatagtttaaatcttgaaagctttcaccaaagcgcgtcgcttcattgaagtgtggagtggtttcatatttgtgcacaccactgccatttcaggaatttccaagtgtaccaaatcctgatgccttgctttatcagtatcctattcaagtgttgtcattactgagtacctggtctaatgagactttattttccttttgtagtaccgc

SEQ ID NO: 2116 - DNA, 1546 bp, Brachypodium distachyon
  Intron number 1 from transcript Bradi1g72120.2 (locus Brad i1g72120) derived from phytozome v7.0 (chr-ID Bd1; pos 699 36509 to 69938054 reverse strand)
cctcgtccccgacctctgctcccacggcatctgaggtatagctgtgttaccttcctctgtttctttgcaataattagaagtgatttgttcagattttaatggtgtggacagtaggttttattctacgcaattgtatggatgatgatgaatatttgctatgtcatgtttgtttcattccgttgtgtgaaaataatttgaatcaccattttagccaaaagtttttcttaaagctcaactcatgcaaccaaactgacatatcttcaaagcttgatattattcaagagaagggagtactcagtttttggcagcactttttgggagaacgtgcaaaaatatgttctaatcagcaatacagtccttgattattcataaatggtccttgaagacaaaaaatctacatatgtatatgtaatggtgattcaagatcagcaacaacaacaaagactataacagaacgaaatggtaaaggaaattttgttgtcactctgagcaacaacagccgaaacataacttattcgtaatataatgtacagggaatgtcgtaaaggaaattttgttgtcactctgagcaacaacagcaaagactagaacaaaatttcctttaccataccgttctgttctagtctttgctgttgctgatcttgaatcaccattacatatacatatgtagattttttgtcttcaaggaccatttatgaataatcaaggactgtattgctgattagaacatattcacgttctcccaaaaaagtgctgccaaaaacttactcccttctcttgaataaaatcaagctttgaagatatgtcagtttggttgcatgagttgagctttaagaaaaacttttggctagaacggttcgtagctagttctgggatttttcttttgccatatagctagcttcaattttgtcctttcattgatgtgtatacagtgaggatcattaccagtttgctattttgtggaaaaaataagtccaaacagttgtatgagcttgctattgttatgccgtgatgaaaaatgtcactagtcatgcaatatttttaggactgataggtagtgtggaaacaatcgaagtccaggggcattttggacttttcctactaaaatcagacaactagccgaaattccaaaagccagatagaaggagacatgacagtttcagagggcttcttgtggtaacagcttctctgagaaattcagctaaagctggcttctagagaagctgcagccgaaaagaatggggcataggaagtttggaagttgaagccacagcctgcggagcatatggctgtattgtcttgttagcatggcagtttcaatgatgggtgggaattcaatgtgctataatgtataactgaagaatcaaatgattgttttagttatgcaattgttttttgtgccttctcatttttgttcttaatgttgtggtgcacaattccctaccatattctcaaaattataatgataacctgtcaccagacaagggttcacacattgcaacatgcataaccttctctttcttttgatgcagattgctcttgtgca

SEQ ID NO: 2117 - DNA, 384 bp, Brachypodium distachyon
  Intron number 4 from transcript Bradi2g02980.1 (locus Brad i2g02980) derived from phytozome v7.0 (chr-ID Bd2; pos 214 8850 to 2149233 reverse strand)
agtgtaagcaaacttgaaaagtgcatattaaagtttaaggataagttatatgtgtgttctcgtgagctgataaagaacaatatatattcaatatatatttttagaccagcaatatatatccagtatttaaggcatgcacaattcttaattcttgactacggagtatatgcttgatgacaaatcatattaaaacaaattcatacgagtgtaaacacaccagaatcatgcatattcaacttttaaagataaattacgtgacacgtgtggttgggaatcgatcataagaaagtccagactgtaacacatttgtaaggcacaactacaaatttgtacttctttaacctttttgatctgatattatttctttgctgtagattctcgact

SEQ ID NO: 2118 - DNA, 489 bp, Brachypodium distachyon
  Intron number 6 from transcript Bradi1g06530.1 (locus Brad i1g06530) derived from phytozome v7.0 (chr-ID Bd1; pos 439 5130 to 4395618)
ggtagtgaactttcaaaaacagtatgaaccttaacacttgttctaaatcaaatagtcttctagttccgattctatgttttgtatcctcagtgcattgacatgttcctttagtatggttaaatggttaattattctagtgtgaaatatgcatgatgcaacactgaaatcatggttatacctgatttctttggggcatgtctgatagttattgtgatcttattgggatattgtgatcttgtaacattcatattagtttctagcatatagattaccttgcggcagctaataatgatgtggatgtcaacaaaaactaattggttgttgtgaactgatgtactacttgtagctgtcagatagttttttccccctaggtgttcggatttcttaattctgcgggatctgaatttagcactttagtctcactaactcagtcgagatataacattacttgcaggtggccacctttatcgtccaaaagattctgcttga

SEQ ID NO: 2119 - DNA, 1177 bp, Brachypodium distachyon
  Intron number 2 from transcript Bradi2g19820.1 (locus Brad i2g19820) derived from phytozome v7.0 (chr-ID Bd2; pos 174 56725 to 17457901 reverse strand)
agcaggtaatgtacttgatgaatgctgtaggaattgtgtttgtggcatcaatcatgtgaaggaacatgcggtttagactactagtacttcgtcgggaagtggctaaccgttattgttcgtggagttcaatccttgccaattagctctatcctgctctggaacattgtgattttcacacgatccttcgtagcatgcaaaatttgttgcatcgagtataacccacaggaatgatcaaggttttgctgtgggatattttgctagtggacacagtattctttattcataactatttggactttggaccaaatagaagattggtatttttgttcaagtactgttagttattctaaaaatatttgaattacaattctatatgtgtttaattgggattcagccaacaaacttattcagttcttttcctgtaccactatatttaggtagcagtcctgcatgctgttggcttggactacttatggccctgttattggttttatccgccacttttgttaagaattatgtgatgtatgtgttgtttgttgtataagtatagacccaaaaccatagaataacaacgtacctttagaggagattctgacaaaacgtttagagcttgagtgtccaatactggagattctgacaagtatttaggaacggagggagtacttcaatatgtcagcatagagaaatgtgttggtatatgaggaggttgtgtaaccttctgaggaacataggtcacaatagtatggtttagtttggtggctaacattgttataaatgtgaattgatgatggtttcccgaagataaaatgtttaggccttgcttgatgacttcatatctctggtgaatgagattttgtaggtttattttatttgtgcaaatgttttgtttcttgcccaaattgtttggtgcctgaattagagtttcctcctgatatgataaacacatgtattctgatgtgtttgtggtggtaccacttctcattattcattatgcctgtaaaattgcgtatcaaagaaagtgctggtcaggccaatatgtccatgtatgctgttgtcagtggctcagtgcataacttttggtctgtctgatggttgtaacttataacgccttctcatgttaatttttctttttctaatttatagctttgatgggcttttgtcttgtatttgattgcag

SEQ ID NO: 2120 - DNA, 1520 bp, Brachypodium distachyon
  Intron number 1 from transcript Bradi2g03920.1 (locus Brad i2g03920) derived from phytozome v7.0 (chr-ID Bd2; pos 276 5859 to 2767378)
ttcctatttggacttctcatataatagcctcacaggtatgatctcattgtgtgttctaacttctttttttaagaatctgtaggagaggctctgacggagaattgcgtgttctaactgttgttgatttgagctctatgtgtgtatttgaattaccatggaagcacttgtctgacccagtgcaatgcaaccaacaacaaaacaactatcttcttggttctcggcagcaccgtatgttccacagactatttgtttacaggaaaaaggttcttatttttctaaaaaaaaaagatgcaagctctatttatttatttattttgagggaaatgcaagttctattggtatgcatgggacgtaatgatgcaagcgttttttctttgtgttaccatgtaaacttccgagctgcatagttattagttttagcctgattatctaagaggggaaggtgatgggaaccctccgcttgagtcatgaatatatggctctaatatagttttcagcatttgagtaaaactaagtatagcataccataaataggttgcagaagcagtaaaatgagcatttatgaaagtgaacatactagcagcatcatatcatgataatattgatcatgtacgaacatgatctaaaattctccaaagttcatgtggcatctaccaaacgattctcgaacattcccatcccaatggaacacccccatgccgtccattatctttcataaacactttggaattttgcctgcatggggagaaaaaaattaacatctcagaatatgactgttggaattgcattcaaacagggattaagagggagaagaaaaaaaatgcaggcttaacaaaatatgcctctccattgcatacattttaattcaacagatgggttacaccttctatgttgattcccaccattaaaccttgcaagctttgaaattttggcccttatgcacacattggtctgcctacaacaggctgaaattctaacaataatttgaagataggggtagtgcgcacaatgacgcttattgaccagtggaagtagaaaggaaagatttgccatgcaattgcatctgctacaagatattctatcctattttagattaggagaattgtaccattgaattttaactattttaaattagaaacaaattaggggccaacaaaacatgagcattgtaccattgaagttatcatatctaggattttagaaaatagcattgtaccattgtagagaaatggtgcttatggacgagaaggaacagtttaggaaatcattgaattgtcagactatattaaattcgaaatatgaaagaaataaaccatgggctcaccagaatacaaggcggagcttatctagttaaagttttttttgacataaattatctagtttaagttaagactggcgtttcttttccaactgcaaaattgcaaatacgaagctctttggtgtatatttatcgtgcatttaccgttcttttctctctccatgcaggcaaaattccaaaggctctgtttactctcccgtca

SEQ ID NO: 2121 - DNA, 17961 bp, Brachypodium distachyon
  Intron number 1 from transcript Bradi2g59190.1 (locus Brad i2g59190) derived from phytozome v7.0 (chr-ID Bd2; pos 569 41346 to 56959306 reverse strand)
cccgccggcaggctctacgagtacgcctcctcaaggtacatacatatatacatgctcgccgcggccgctcatcagtccgctcataccctgttttatttgctccaattgcatgcccttgcgcggaatcgatggagcgcgcgcctcgggaatttgctccgatcccgttctgcaattctgtttccccctctttcttttagtggtagcgaactgcggcccgctctgcgcgtgcacggcctgtgctcgagacaatctcctagaggactaccacctcgcgcgactcggtttaggatcctggtttccagtctgtgcactgctagtagtaccggtggcatgagcatcgtcttgtttaagatgttattttacctccttcggagtttcgtgctgttctggagcttcgtgctttcgcggtgcgctctaatggcgtggccggctttcttttttttctgggtttgttctgttagccgtacgatggagacagagcggagagttgagcgcgcgcctctgcgcctgtgggttttggcataggttgtgatcccgacgcgtcagccgcataccgacatactatgccagtcgctcggtgaaatcggggattgggatttgaagggaaagcatggaaggttgcataccgtgcatcggtacagaagagtgtcttgtcgtaccatggaaagttccaagcggtaaatggtgcatcctaactttgaaaactgactcctaatgcgagtacaaaaaagacgcttgcacaccacccacttgctcacacaaggacttcagaagatcagagtcacggaaccttgagatcgatgaagtcaccgttgacgattcactatctaaaagtacatgacgttgtatcgatggcttcgaccagaaatcgtaaagtggtgttttttatttaataatttagtctttctcaaaaatagtttgacgaaaaaggcgctcaaatttagtcatggaacctaaaactatgcttaggagagtgaacacaagtgagataagagggctagcatagcccaacccagcgacggagtctctatttcttgtacattagggttcctaatgagaataaattccctttgtcatctccatcttccgagttcgttgtgttaggttttggcccatgccctgcacagccgcacccacattggtaaaaatgtttgaaggataaccaaagtcttatattccctccgtcccatagtaagcgactttctgttacatgcatctagacgctttttagacatcgatacatccatatttgggcaaatttgagtcacttaatgtgggacggaaggagtatgtaaattcgtcattccaagctgccttgaggtcatcggatgggcgtctcggggaagtgcccagagtagtagaaagaactagccacaaattgggctaacaagcaaagacgcctaagggcatctccaagggtgagccctcatttgtcctccccatttggccatttgggggtctttggacaaatggatgtgagcaaaatattaatttctccaatggtaatcccccatttatctcttcatgagtctttgacacgtgggccaagaagacaatcggacaaggtttggataagttttgcacaaatgggggttcccattggattacataatttgatcatggacccccataaggtagaatcgctcaaggcggaggctccaaaagaggcatccctaggaataggattgctcaagacatagccttctaggtggtctatgcatgctagtcccctgtgataatatgtcaggggaatcaagctccatacgttgttttgaagacatgaacatgatatatggcatcatcaaattggtatttcagggacgtcgcccggatggtatccacaagcagcatccccatgatggcattcaactcccaccaaagtatgtgtggtgccctccaaagtggggatgccttgttactgcaagtaatcggaaacgcaacacaaggtgcggggggatccaacatggaaggcgaccttgcctcccaagacgacatccacgaggcaatgcgccatccatccaagttgaggtcaggatgcactggcaagcctcgctagttgagaaaattaaaggaatatgcctttggttcactactacaaaaaccaccttcctggacctcctccagtggcggttgaaacgggcccaaaaactcaccaccaccggagccgttcggggcatccccacgcatcaccagtggtggtggctagcaccgccactggtggtcgagcactagtggcgttccttacacacgaccacgggtactcttcggggaatccctctgtggtggttattccctctgtgctcggtttaaatactaaacttcgtcgatacgtctcggacgatctctcaagccccttcgatgacatcgaccaaacatgtcccagacgatctctcaatttcgctcccatcaccttgcttatgcactcaatgatcagggtcatatttatggggaattgatgatgtgtgcatggtagatcccgagccaaccaagttagacaaagccaaggacatgtgagagtgtgatacctagggctctctctaactcatgagacagccttatgaacttcttggatgctccttagttcttgggaggtggctaccatagggcacttgcatgagcatttgtgaggactccagataatgggacacaattcaatttgtgacgatgtgttgcaaagtttttccagaggtgtctattgaaggctcattcaacacttccacgtcgggcgaggcccttgcaccttgcagctaagcgtcatatccctgtctgaattgtgttttgtgttggtttgttcaccatgtgagcgaaatctttgcatggtccactatataagttaggatgtcatgccatgtgataaggcaacactaaaaaccacaaggtgtgcaacaaaagttctttgtaatctcaacatttaacacctaactgaaataccaaaagtttaaaacactacatttcatcccacaagttgtaataatagatgtaactaaaattaacacaaaaaataacattgctcgtaatagcatcgattcaactaaagggcataaactacaatatagacatcacttctaggttgccacctaggaagctctttgtgtaaaaccatttaggattcggtactccatgtatccctcatatcccaagaaatttcaatcataaatgcatttattcccacctaatctaaccttgtcaaactaacaagttactatgcatataagtatatgacatgaagacaacaaatgggggcaaaactaatggcgctgttattttctagacccaccatcaaatttacaagacatatgtgatggtgtagctgatagggatgtcatcctttttctgacattattgagtgatcatatttcttatacaaaacaacagagagaagtaaaatagcatgaataacatccacaaacaattatattaaatttgaaatcgtatggccacacctcgaggtaatcttcattcctccggtccatgttcgacatccctccaagtggttgtttcctccatgtacatattgcactattacctttagtagccactattaaattacatcatgttatggaatcatcatgagtgtacacccatgtcgttaatacaataattaacacctctttcgctctagcctggctgtaaaactcacgccacttaaggcatgaaagtattgcacacatccatcacatacacaattggccatactattcacatcaatcttacaaaattaagttgttaagcaaagaaccacatcataccgatcaacatgaattttcgcaactctttagggtttctaatgaacaaactagtgtttgaagggatggatgtctcaagtcagtcgagaacatagatgcaatcgctccgttgacggttccttcatcagtttttactgaattcaaggggtccaattgttgttttgatttggtcaatgaagttgctcttcgtgtgctatgggtttgagttaaccatgacaactccgctctttgaaattgtccaaccaacattatgatcacggtacaccaatcactaaactttacgctagcattgtacatgatcgatctatctcatagaccaaccaacaaatctgcaatagattgcatgtactacatctacatagggcatatgtacaaatcttgaatgaaaaacttagcaacaacaatgacgacgctagaaaagtatcttcattgttgacaaggacatctaatcatagtgtactttttgtcggaagtatttagcccaagattatgaagcaaatgatgagttttgccttcctcgtaactacacttgtcacctatcattttcgtgagtatattccaaacatggtggaattttccttttttttatcccttcagaccctacatgcctacaagaaaataaatgatctttgactggttagacaaaaattattggggtaatgttgagatgattaggattaaactaaaaaattgatgaacataaatatactcaactttgcacatgttgcatattcgactaatataagttaaatatttttttataaaaatacgttaaacatgaaagatatttcccttaatatttttcaaaaaataattcaattttaatatagtaactataataattataatattgcaatacctacaagctagaaaattaatctatatatttcataaaatcatgatctcaattaaaaaaagaggcactgtaggattttaagatgtaggattaatatgttggaaaattataatcaagattatagtaactcggtatattttcaagattttattgtttctaaatatagttttgttgtatagttttgtccgaaaactgtaggggacgcccgacaacacttgtattaattagccaccaaaattacaaagttaggtatttagaaaagctatgaaacaagaactaatgcaagtcatgtagccaagaagtaaaagaatcaagccaaggaggcttgaatatatgtttcaatagggaaatgtcctctttgaactcccttctccaagacctgaagctcggccgaactccctcaaagatccaattattcctctgcttttagatgtgccaacaacacataccagcaacctccaaaaagaaaggctttccaaagtcgtccttggcagcaaaaatgatctgacccaagctatcaccattaggccaagtactctacaggtaattccagcacctgaactgagaactgaagaacagatgctgccaatcctcaatttcaccaatggggaaaagcgcacaagtatagtcatctgtgacctgccaatttctgcgccaaagcatgtcccgagtgttaagacgatcactcattagcagccaaataaaaaccttgattctaggtcttgctcttccataacctgacgactctagatgcttctgaatgtgagcaaagttcagactatatctcttagccaacgagaaagctgcaccctagggatagacccaaccatcaggctgaacagtctgaactcgaagcaaataacccgaatccaataaaagttcatactcctggaatgcctcctcggataaagacagttgagacataggcaaaagagaatcggactgtgaggcatcggcaactgcctagccattgtccaccataaaggagaacatacgtggatactgcatgcagagaggtagaccacaccaaggatcaaaccagaattgtgctgacataccatctccaatctgacaggtcgcaaaaggcagataaggatccgcaaagcacagaagcatgaggaacatattagttagtgtagtaagaattccacaccagctcgacccatggcacacgaaccctattatagaactcgtgcaagtgtttcatcaagagtgcatcattctagaatataatatacttaataatgcgtcgatgatatcttctaaattgcgtgcatatgtaaatcagttttagtaacataattgaaacattaaaaagcggttctctcatcacataaaaatgtagccctatagagacatttaccgatgcataaaaaacaattatgcactttcataataaatatatcaattaattatttacatgtgtttcccacttgaatattgcttgcaccgaaaagcaactgtagaaaaatttagttatgcactatttaaagatattttattgtgtatcaaatgaaataatgtcactcactctaaaaatgtaagccaacatatttcaacccttctagaactttatgttaaattgaaacattgtcacaaagagacaacaagcacatttaaagagcaaaaagcaatatattttcttattagagaatacttcatgaaataaattatttaagccacaaacaaatatcaccatgtatacaaattaatttagtaaataatttaggaggtaatgaatacaattagatgagttattagtgggacggtatcatgtttatccactattattgaaagaataattatggaagtggttaaagattctgaatggctgacatcgaaagtataccactatttatgttggtagggttactaatcaatcgtattcaactttccacgccaaattctagtcattgattcatgtcccccttaatatattaacacatggagattcatgaaggtgagtggttggtacttctagtttggtcacccacctccactttaggatttagatggtcattgttattattaaattgatattaagtgatattggcatgcatataaatgttttgacgtgaaatttaaacaattttttttgtcatggtaacattaaattcagtagaactcaatgtcccagtattagttcacaaatatatgcaaatcaatccaaattatttttttaagtacatataaagataatttaaatatctcttacatagaatcttaaatgaaaatgctaaacttcttttgtatgcttatagaaactactcccaccgatcctaaattcttgtcttaaatttgcccaaatatggatatacctattcttaaaaaacgtctagatacatgtaatatttcgacaataatttcggatcggacggagcagcttacatacgcatgaatggcatgtttttatcccatatatgaattatgattgccccaatatagtttcattgaatccaaaaccacctttcaagaactattttttaaaattcgtggccttagcaccacggcaataattattccaaaacaatacgacaaaacaaaatatattttgtaattatcttaagctgcgacaaacttcaatttttacaaaacatataattaatgaacacaaatgaataatccattggacaaaaaatatttgattagaagtcaatgtttcaaaaacaaattttggtattttcatataattgtcatgcatggctaagacttattgggtttgccaagttccactcttatatttaattagtattgacatatttgtgttgaaatagaagtgtattgttttattgtagacatgtttcttgcattttgtgaaatagaagtatattattttgtttaagacatctccttgcattttatgccaattttgttgccaaataaatgatcttcaattgtataattcatatgtcatttgtgggaaacttaattcttgagtcgttagatcagaatgaatcataccttatactttataagtagttgagatatagatatacataaccaatcaaagaaacgcttcaaacattgtagacaaagaagtacaaaatctaaaaaatcgcaaaactaattttgatttttggagggcaatacttgtgctcataatcggagcctagatagggtgaagttcttgattcggcgcaacagttgatactataaatttttattattttcgtgctagcttttatccttaatcatgaaccgtagaaggcacacatccgatcacaaagagaggaacttatggcccgaaattttgcatcgcatgatttgaatgtggcccgatataggcagaaacctgtgtcaattcattagccatcaaggagggagttaggcattgtaagacgtagtttcctagggcccaacttaatttgtgaaacctatgtcgtttggatttccaaatccgttttttgaaaatgtgattctcgactctctcttgtacaatgtgatttccaacttgtacaacttggaactataacctaagaataaattatagtatgccaaagattataaccttagaaatattttttttggtataacaactaaaattataagtttcacgaggcaactatggatttaatatgggatttatataagtgtgatatttgcatcaaggcattgaccgaactaatgaagtgtttgcggatgggacttccgagctcgacccttttacccttcaaattatcacttcaaatttaatggattatctttcccaactaggcctcttcatggtaagaattaaatatattaagacgttatgggcgactagatgaaatcttttctgatgttacactccatataatataaaatattagcttcctttgcgtattcgatttacttatgttgatctataatctttgtactccctccgtcccaaattaagtgacgtgaatttgtataagaatctatgcaaattcacgtcagttaatttgggacggagggagtattatattgtataatgtggctttgatgtggttttacaaaatgtgatacaaaaactttcagatctaatgtcatgtgcacaagcatttttatctaaaaaatatcatatatataatctagggttttagctcatgaatggtatttgtgtttatttagtttgatggttggtcatagtatcatttacattctctatctaacttggttcaaaagatgttcataggaaattcaacttcgataattattctcaaagtgggaattggtgcaacaagatttacattaattttgcttcatgtggcgatgatggtgtctacggtgacataaaaaaattcatcaatattatatgttaatttgattgtttccttggattcaagcaatcatattctctttttgtacttgaatattacttcagtgtgcaactctttcaaatttgaagcatttatttctagagagtttgttttttgcatggttggtggaaaatacctttagcgatacaagatgaagatcttatatactcttcctcctatagagttagacaatacataacatttttgtctaccaacaaatttaattttgtatgattatagataaatagttggtggattcattgtgcatgcataacgcaattaatctattgattagcaaagttcaaccttctttgttgttctttcatgatttctgttacacaaacaacttctaaactatgtttaatatttattttatgaattttcacttctatgattaattcttgtaatggcatattgtgctttatcttgccattgctaataacattataaataatgtgcatctcccaacttcaaattacaatgcaatgaaacattgtgatgtttggaacgattaacgcttagtcattcaactatgtcttgatttatttagtttacatccacgtggtgtcacttcactcttacatccagccccattgtttacacgtcgaacccatcatcacacctctttatacgtctttccttattttccaccactactatcttgtttgtgacatcacaacctcctccatcacccattcttatggcatccaaaagttcttcattgaccaaccacataatttgcagccacccacctcgcgacggtattgcacatcttctcttttctaatacaattgtgctcacttttatgacaacacgccctctccttgaatgctcacggaagccttgatgatacttgggaagacttatctagattagctcaatgcaaagaatgccgccattaccgtttatgctcctacttggtagtgcatcacctttgaattaatcttgctctccccccgatcgtattccttatcgtgctcctttggagggatgatgcaatgaggaggaggtatccttgactaagccataggtaaaggggaagaaaaactgtaagggcggctggatttccagctaatatccactgacaatactaggaaacaagggatagaccatggtctatgttgtcgtggtataccacccactcttagacctgtggcgacttctcccacatgcaagatcctttatttccggtataatttctactttgcttatgccttctttggggccctacaattgtattccctcgtgggcaagatccttcttcatgagggccaaatcctcccttgcctaggaaaaaagtaacaattaccttctttcccccaaaaccaaggagatgttttgaggtacatgtgacacttcttcgtctttgctagaagtaaacgcaaatatctaggttcctagtcagcatttaaggccatcttatatgatgttgacctttttgtgattccggttagcctactagtggtggctttaggtgttgtatacaactgccacattttctttccttctcacttaggttcccaaggctcatagtgcctccatggtgccaatgtgtccaaacttaactgggcaaattttcctccactcaatggcggaggaacattttctcaacatgaaccctgtttcactcattctcttttgtggaagcggaaacatttggtatgcattttctcatgccaatgttttcaatataatgtttcttttcccaatattttactgttgcaataatcaaaccgtagaaaagcacggtagggaccccttacttgggaaattagtgaagggtagcaagggttgagctctttgtttgctagcatgatacgaggtgcgaactcaaggcatgcctaactatggcaatgtgaatttcaagattcactaaggggtaacaacatcctttcttgcaagagcaacaataaatgttgcgatccaaaatggactaattcatatgttgatggtaaggacccttctaggtacctagtcgtttctagtaactacttagatccccttgaagataaggaaatctatacttgtgcaccaaggcagcatgagccatacaaggagacgaaagcccatacccaagaccacgggaaattgaggccaaggagtagtacttccaagaagattaacaaggagatccccatacatttttcctagtatatccaatctagcctattttactccatacccttgtaaactcttctcgagatcaatacagacaagcaaaacgcaaggctattactcaactcaggtagctggacctggataaattggtatcacacatgagtacacttggcacatccctcataccgttcaagtatcaacgtgatcgtaagatcatccgtttaataatcatagtggttctacattagggttaccggatggacatcctatggtccaatggagtacatcaccttttcgaagatttacctcagcagttcttaagatttcaggaaggtggaacttttttgctagagtcaattgctagcatttgaaagtcattttggaggtttggccaacttacgaggcacaagggaaaatataagagtacctacatggagaaaccattgtagcacatttttacttcaggccaaacccagcttggcgttttccactacttcacattttcttctccaaaccttcaacgtcatcagttgatataatgtgatctttcaagctgatttgctttgtagttctttcaacttggtgattgaaatagcaaaatagatcctactgcatacgtcccaccaatttctaaaagcgtatctcgactgaaatctgtctttcggtcggctttggctatgtgggtttcatcttaaacctaggatagtgtactagttcccacaacttcaccttaaatccctgcattaacaagctagccttggacctataggacacatagcatgtcgttttaggatccactaagattgtcgttgagcatttgccatcatagaatgtcatgctgaccgtaaggtgatgatgcttccattgcatctattaccactaggtattctcggggaataataatccccttatatgtgttgtaaatcatatgtggcaatacgaagttaacaacaaagctttgaccagtcaacatgccaacacagattggccaagccacctaagaatgtcaccaagtcaatctagtcaacaagtcgggacttatatgggagaacaggtcttggtcgaaaagaaaggactaataaagcgcaagaagtagaggaagggccccaaagtaatttacggagtcttccacttctaccctctcagaagggcatcaatacccttgtgggttgtgtcctcacttgaatgagctcaagaggatgagccttggtaggaccctaggaataccttggggggccaagtgtcagtttgggaagttaccgacggtccggatggacgatgaagtgacgagtagtgtctaggttaactcaggaagttgccgatggcccgagcaactagtcaaacatgactctcgtcgctcttcctaacataggattaggttgcgctccatgagaggactaagcctatttaatgaacatcaaaatatcaatcctatcgactgtgccttcgctcataagggtagggtgcacacccaactaaattttgcacctcagtccattgacacccttaattatggtgttgtccctcgacaacaacatgtctaattcctcctattattgaagttgtcgacgatccatatagggggtattgtctttatatcaatctcgcgaacaagagttatgcaaagggtatagggagtcgggcgcgacaagtggatacactagacactagattaccaagttgcgagccataaggcactacatcctccaaattctttattatcacgatcgagggtggtatcgctagactactaactcggtgaggattttccaagttattcattgttgcttcaatgttctcaagtcttgtctctaatgagtcatggatttttgcctctccaatctttcttttccggtcctgggtcctttatatatacaacttgtctaagggcttatggtcaagaacccatatcctagaaggagtccataccgactatggtaatattccttatccatattgattcgttcccttgtatgagagtggtgtgttgaaaccctacagagtattgtagacgtataaggtcattatccactacttatcgacaagccgccccattaatatctgggataaggatttgatgggacaaatctaaccttcctgggggaaaactcccggctcaggcgggcttcttcttgagttcttttggccaatggcatagtcatgacttagaacctgtaaggtatctactcatgaactgcgaactctcaagtaaatgcttgagatacttgagaaatactagctcttcgagtaggagatttcgagttcggaattgaaaccatatgttttgtaggggaagcatcatgcagagttataggctagttgaatcattgtatgatagcctgtccaaccaggattctaaaggaagcatcactttgcgcaccctccaatgagtttcatgaagtagatattctacactgcatgagggaagtacatctcatgggcattctgctaaccagggagatatctcctagatttgtaggcaattttggtcgtataaggccttgtcccatggaaaaacatgatccttgaggcacataaactggattggtgtagcaatcgttctagacaaggcccaactcgtttgaagtgactaatctcaaaccggggaggggaagttgaggagctttctctcagaatttgagtttaaaatcttcacactttgatgttgcattcccatgtatactggaggtgttcaagcataaagtcgatggcatattgttttaccatcctcttggtcatgaagtatgaacctccagctttttacccaaggtttccagtagctcggtctgaccacacgatttaggctgagatattactctatcaagccatgccgtatttcccacaattcttactaccgacatggcctagcggtacttgctaagcctattatggagttaacctcctgcacgcccagaagatcaaagaacgtgagtgctcctcctgcatggagtaagaccaccctatggtagtaggcttctatagcttcccggcttccccaacttatcacttgtgtgacacttttatgacacgaaggctattatttatgttatccatgtgaactgtggcaacttatcacttgttttacccatatcctttgtttatgctcatgaggcacctcttcaatccttccatgatgttgcttttgcaccgttggtgaccatatggattaagttgtgccctgaatgtgaagcgcaccttgaacctaacatcttcgcaaaaaaactttgaatataacacaattagacttcggtccctttttttcggtggtcaattgccgtaacaccaagttgtatgtttttgtttccaaaatgttatttgaaagtgtgttggtggttatttttttcttggcaccttcgcttcgtgtaagtcagaaattagtctttggcctccattccacattgtgaatcacactttgccttcgagaagggtcctaggaagtctatcatgcgtcgagaggccacattggggcaattagttagatatgcatgggtaaagtagcccatccattggcaccttgacataaaccttcatgtgccttcttattcaccatacttgtagttaaatacaactggtagaggaaattctttgacatcaatgcttaatgagtcatatgggcttcacgaagcccttatctttatttcttgaagtagacaattaatgtcttttggctagcgatatgcatatgtgattcccctttcccgtatagtaggtcttgatggtggtgaagtgtatctttcccttctccacttcctcactctagttctctcatgtgagaaactttgaaaaggaatttcttctctctctacttctcaaagaacaagaaactttgtgccttgttgacgatggatttaccgtcgatcttatgacagattcatcggtcgtggagatagtagagagggatcttacctaggttcgggccccatgattagtaatagccatacatcctgcaagatgtatattgaccatgatgtgtttacaaagagtacaagtgctagattgggttggctaagctcggtcttgagtcttgactggtttgtgtgttctagaatggcttggtcttcagcaaagtccttcagggggtttctataggagcacttcttgatcggcaagtcttagaactcgaacaaactgacatggtatctttcaaccggctagggaaggatcctaggttggttaggacctggaatttcatgtttagagattgcttatgtccttcaagtacctatctagcacgagtagatgtgggcttagtgatgtcccgaggtacatgtacgtattatgatatggtcttcttacctctgtatggtatacaagttacagagtcaaacactacaccctgacacctctggaagttgttttgaggacatcgagtgacatcaaatgacttaaatgatcatttcatctctagctctttaggtagtggtccttgtgatgatttctttggcaaggtatgtgtcctttctaacctgttctctagtgaatctttcaagagtagtccccatgatgatttcattcgcaagaagatatgcatcctgttacccccttctccattccccacgggcaaacacatgcaattatatatgtttcactatgatgcctagaaaatgccttttagggtagaccatagttgctaggtcaggaccataaaggtgttgttaaatcttggttaaatcattggccacaatccaagattcgttttcactatcaaacttctatctcctagagaacgtgctttgtgaatccacaaaagcaatcttttttatacccgacaatgttccgtgctgttaggaactcatatagttgcaaatgtgtgatctccatccttctaaagtcgtggatatggcatgatctagacacgaggcgcatcgtgcaccattggtgtgcacgtccgaagcaggcttattggatggcacagacttctcttgcgatgaaaaccacccattgagccatgaagttacattgtgtgatttactcgatggtcacacacacagacaatctagagagaccaggccagcctacttgttgtgaagcgaacctaagtagggagaaatgtgagaataactcaatctgttataacatggatatgcctcatgaagtcataccatcaattcgggaggccatcatcatcatgtatcgagctatgtagaggatttttggaggcctcgattaagtagggatttcaactaccctctgactatgaagtctctggtgtgaggccttattatttttatttgtagttggaaaccaaacataacattcaaagattggacaaatattagttgttgaaatctaatgtggagtaatcactcacaagggatgaagatggtgtgctatttttccttccacatgtccctatccacatgcctagtgtggaatattcaaacatacctacaaaggtagactcatttactctcctaccttataatgtccccagctaccaacttcactggaatttgaggtgccaagggaaagtagtttccattgtggtccagtattgtactctaggaccaccgcctctcctctagccccgagtcggcatgacctttgtgatgagatcttggagaacaatagcaaagggcttcttctagaaggtctcatgcccctaataggggaactttgtccataggagctaaagagacgtaagaccccaagagggtaagccttttctagaggaagcaatgcttcttccatgttttcttgtgaattttccatggtgaacatacaacctaaaatgaacaactaaaaaatctaatcaaagacattaagatgttatttttagattctagtgagtaataccacaatttacaaaggttgcctagtagatactaagaatcattaactatataaaataacatgaaaaaggctatataaatggatttacatttataccaataatttgttttgtacataataagagaaaaatataataaaagtgcatgtgagattcatatgactctaaaaaaatacaaccaagaatgttctctgtataatctcaacaaataagctaaaaacaaatgttgttggcagtatcccgtgatcatgtgaaaaaaatcactaataattagtatcttcacaaatggacaggtcacaagtaactaaattgatgaatttaaaacctatcgattaattgactccaacaaatttaacatgcccaacctccacattcatgcctaaattccttaactgaactcaatggtccatatgactttatgtcctatgtcatatatatttctcatgccaagtgatggcatgcgaccacatatatgcacctgaaaatgtctgaaacataacaagtaatgtctttgtgcaatccaagaacttgaaaacataaaaagaaactcaatgaccttatgtttttattgcgaaaacaaatatatataaatttttagttggattagggtattctattttccagttttatcttttgtaaaaaatgtgctcttcttgcataggaggcttctttataaaagagatagattaagctagtcataagatattatagaccacgttcatatgaaatagctcatacatcgaatcttgaaagggaaccatgtatgactttgataatatatgttcacattttctttcttattctcataaattaagaaaagtggacgcaaagttttgtcatatggaagttagtaaaaggcttcttgtaaaaaaaaattgcgacttacaataaatactcgaaatatttatgacgtcgtctattagtattaccaaatcatgactagaccccatatagctattcataaaactaccagataacatttgtttggataaagatgacataatgaacctatataaaggtcttcaccaaattataaaagagcgcatgaagtctattttacttacttaatacctagaatttgtctgaaccagccaaagtcttgtaactttaatattgagtgattctccaaacattaatgtcatacttttcttttcagcatagaaggtacat

SEQ ID NO: 2122 - DNA, 795 bp, Brachypodium distachyon
  Intron number 13 from transcript Bradi3g04420.1 (locus Bra di3g04420) derived from phytozome v7.0 (chr-ID Bd3; pos 30 32893 to 3033687 reverse strand)
cgtgtttatattgggtaaaatctgatgtcttgtattcttttccatctctaattctttagcattagtcaatcttatttcttgactctgcaagtcatacaattattgtacattatcagtgaaaggaattatatatgcagaatatttctagaagtccaaaacagttacagtcttctgaaccctgaacaaattcgttagccataagtagctgagccctccaactcccatttcttttgtatcactatttgtaaacaattgatatgtaacaatttgtggctatactttaacttgagggccattccatgataatcgttactcttatattaaataaggtgcagagttatatgccttgtataagtaccagaagttcagaaccaccttaagtgtagccccatgctggatttttctaggtcggcacattatctttcagttgactagagatttggtagataatggcgtcccctgaatttgtctccatcttctctttgcctaagcaaatttgcgagatttgactttttttgagagagcatctggattgtaatcctgttaccttgttttggcttttaaaagttgtaattgctgaaacatatctctgatgcaacagtgaggaaagcttgagtttatcagatctcaggtttgagaaacctgtggtttatatgccaagctacatcataaatgatatattggtttgaggatctttgaagtatataagcaaaaatgtatgtatgcagcgcaagttcatgcgttctgcaatgtaacctgaaactcacttggaaattaatattttcaggtcgttca

SEQ ID NO: 2123 - DNA, 788 bp, Brachypodium distachyon
  Intron number 4 from transcript Bradi2g12520.1 (locus Brad i2g12520) derived from phytozome v7.0 (chr-ID Bd2; pos 108 35987 to 10836774 reverse strand)
tgttccttttgttccaaagggcattgagataggtaagttgctacaactgttgtttttgcaactctatttctccactttccaatataattgacctacggagaaacagggcttacaaataaaatatcatttaggcatgcttaacatgatctgtgttttacattttacctagtaccagcattgagtattgaactagttttacaaagaaattatcattaaggcataggactagtttgctgcaaggagtcttcagtaccatgcacttaaatcctcttctttattctaagaatttgcatgtgtaataccagttggattttatatttagttaactttacatagtggtccatttgtgttgaccatcaccacacgttgttttgcgataagttagtagaaatctaaaacagtaaaagacaacatcattttgtttgttgttgatttaccatgacaggaaatgggaacgaaagctactaaattatttttcttggatatttacattggtgccttttttgtccacattctttcaattaatcaaccaataaattgagaattaagcagaaacagctacctactgctgttgctatcttgctatatgttaggttcacattctaaggtggttcagcatatactgtgaagtgcttattatgatttgaagtaccaatgatccagtgtggatgttgtctagtgcagtcgcaatgtgtttctggttattacctcaggttcctgacttgtactattcttatgaaagctcgctggacgatcttatgcaggtaaaactgtctttactagtgatc

SEQ ID NO: 2124 - DNA, 867 bp, Brachypodium distachyon
  Intron number 5 from transcript Bradi1g18920.1 (locus Brad i1g18920) derived from phytozome v7.0 (chr-ID Bd1; pos 151 50980 to 15151846 reverse strand)
caaaaggttttagcctaaacaaagtgaagtacttggtatgtattctttgcattttttaagaacttgagttttttttattctgcagtctctttgttgggcttcttgtgttgacaattgtaatccttcaccttcgtcgcagcctcatttgtatatcagcattttctagttgttttcttagtggcatccatggcaaatatgttatcatggtttacccgttatgaagcatacactctttttaatgtataaattacactgatgtttcatatatgattagaaaattctgattgctgaatgttgggtacaagagtttcctttggttggatttgacttttaactgttgaaaatcacatgcgcttgttacaaatcggtgtaatgtgtagcatagaaaagtggcttttcactaaccttcttttacctgtcaaagcaggaagttacatttgtggaaagagctcatccctgaagtgttatgctaaacgtccaacataataaaacatattttccttctatttacttaaagcctattttgccaaagtgaatgtcactagtgtgtgtgtgtgttgtgaactagcaatactaactactaagcaaagggagagaaatcatgacaccctattggtatttgtttccaatttcactcttggttctatatgctcaaatacttgttgtaacttctctgctgtaagttgaagcaatgtgctgtatgttaccgatcataagtatgttggcgaccaagctgttcagtaccttcattgtcaactacttcctgatattgttcaagcatacctcatggtcaattatatcaagttgcttgaacttagaaacttctattttgacacatgctctacgtattggcttcctaggtactgg

SEQ ID NO: 2125 - DNA, 2687 bp, Brachypodium distachyon
  Intron number 1 from transcript Bradi2g08820.1 (locus Brad i2g08820) derived from phytozome v7.0 (chr-ID Bd2; pos 713 3278 to 7135964)
agcaggcaagcagcagtgcagaagctcgagtgcaggtaggatgcgctagttctcaaaatcagagttctaaaattctgaatgattgattgcttaattcaggtgatatattattgcttgattccatcgataaattgaattatcgattgatttttatatttgtgttgcgttattaccctgtggtagtctggtgatagataaattgactccttatgacttatgagaccttattaacaacttgtgttgtatttttcgcaaatttgtacatccagtgttaaaaaaatattgtgcgttcaaatccggcccccacattggtcaaatcctggatccacctctttgattgtgccgtgagtgtcagaatagcctgattcagacatgagaaaagtactgaatctagctagccttttgaaactgatttttttcttgacttgatgctattggaaatggtgaggttcttgctgatgcaagaaagtttatagcatagcttttgttttgttttgattgataactcctggatcaagagtctggataaccatgtcagagctgcagacatgtgaagttatcttgagctctaactgtaaagaaaaataattacttgggtcctatgacgatttcaagggtcttttggcctgccgcgagctccatttgcttgttcaaataaagtacggagttttgtagggtattacttcattactagcatatgggaatgaagtttattgtgcccatggtttgtcataagcatgaaactctctgtcctggagcttacaatatattttctactataatccacatcctgtttatgtaagaacctaagtttgctgcaggcaagctcttcatatttttgatttactgataaatgcatacacaaataagatttcgctctgctactgtatgaacaaactaatttcccatgaaccaccatccctctgctgctttgtttatgcttttggcttttacgtgctgactttaatatgcaaccttttttcttcttctcctttaattgccttctgccacactgctagtaggaggaacaatcagaaggtattgatctttgactactagtacattattatagataaccttatggtatgcatctcctctgttactgattgttctgctttcacaacccatgtttggtctgtaacacttctttaattaatcacttttattttgagcaaacttgggatcgagaagcaactttcctgacaattaggaaaataggaagaacacttgtttccatttctgcactgaactgcttctagcagaaaatagctgtttgtaagaaatgcttatatcaagaaataactgatctgtgtgaaaaatataaaaatctttacaagtatgctaattcaaattgagaaatctgctccataatattactcatcattttattttgctgtaaaaaacacattcatgatgcctcatcttacatctactactaaatcatttctgatccatgcaatcctggtttagtccaaatatacttttagtagaggggattgagcgtgaggaagggattcaacctccttgcggattgggtgatgagagggggatcaacccaagcccttggtggattgttccctaccaaccaaacaagtcctaaatctgcccacttgggcaattggatgaatatctggtttgcagtgtcagcgtgtcggagacaggagtttttagtatttctctctgttgtctgattgatcttggttcccttgctgattgtcctgattgtgggaactatgcaaattccaaagtgtaccgagtaatgaaaatcaacataccgctagcacttgcctacatggtggatgtcaattggattgagaatttgggctaaacataaagattgaaagattgtatgcattgcttagtttttgaatatggaaaaatagtgtccaaacccagcagttggccctgattaattcaaccccctagggtccagcttaaataatactgtaaatcagacagcatgactttgacttgcatactattttacactaaatagtcactatgaccggcatgcagtttacatcatgcatttgatttatgaaattacaaattggcattgttctatgactgccaatttcccattatatcattcatgtttgttttttactttagcttgttggcgttgcaaacttttctcttgatatttcttccctgttaggtgataactagtttgatggttagcatgctgcttcctattattgatgtttgtcttaaaaacatttcttgatcatgcagtcatctgagcagtcatatatagacttggtaacaagttatattctacaaaatcgaacctcatggacaaatagaagtttcactgtctttgttgccaaaatgcactctgtttttagttaacacatttctttctttcttgtggaataagggctggatattaattcctggtgtgttatcataaattctagattggttaggtgctgtgagaattcctcaatttgtatgtgttctgcaaatagatgggtgagcactaatcaatgagaaatcaatcaactatagcctttgtctgatattacggttttgtacctaattaacatctgccaattttttggtttaggtttccgttttagcacttcttactcttgaggttacttggaaaggaaaagattttctactttatttaactacaaacaatttcaggaagcaaagtgctctgaagtctgaacagctgaagc

SEQ ID NO: 2126 - DNA, 1971 bp, Brachypodium distachyon
  Intron number 5 from transcript Bradi2g50890.3 (locus Brad i2g50890) derived from phytozome v7.0 (chr-ID Bd2; pos 506 04084 to 50606054)
tgaagacgattttctccaatactccacctagtaaagtaagattctaaggccatatactattgtcagatgtatatgtaacctattttttgacgggaatagcctagttgtacttataatgataaagggtgttttgttcatgtacttgatgcataattttcttcagactactcatcatgttttcactaaatatgctttctaattggcgaaacataataataccatgttacatatgaactgccccataagaacattctgttttggggtctattacctggaagatacaaaaacactatttagtgggtgaacgttccaatgagtaactggttggttctggaagcagtggcggagccagtatcttacaaagaccagggccaaatattcatagcagtctgaaaataataaatcaaagataaaagccccaggtcaaattcgaaatacttcaaaatttactaaagaaaatctattcgcgtcccaggccaccgccctggttgctgggggcctgtctctgctcctgtctggaagataccattgaggcccaccatctgctttttcttcatcctgttccttgttttcttctcctgttctttcccaacctcctctctcttcttcctcgttcttcagttggccaccattttcatcactcgagcccatagactgctgggttgcacttcctcaggcacagatgccatgttcctcgctgtttgctgtcgctctagttttggtggatgatcgtgcgtcgctgtcgggtgccgcctccacctgccactggcaccacaccacactgctgctggtgcctctgtccttttcttcatccctgccgcatgtccattgtcactgctgtctgctggtaccataggagtttgtggagatctcagatctgttctgtagtattttccatttcaaatttgttaattaaaagccagagttgtatcatttaaaaatattgtttcctaattgaaagctccaacttttttgttggaagttgatatctagttttcaaagcctaatttgtttaattataaaattggatggtataaactgtaagtcggtgtccatataactgaaagtattctcatctggctgaaagttggtgttcatccagttgaaagtccgtgtccgtctgagcgagagaccatattcatctgattggaagtccgttttcaaccagttgaaagtttgtggggttccatttggaacttgtgggtttaatcgtggaaagagcaggttgtattcacattctagaaagttttttttttcttataaaaatttccttctggagacgaatttgggagggggcatgctccgacggcattgaagtacacattggtatcggtcagaaactgattgttccaccaatcatctgtaaaattaccaattccctggaagagataagtttaaggtgctccttgaatttctggacccctgctcacacccaaaagtacttttgtagtttcgtcgacattcctgatagctgatttcgtaaatgatgcatcatgtgtggttactgttcatcagtgacacttggagctgatgataacgttcatcatatctggcttgtctcgttattctgtacatttagtggtgatgatagtggggaatcatgatagatcactatcctaccgctactaaaaaagaatgttgatagcagattatagtaaatgatgcagtacatttgttgggaacatggtggttgtggttgtgctatttatttttacataacaccccagattgcagtcaatatgtatttccttgagtataatttatggctgtattacctgaaattaatataagcatttatctgttgtatgatttctctggaccaaataggaatgttttgaaggtattaagaagctcaactatttcagtgtgttgcggagaaaaaaaaacattcttttcttcactttgtataaaaatattaaattatttttaaaattttgcagagagaagtctgtcggttgttgccttgttcaa

SEQ ID NO: 2127 - DNA, 1319 bp, Brachypodium distachyon
  Intron number 1 from transcript Bradi1g41760.1 (locus Brad i1g41760) derived from phytozome v7.0 (chr-ID Bd1; pos 383 97822 to 38399140 reverse strand)
tttggtgccttatcctcgtaccaatctaacccaaggtaaattaactcgtactactattgtcagttttagggttcatagagaattcgggactggtgcatcacaatcttttagtttttggttcatataggaaatattgcttcctgataactctttaggcaattttaaacttggtgctataatttgattttatgtacttatgattaacagaatgcaaatggcagactgttgaatagggactaatatatccttcttggcgttacatgtattgttcagttcatcagtgatttaattgtcttcttcggttttacaagtttgtggtcttaaggatgctttcagcccttcctgtgggtgcagttggattttcttgaggaaattatgttatttttctgttattttggtgttgatgtaaggccttttttctgtatagcttcaaaaaacttcttgtgctggatctgaatttcctgttaacaacgtagttttgaaatttggtttggattgtcttgttaattaaagattttgcctctttttgaattttattggttgaataggagcccccaattctactcgctcaaattttaacttcaaacctgctcactacctacagcacagttagggtaggttaaacttaaagggtgaatgagtcatatacggcaataatagggtaggttgaagatcttgtgcagcggacatggcacaagaggctgaatcaaatgacggaatgagtcatggcacttccacaagtagatgatatgtgaccccagagtacagtaaatttgtgcggcatgtcatatgctaactgtttggactttggaccaagggggtggattttacagcattgaggcaagaaaggtctgcatctggtaacaaaaaaagaagtccgtgctgactgtctgcgtttgttgtggacagtacgcgaccaggaaaacaaggagctcaaaattttctgaaattacaccaaaataacatagatttagctaacctggattgggttattgatttggagacagtataaatagtttcgattcaatttctgaaccaaagcctgtgtaatttctgattcaacatatcaaagtagctcagatatattcacatccactactaatagtagataaaacgttgttcctgttcatatatggcattcacaattaacatatttaacaaattgctgccggagagtagttctgtctgcacttttactgtgcaattattattattcttttgcttttaaaattcttttgttgtggtatgttggtgcaagttacatatgaatcttccttttctgatgtggttaattcctgtttgtgtgctaggtccagaga

SEQ ID NO: 2128 - DNA, 2132 bp, Brachypodium distachyon
  Intron number 7 from transcript Bradi1g75470.2 (locus Brad i1g75470) derived from phytozome v7.0 (chr-ID Bd1; pos 723 61504 to 72363635 reverse strand)
gtacaagaggtacatcttcattctgtcttttattttccagagcacttaagacaaaagacagaagtgaattggtgcagtaaaattggttgattgcaaggtattgaaactaggtgatgactaatgagtaccagataggttactcaccttgtagctattagcctattagcccattatacgggattacgtggtaaccggccttggtctcaaccttatactcggtctttccggtaagcagtgagggtacttactactagtgtatggctagtagagctagtttcaataccttggttggtcgccaattgatttttcatgctgttcagcaattgtgaacaaagttggtatcaaatgctgatacattagtaacaaaataatctatctgtaggcagtaatataaagtggcaaagcatagccggagtccacactcgccttcagtttagttgtacactatcacacttcaacttgcctcacagaacttaaaaaccaggtaaccaccccctaaggtactcaataccgttcaaacaactccccaggggtgggtttaagggcagtttcgttcattttgagggtgacatggcccacatgtaaaaatgactcgcacaaactcagtagcattgatatgctaacttttccatgtatttgtgtggagactggagaatgtaaggggaggttggtagttgaaaattcaaatacccaagattatttcagtaacctggtatcgagtagtgattagattgcacgaatggccaggactttttgagcactgctttaagtggctgtagtcctgcaacttccattaaattgtagttgttgtacatatatatattacgagctcttctacaataccccgggtttaatatggaccgtttatttgtcccgatctagtggctaatagtatctggtattccatcgttcaccccacggagtacagagtcttataccaccagagtacctcgatgtaattgtgtgtcggtagtttggtctttctcggattgaactcgatattactttgcaacaaaaaaaatatacaactaacaacagagccgcagcaccgtccctgcagagcggacgaggccaccgctcgattggccgctgcgccggcagacggacgaagccgatgctcgattgggccaccgcaccaacagagcggaggaagggatgcaccagccgcccgagtgaccggagcggcgccgttggaggagagaggagcaccgccaccacgccggaggaaagacgaagagacggagcagcagtagccggagttgaaatgggtgccgcgatgaagagaaggagcaactgccgccgccgctcgattgggccgacgcgccagcggagcgtacgaagagatgtagcgcgacgggtcaccagagggtggagcatgccgacgcaatggagctcgattggcgtccttcttttccggccgtaattgatgactgagaaggtgcagcgatgaagaagaccagatcaaatcgaatcgatcgcgtcctttatttccgtcagtaactaacgactgattggagctgatttggacagtataaggttgacaaatgtctgatttgcccttttactatggagggccagatctatttggtactccatattgatttttggagtaccaaggtactgtaaaaatgctcgtatattagagagctgtagaatagcccagtggtttaacgtagcggcgtctctttgctgacctgggttctaccactgcgggaagttttaaatctcgttgatttatcccacagtgtgaataaactttttttttgtggatacacagtgtgaataaacaagtgtatatcattgtcttcttaataacgtgccagagtgcttgtaccctcgatctcttgttttatatattagtatatcataaatttttggttccactctcaatatttcacatagtttgagcatcttgtacttgctagtaaaaaggagaacatttattagttacttaggataaacatgcataaacataatcaagaacaaagaattatcttttcagggcaatgcttattacttatggcttgtaaggtacatccgaattttccttgtagagatatgctccagtaacttattattgcttatactttgatgcagaacatttactcaagtaagcacccagtggcaggaca

SEQ ID NO: 2129 - DNA, 8452 bp, Brachypodium distachyon
  Intron number 13 from transcript Bradi5g24900.2 (locus Bra di5g24900) derived from phytozome v7.0 (chr-ID Bd5; pos 26 403383 to 26411834 reverse strand)
taagcaacgtcaaggtaagcaggagggttgctcactatttctttgaaaggactgtttgaagatgctttggatttaactttgtatacattgttcttcaggcgaagtacatcaatagatattacggccatgcacatgaactgctgtgatgtcaaacatcgcatttcgtgtgagtaatatcatacactaagctatccaacttgaagaaatggcattgaaatttttgtcaggcgagggagacctgctggttggcatattcagctgggctctctttgttgtcctatcagataacccgttgcatctgaactctgttgcaggttcccttggttattctctttgtactgtgattttgtaacattctgggagatagttgtaaccgtcagaaggtagatcttgcaaaagctgaacaagtgtttggggacaatttattccctaataatcataagtaaaccttgggcgtgcagtccttgaatcttttgctgcaactcatcattcttgttacccttcataacctgtttggttgtctgtgcagccaaataatacaggttgcaacacatttgttgtgctcaatcttgtggtctgactttgttacatgtaacctcgctacatgaacagatccggtgcctataagatttttgatgttcaagcattctgtcaaatgcgtacatttgtgctgtgacttgcttcaactttgaaggcgaagtcgtgaggccgtgaccaacctgtcgcaggatattggactgttcagcattggcctcaaggcggccgtgtatattctctttcgagagaacaacgccaggcgaagggcgactgtttctggggcaattttgtttgctttacttaacgtcagttggtcattgtggtttgttaatttggatttaataaactgtagacaataaccgaacacaaatatttctttagaaatctgcacagttcagttgttagtccatcatcgttgttgagacttctgtcttacacacaccttattactcctggcaatacagagcaaagatacggcaggagaactggagaaagaggagcgcaccgctcgttccactacgagtcagcgagtctttgacaggtcggcataacaagtcaagtctggtggcaggcatgtcgtcatcggcatgctgtctggaggcaacctgccacatgcagcagagacacgccgttgcgtggcgtccactcttttttaccacgtcaccgtcccatccagttccggggaatcagtcggaatctgctgcagctttcttttcctcccccggattcctcgacggcaccgctagcagcagcagcagcgcgaggcggcgctgaccgggagtagcgatctacgccgcggggccctgctgcacggcagccgcccttgcactcctctcccccgtgcatctcgccggagcacgcacggtccatccaacgcaaaggagagcgcggccctcctccggtaagcaagcactcacaccgcgcatagactcgactcggctcgatcgctccgctgcctgcagccacccaccatcggctcgatggaatgcggcaccgaaccagcgagagaagctcgatcgcggtggtttaacaataaaatccccaacaaaaaggtctttcgagatgaggcattaaatgatgaatcgggcaaccagtgtatgctttggctggcgaaatgtgggcctagacagactttgccacgtagaatcactcaagctcaaagtccatggagagtcactcaagcagcaaactcctcttcactcgctgcaagaaagggacttcggttaagatgttgcatgcataaaaagaagaactgtagctcgtcggatgaggggcgtttggcaggagtttttgcgtttggctgaatccgccttctttcttttccctgacgtggaggcgctggccatcgacctcgttgtcattgcggcagcggcggcggcgattgagaagagaggacgaggaaacggagagctcaaacagaaaatagagaggacgaggaaacagatagaggaagatggccacgtttttatagaaggtttcgtgtaaaaatttccatccgccgcgacggcaagactccaaccaaacacccctgagccgacgtgtacaccacttataataaaatcaggactaaatggttcagtttcatagttttaggactaaactgataccgcgaaaataaaaataagactgcgggtgtatttagctcactttgttttttgttgaaatgcaaacttagtattactgatttactgtcagagaaaaaaaatcagtaacataaagggagggccggagtgaccaattccagccaagccccatgcgtcccaacccgtggtctaaaaaccatgggccgaatgtctgtcaaaaaagaacatgggccgaatgacaacggcaccaaagacttttgccatgtcggcccaacccgtcactctcaccaggtttgaatccggccgccccaaaccgacagcgcactccacgcagacatcgaacagaaacctcctcgcactctctggatccccgcgcccgcatccgatctgacggcccaggaccgcccccctccgatccgacggatcccgaagcccatcggacaccccaggccacgctccccccgccgccgtctctcctcttctccccgtcggctccccgcttcaaatttgcgtcgcgtccatttcacgcgccgcttcccccaaatcgaaactcatcccccctctgccaccaacgcataaatacaaatccccaaaagagatctcaatccccaatcggaccgagcgtaccgaaaccctaaccctagcagcaatccagacagcgagagagcgaggatatggcgcgtcccaagggcaagaagcgcgcggcagaggaccccccggcggaggcggaggcgaaggcgccggccgtgcggggccggccgaggaagagtgccaagacggagcccaagccgccggccgcgcggggtcggccgaagaagagtgccgacacggagcccaagccgcccaagcccgaggcggagtacttccccgagcagcgcaatctggtgaggatgcttccccgtgttattcgcttgcctgcctgccactcgtgatgcgtgcttcggcttgctaggtattcgtgtagccgagtaggattgggcgttattggtcttggtgctgctctttgctgcagagctttgcagtgttttgattaggagatgcgttggcgatccaaatgtttttgttgttgtgtgcggtactgaaacgtgagattgcactgcggttgttttgttgctagatttggttggagtataggatttgttcatttcactggagagtgtttatctcctggaatgcgtgctgttgatttggtgcatttgccactggtggtttttaattctccatgtgcatcgtgctgaagtttgtccactgcaatggtagtaactgatgtattctgaagtctttccatgtatcagatatgactgttaacagggaatgtttctgtgtccctaatgtaggctaaagtgtaagctatgatcataatgatgttttctacacatgttttgacacaggtgcaatgtaaggtttacagattttacaaaacaaatttctgttcggtcaatgataggcagattattttttactgcaactctctacacatttcatttgtttactggggtggccatttttagtagctgtgttatgatttggcttgtttgactgagttcgttagatgcttcacttgaaacaggatacaccttgtgcccttgtttatgattttgctatattgcttttgtcgcttctggcctaactgtctattgcttttttcaggaggatctttggttgtcggcatttcctattgggactgaggttcgtgtgcatttctgtccttgattttttctttgattctttattgcgtctggagtgacacttccacatgcacgcaaaatttgttttgcatttggccttacttctaatgtatatctctttctggtcctgtcatttgcagtgggaaaatattgataagataaaggagttcaactggaactttgaaaatttagaggtatgatggacacatattcttcagtcttccttttaatattaggttttcttacattgtggtacatggtttattgtttgtgaacagaaagctctagaagaaggtgggaagctttatgggaagacggtttacttatttggaagcactgagcgtaagtatgcttactcttgtgctacctttctagttatacttccagtctcttgacgcatattagcttggcaatattttagcgctgtgcagtaaactggtgttatcagttgcagcaggggcagcggcagttgtgttggcaggcttagccattatactcagattctttgttgttttcttctcttcacatttatttttgctttttctttattggattttctttgtgccatttttcctttaatacaaaatgatctgcatttgtacgtgtgtttgataaaaagctttttaaacggtcatctaggaatacatatttgctgtgaagttcaaatatcagaataatagttgaaagtgaaattcagtaaccatgttgtagagctactgttcaatggtttattaatgctgaaatattcgctgtgcatcccagtagcttcacaatatttatataatcagtctaatgggcttatttctgttggtatgcagctcagctattggatgttaatggtgaatcgaagatagtgcttattcctattgtagttgctgtaagtccgtgttgtttatcccattttaagttctggattatattgatagaaaatgcaaacacataaattctttcccagttacacatcatctttagtttcatgtttttctcatgtttgtgtcagccatgttatattaatacatgacggaaaatttgtactttgttatttataatgaccctagcctagttgtacttcaagttaaaagtggtcaactgtgcaggataggtaatgcatatgtttttttaatgattaacagttacaagtaagaaatctatgcacaaatggttgggagctccattaaccatgatggttgatgttactaaggtgactttgatactgcaagtctaaaatattcactggtctgggttcttttaaggacatttagtaccgttggccttttttatgcctgtcttaagtatttcttttcctagtatatcgtttatcactgtttggcctggtttctcatgtgtctgttttatgtttcactcatatacttgctaactttgccattctggtggattttataatctctcgtcttttcttcttcttttatgcaggttgactgtccattccctccatcagataaaattggtataaattctgtccaaagggagaatgaagaaatagtacctatgaaggcaatgaagatggcctggctaccttatgtccctctggaggatcggtacttccatcctatttatgtttaattatatttcttctgtttctggcgacaatatattcttgccttatttcccatgtaatcgtagttgcattttgttaattgactcctgatttgtctacaggctcagcaggattgacagtttaaaaacaaaaatattcactcttggctgcactcagcgaaggtcagtattatttctgctattttaatacctcaataaggatccatggttcagggccattttgttgcttttaattatttatatttgtgggggaacatggtcagacagtgacatggttttccacccatgttgagcctctatgttttttttaagacttgccacagcatcctaagtttatatttatggcaggtctgccctcaagcatctcaaaactgagcgagtcaagaagtttgactactgcatgccctgtaagctgaattgggattgtttttcataggcctgtcttctgtgtctgcagaaacatctattgttgcttacagattctgtggtaccattactgtacatgtgcttgtttggtccagtccaagaatatgtaaactacactgttcaaatatgtgcataatacttgtcagaaatgtgaccatgtcttagtttaatggtttgcaatgctgcagtatttgtcatgggatgacacacattttcctaatctttatttacttcattggggtcgcagtgaagtcacatgacgctagacaagtgtaatggtggtagactgtgatggatcggtttgctggtattcttttgctggactaatttctagaacaaaaatggcatcagtgttccaagaagtgtctggtacgagatgatatggcgtctataggctagacaggctcagtgtgggcctggccgggaatgagggagggtgcatcctagtgccagctgccttttaatatattgaatggggttgcgcatatttaatagcccacatccaagcttttttttcaacggtgtatatggttgatctttgatggtggtaaagagcggcaatcgtgaaactagcatagagtaatgtgatcacaatgcaagcatgccaagggcattgatcgcacaagaacccaacagacctgccaaaacctagttttcggatccccacacacatcgttacgttgtaccgctggttgattagaacgtttatgtgctcataaacctcttgcaatgatacttttcccgaggaaatgggcaggaacacttatcttctttccataatgttgcagattatatgccactcactcctcctgaagaagaagatgatacagttgtcaatatcatgtatcctctagaacccccggtaagcttctgtcagtaggtctatgacaccatgttagaaataattcatatataatcatgtcatgaatgaatgctatttctcttttcttcttaaaataggccgttcattattactcaaggaggactggaggagtcataattactgacagaaatttctaaatgtgtgcagcatgcagtctccgtaatcaagttatgatgactgaatctagttgtaggttgggaccaggggccagaatggcccctgcccccctaaaccctaatgtgacactgtaggccatatataacaacactttagagtggccatcccatatctattctactctttttggccccttctaaaatcttgctcagctctgcactggctgggatgcttttaattgtctcaattaatataattactatgcagtaatttaatggattttctggcaacctcagcttgggttatgaaagaatctgcatgccgtttctccagttaactttttggttctttctttggacctgtagaatttgtatcaattgcatgataaccagcctacgagttaatgctttcttgtgctgatgtggccgtccacggtagtgaggtcaaaacaaacccaaatactactggtgccacctactggcttaatcaacactaggctgttgatgatagacgcgtcatcggtgtaaacatactaagttgtttatcttatgccttcacgggcatgaatttatctctggcagctgctcatgcttatttagtgagctacctttttgggtaactggtttattggataactcatggttttgggcaaaatgggccttaaatcatgtttatttttatctgccaagctaaacagggataattatttcctgctattggtgccaacctttgatttctctgaacggactgctcatcccattatccctttttagctaatgcaatgcaatgtggaaactactcggaagtgtacataaatccttaagtagttgacttttcaccttttatttctaatactgtttaagtgttgctccaaatcactgtatttttcattttgcagatagtatgtgactttgactgggaaatggatgatatgacggtatgcgtggaattgttttggttctttctgatcctacccatggaagggcatctgtgttgaatcattgcatcacattgcaggattttattgatgagaaagttaaagatgaggttttaccagaagaggagaaagaaaaatttaaggtgcctgtgtattcaataaattttgcgtttgtctgttatacagaatatatttagcatagcctacagtaggtgcctgtgtattcaataaattttgcgtttgtctgttatacagaatatatttagcatagcctacagtcattaactcgttaaactccttccttaattgctgccacatttcattgacaggacttcatcaaggagagggttagagagaggaagagagagctgaaacaggtttgcagtgaagcaaactgttattaccttcaccaaagattttgatgtaaatgtaatactctatgtttctccaaaacttatgcaggctaaagatgccagaaagaaagctattgatgatctggatcctaagttgaaagaggcatatgcaaatatccgattttacaaattttatcctgtaaaaaccgatgacactcctgatgtaagcaacgtcaaggtaagcaggagggttgctcactatttctttgaaaggactgtttgaagatgctttggatttaactttgtatacattgttcttcaggcgaagtacatcaatagatattaccgcc

SEQ ID NO: 2130 - DNA, 2521 bp, Brachypodium distachyon
  Intron number 3 from transcript Bradi1g51960.1 (locus Brad i1g51960) derived from phytozome v7.0 (chr-ID Bd1; pos 504 00630 to 50403150)
aaatatctccaagacgcgattgaacggcacgacaggtataagctccattgttgcagcacattgaggcatagattcttgtcctctggccgtatgcttccaacaccctatgaagaagctgcccaaatagtaatggatgaccggacggaaacgtttattaactcactggtcagtaacgatgcagcagatcagcagcagctcaaggtggcatccgttcttggatctggatgtcttggtaaaactacacttgccaatgtgttgtacaacagaattgggatgcaatttgattgcagagctttcattcgagtgcccaaaaaccctgatatgaagagacttttccacgacttgttctcgcaactccaccacaagaagcagccactacctgccaattgtaatgagcttggcatcagtgacaatatcaacaattatctgcaagataaaaggtactggcccggcatcttcccattcactctcctttattttgtttttgttaaacctagtcttgtttttgttaaaccctccttctgtttttgttaagagtgaattccatttttgacacttaagtttcaggtttttgacagctttgaccccatttagtaaaattttcattttttgaccccatttaacaaaagttttatcacaaatgaccccatttaatttttttaaacctcattgttcgatctgaatgcatatatctgctgcaaacaaagaggagctagcgagatcttagtatgtcttctgataatcatgtctgagataacaaaattaacttatgctaatgcccgcagaggattcaacatccttgttctagtgtcttgttgcacgacatgattaccatggcattcagcgcatttagtgtcatagtgtgtagcaatatatgtcgttgttgtatattcaaattttgggagctagttaactctatttatgctagcacccttgcaatctgttggactatttagccacgtaaaaaaaattggcagaagggaatttatacgtccttacatgtgtttacggtgttgttctgatcttcctgatccttcgcctgcatcatcacctgcttcagtatgtcattcaggacttaattagtgtcgatgttatgggacacggtgaccttttgcttaaattgaacccagcagttccggtagagcgccaaggcagctgtgattttttccacgctgccgaatccgtatatgaacagctagcatgcatagatcttggctcccaccataaatgattcacttctaaagctccttcatgtccttttctactctcacgggctcttagatgccgacgagcccatggtcaaaaattaaatgggatcatccgtggcaaaacttttgctaaatggggtcaaaaagcggaaatctcattaaatggggtcaaagttgtcaaaaaaactgaaacttagggatcaaaaatgtaattcactcttttgttaattcttggcatgcaggtatttaattgttattgatggtttatgggatgcatcagtatgggatattattaaatatgcttttccgaaaggtaaccgtggaagcagagtaataacaactacacggattgaagatgtagcattaacatgttgctgtgataactcagagcatgtttttgagatgaaacctctcgacgatgagcactcaagaaagcttttctttaacagactttttggttctgaaagtagctgtcccaaagaattcaaacaagtttcagacgaaattgttgatatgtgtggcggtttgccgctcgcgataatcaacatagctagtcatttagcaaaccagcagaaagctgtatcaatggatttgctgatatacatacgtgattcattgaggtccgatctgcggtcaaattctacttcagaaagaacaaggcaagtactgaacatcagctacaataatcttcctgattgtctgaagacatgcttgctgtatcttggtatgtattcagagggatccatactgagcaaagatgatctggtgaagcaatgggtggctgaagggtttaccgcaagagaatggaaagagcaagatcaagacatgatggagagggctgcaggaaactatttcagtgaacttattgatagaagattcatccaacctacatataccgactacagcaataaggtagtgtcctgtatggttcatgacatggtacgtgatcttattgcacagaagtctgcagaacagaatttcattgtggtagtagattataatcgaaagaatatagctctttcccataaggtccgtcgactatctctccactttggtgaggcaagatatgccaagacaccagcaaacatcagaaagtcacaagttcgctcgcttggattttttggattattagagtgtatgccgtgtattggagagttcaaggttctccgtgttctaaaccttcaactatccggttgtcctggcgaccatgaccacatagacctcactgggatttctgaactgcttcagctgagatatttgaagattgaaagtgatgtctgcataaaactaccaaacaatatgcgaaggctgca

SEQ ID NO: 2131 - DNA, 4451 bp, Brachypodium distachyon
  Intron number 1 from transcript Bradi2g31140.1 (locus Brad i2g31140) derived from phytozome v7.0 (chr-ID Bd2; pos 309 59950 to 30964400 reverse strand)
gcctacgttaagaccctcaccgccgtcatcggaaggtatgcacacttctgtgaccttacttgatcaatcctgttcagttgaagcagtagtaacaacctgactaactgaaatcgtactttggtattctacttggtcgattttaatctggtttagttattcattggtctgcttttatttagattagctgaacgcactctgcatttccgtgaacaccagcattatccttgctcacttaggggcgtttggtagcttcaaaattaattttatcttgggattcctggtattccgaagtctgaacagcaggagtgagatagcacagcgggaatgttctcggaacctcagaatttgcctatttcaaaaggtaatgtgaaactcatgcattgctggaatcttgttcctctaacttttcagggttcttgtggccaagccatgaaccttatgagactatcctctgattccttggaattcttccaacattcgtgctatcaaacgttccttagggtgatataactgcatgcttaatttttcatttatgattaggtggatctttcatggtcccaattggcgttacctctgctacttgatgatttgcactttcttcatttttcttctaactgtttttgcagaatctgtttgctttatgggacctgaaatgactactctaccttatgttggctaaaaacacaagcaggttttattggtgcctagatgcattgccgtgtctattcaggcattctttgtcattaaatatgttttcgttgttctgcacagaagccatagccaaggatatcacggtgtcgccgtgacattgagttaagttggagggtgacaccatgtaccttcaccttgcttagagttggggaagccctaaagggtagataatttgtcagatagaagagacaaatcagattggtggatagaaacacaccatacaaatccaagtctacacctccctgcttcctctgaaccaatatcaatatgccaccaccgcattctcagcaagcttcccgctgcttcgctccttctgtcgcctccctctcctgatgtactctcagctgtccctttcctctgatctactctgctactcaccgcccatcatcctgtactgctctgcttctccctaggcaattgctgcctttgctactcatgacaagttgtggagtcaccagagaaatataagatgaggatcaggtggccaggaaatggatgcgatatcccgttagatttagagcaattagactacatacatggatgatggccttttaggccgtttatgtgtaatatgtgttttgtaagtgctgattgacaacactatcaaactgttgcaatgctgatgccttggtgcggtagggtttccgtgactcaccagagtggcctgagcccatgacaagcttacataaagcccagagataaataaggagtaaatactgcttgctgcactaaacctataattgatattgttgctggtcaaattcataatattacaccctttcatcaaatttaaatcgttctacacaaaaaattcacttcactccctagaaatacaatgttttttgcttaccccctccctatcattaaatctgagggagatggaggaggacaaagaagagggtttgtgcattttaatttgtttactagatccaggagcaacgattgtgtgactaaattatttggtgcggtgatattgggactggtaaggtggatatctattgctttgcatccatgattgtggttggatttcgcatgttatgatgtgatcaaggttaaagcatgcttccctagcccaaataagcgctaggttgcagctgaaagaggcgccttggccattggccccgtgaggttgatcacctgtaaaacatcaacgatggtgatggagaggtgggagggagcgaagggggagagaaggaggggtcttggaaggccgtcttcgctggctgctgctgttgctcatgcaatcatggtggacagagggcggtggctccatattgtgaagcagagctgaaccttaaccgaactaaagcagcagcttactggaccaaattggcctttggcatgtgtggcttccttttccactctatttcctttcttttgtatcctttttccctatgacgtcttcctccctgagcttcccagcttgctgctgcagctgcagttactcatgaccacttgtactagatgctaggcaaccacaaaacacccttctagtgccgttttgaaccttggattctaggcatgctgataatgatgccagcatccatgtgttgtcccaactagcaaaaccgtgtgacatggtgacaatggtggtaaaaccaccatatttgaatccagcctcaaggagtcaaatgatccaatgttagaagtttggggttcaagtaagccgattcgaagttcagtcggttccttggccaaccatggcttttaatgaaagtagattagcctttctcataaactatatagccgtatcctgtagaactgtctgatggcatcaaagtattccttacaaatttgggcagcttgctgctggttatcaaaccgatggacctaaaatccccggttgttattggcagtttggtgtggtatgaagatctggtactgtttcagggtccattttttccggtttttactggaaaagtcaatgttaaccaaactaatgagtgacaaatataacctgaccatttggcttgggcccattagcgcacactgtcagaactttgctttgcaccccttcatttcagcatggttcagtctaattcttctatactgagctggctgctctccgttcaacctcaccgagattacctcttaagttgccaataaattaattgccgtgattatcatacatttgattagttgattcgattgatgtacattttaagataaattttattttccataaagttccagactacaatgacacaagcgttcaaacaacttattcattcaaaaaccttctatagcagtgcacgagcatttagctagttgaagagaaagcttccacttcaataatattgaacatgcgctatcttacgaaacaagtagagtgcacttagtctcactgtgccttttatagtcagtgaagattattcctactattttcttccttatcttgtcagcgatacttactgcactacgcacttctccatggcccaaatgatcatctaaatcgtgactcatgggccatatacctttctcctaccttagcttccatcgatcttcccatctccctcactccagccgccgatggtcttcttcctgaccacacgcgccacatatcctcctcgccctcaccatagccatcatctttcctcattgcgacaccaaaggtacacagactccactgtagagcagaaagtagaccaggtcacagctctaggatgatctgttttttatgaggagacaagatggcatggacttatgtattgttgctgtaaatctttgttctaaacagggttgcttggttgggtgaggttctaattactggggatagcgcagtcgcctttgtcaatctggtggcaaggcttggccctgacatagaagagaggctatggggcttagggaactttgttttttccattccttgattgttaacaggatagatgctattccttttattagataagactgatttgaccgtgaaaagtatgattttacactttattaacaaactctgcttgcaattgttggcccatgacaactgttcacacaactgtaccccacggcactgtagcaatccctaggattgtggtagttccgtatgtttgttcccaatgggtttattccctagtaagcaagatgaaatttaaacaagcttatcaccatctcaagtcaagcacttgcctcctgtccttagttacctcctaagccattatggtgattgttgcagggcttatgtcagaacttttcaggcttataagcgcaaaaggcatgccttttatgtgacctaagtttggccaaagagtcccttaccgctattccacattggatgacagttggagctttttttaaaaagtgaccaacacaacactcttctgtttctgtgtggtctctctgtgtgtgttctaatacaaatgttattaggccccaaacagtaggataccaatattttccagaaaaatccagttgtctcaaacagaaaatcatttccttagtggaacttgagttggttggaatataagatccagccatttcttcattcatgctggtaatttaaaggttttgtttggacaatcttcatgtatgcttgatgatttggtgccactatggctgcacccttgtcgatctattcctttagtaaattaatttttacacttcatgttctaatcagtaactattggctataagagtatcttttagtcgatcttctaggttggcgtatactcttctcattgaatttccatgctctaattctttgtgcagtgaggaggaagcaaagaagaagatctactcagtat

SEQ ID NO: 2132 - DNA, 2531 bp, Brachypodium distachyon
  Intron number 1 from transcript Bradi1g49500.2 (locus Brad i1g49500) derived from phytozome v7.0 (chr-ID Bd1; pos 482 22298 to 48224828 reverse strand)
attgaggccgtggaggtggagcgagagctcgcgaggtgagatttttttggtctgttttatttcttctactccgcacgcgattgccccgcttagattgggagaaagggagacggggggaagcgggcgagcgagcgagcgattgccaccgggtagactgtgctgctcgccgatttctgcggggatttgtcttcctgttcgcggtggggttgtcgggggattttttcgccggggagagcgggcccgattcttccaatgcagcgcctggatttcttttggggccgcggtggaaattctgttacttgctcgtgttcttgaatctccttactttttttttttgctctattggatttcggattttgtttgggcggagttcaggctagggtttttatctgctactggtgaggaggagcgatttggggatttttatcttgctgcccttcttcggcctcgtcttgccaagcccaatcattttttccccaccttccctatacactactccaagtcctggacaccacctcatccttccaaatcttcgtcgctcgttacttgcacatggttctccatgtgttttgcttctttagtttttgttgatatcggttgttttctcctacgccattgctgaccctgggtggcagattggaggccgcaggcaaagttgttttccaggcttcatttgtaccttgtgttgtggccggagatccttattctaggatttttgttgttggaggatctgttttgtgtacagttctcaatttcagcttcatattgttcttgttttcgccccccttctttaaagaaattagtttctttttaactgagtagtatgttgtaaaatctgtcatagtaaaacttatgagtgtatcgctttctgtaaatttttgtttcataatcttgatgaaaaaggtcaaatagccaaaaaaagagagaaggaaagcttggtcaaagctgatatagacaaagaaaaattggaattacattttgtgtttgaagcgcgtagtcttggaggagtcgaccagccgtggaagctaaaaaacagtaactttttgtcttgcaaatgcactggatcttgagagttgctttgaccagctaaggaacgtctaaatattgtgttcctaaatgatcgtacggttttgtattgtgcagttcttctctttctttgcttgttttggccgttatttgagttagatcagaagaaagttgttacactgaactacgaaggttccttctgacagtgtgttacaattttgtgctcgttagcttgctctcctcaggaatacttgcggctgagttctgtttaaggtgaaccaagtctgcacctttagcttctgaactaagtgtgcatctctgtaacaagtaagtagaagtgctattacccagccaatttcgaaagaaaaaaacaatttcgacttctggactaaccccatgagtcatgactcatgagtattgcctgcatgataaccaacaggaacaccaattacctctgtaggaggaaaataatcacatgaaagaaagctgtagcagaagttaatgttcaatgccttaaatggatattgcagaacattttgccacctttcatggctctttgtgtgattcaaattccttgtgaatgctgatcaccttcaaattttctttccacgttcctttctgtactgaaggataaatttatcttttttggatttatttgattcttcggtagtaaatatttaatcattatattgaccttctctcccaattggttgagttaagtgttctctccatcttgttctgttttagttaggtggtgaactgctcattatttaacagtggaatttgttcttgtgatttccttttacttctgtctgttaactatccaggtggttggttttgtgaccttgcaagtttgcataagatgaccattgaagaacttctcatatgctgcactaccagctcccttttcctgcctacacctactgtcaagatgaatagaaagaatttctcaaagataaaagatgaatagaaagcagaactcactttgctgtaatgaacttgattatgtggtcgtgttaatgctatttaccaattcaaaactgtttttgttcttttgtttcacacattgctgtttttttattgcatctgtggactggtttgtaactcaaattgagatagtttatttgtcatcttctcctgcctaatctttgtgtctgtgttcttttggaaattgtttgacatgggttggaatgtaggtagttgtaaacttgtaattccttgtgaagttcaagttaatgtagttcacctgttagatctgatcggcatttacattttgatgactgctagtttgatctctgttgtgctgagaaaaaaaagctgctcctaatgttaaaacttagaagttagaattaggacattgttgagctgttggttcataagctgattggtttgagaaatttaatagtgacagtttccttgtttggttttcatgccttcagaatcttactgataaccctttatatttttcagtcaaaatatttgaagatccgcagtagtttcccttg

SEQ ID NO: 2133 - DNA, 6976 bp, Brachypodium distachyon
  Intron number 2 from transcript Bradi1g42030.1 (locus Brad i1g42030) derived from phytozome v7.0 (chr-ID Bd1; pos 388 44157 to 38851132)
gacgccacgtctggtaatctctctttttctttagccctgacaacggttcaacacttgtaactgtatcaaacatagatggaattaacttatggtctcttgatcacttttggcctgcgagggactattctttatggaacattagtatctttagagataaggagttgggcgactttagaagtaatgtgttcttgatgggaggtatatgaatgcttgagacactagttaaattaggaaggctatgaatggaattggactgctgagactggagtctttgttctcaatcagtcggaatggacctatgtcctctcacataaggttggcagtgtcagcacaaatgactgctaaacaatgacgctgcacgctgacttactagctttcttgttgttaaatctgttgcctctgatctgatcatttgtatgaccaaattatgacgagtatcgttaacaaggacctttaatctgatcatatataaactaagcattctgaatttgactgattcatgattgcattgactgacttatggaaaaacaaacgctcagtgcaataaatcatcaagtcgatgatgaagtggtaggttatgtacatgaatctggaatcccacatcgtggtaacaataaaatgacttcaatctttcttcagttgctgcacataggcacatagccctccaattacttagtgggatccgtcaataacacacccttgaggaatagacacccccaacaaggtcctctgttagcttccttggtccttgaatatagggacgtagaacttttgttccggcaatatcactggcatgacaccactttgcccaggcttcactaactttttcatgaccatccttgctcagtattctgccaatccgaatctgcttggtgtccggcaatgtgataattcaggatcgtggattaggaacagctcttgcattgtaaaacaattcatcaattgtaccaccaccacttccactgccatgtcagatgttcaactgccccttagtgctgaaagtgatgtttccttccatgattcattcaacggccgctgcaatttgtcctctttatcaaaagtcacgccaattacacggtgatccatggcatgcataacctctttttaaattctgaatttatgctcccggccttcccttcactttagcccttgttacccggctagatgctgtataagctaggcgcacctccaactttgcccgtccaggtcaatacttgcactccaagctgacagctacttctcccccttggtttgaagttacttgtcccccttggttcgataaattcttggcacttctgtcaactaaaattcgggcaacataaaactaccaaattttgttagatctccattttagtgcccagtgaactataacttaggaagctcatttatataaacaatctaacattattggagtgaactcatctatctaccacagaaaaaataaatcagcatttggatgtccttttcccataaaaaagatttagtgatgtgctaccagtttggtatctgaacgcctccgtgctctgcaaatttaagtaggacaccaaaaatcaaatgcactatagctattagaaatgttaatagctactgcaattagtttagaccgatcaaatatcatatgctcgccatcagtgaattaacaggggcatcacacacatacatttactagcccattcctttacctttcatacatacatttaattgcataaattttgagaaaattgattactcaaagcgataagaaaggcaatcagatgaatggtccacaaattgatatgaaattatttacattcgtaaccatgtaacttgtaaactgtaactttattgtttaaatttaaatgcagtaggagcctctcctgctgcttttcccggtcaaaaaaaaaaaacaaattacttacattcatagtctgcattaaaccttttcttatgaatctgttcaaatgttatgaagcatttatctacctccatgccgtgtctagggctctaggccttttatccttattcagctaatccaaggatgttgactgttctaagagttgtgttacaccgttataattcacatggttcaataagcgtcgcttaagcgtgcgaaagctctgatcgatggaaaaacgcctcgcttaggccctaaacaactacttaagcgttgataagggccattagcacaattctcttatgcaggggcggcttctcttacctcgacctaattccctccaaggatccctccaatttctccaatcccctggatttcctccaaggatcctgccaatttctccaattgcccttgatatcctacaaggatcccgccaatttctcctgagcgagcaacagaatcccgccaatttttccaattccccttgatttcctgcaaagatcctgccaatttctcaaaagcagagccgtacggaatgcttcagctgcgcttaagcttcaattcctctgtgcggtgcctcaccgctcgcttagcttactgcttttttgaaccatgatagttcatgtaacatctttggttgttttatgttatcctctgtagtttcagttttggattagcaagactcggtctcttaaagttgagatcctatagcagtgagtcgaggcttcccattgcgcacgtctctatttatttgcccgagtcaatcactgagaatcagtgctgcaattctatctcgtttacaacactaacttggtatcagtttaggccagatctctgccttctgccatgacgaaatccatctcctactcctctgatgagtccctctcttctcgaactccctctgtcatctatcaggttagcaccttggacattcgccacgtcatccacatcgctctcgacttgaattccacaagcttctactctcactggcactaccagatcggtctgcggattgagaagtatgacatcgaaaccacattgacctcaccgccccgaccttccccatggacagctggcagattattgatatgttcgtgaagtcgtggatccactccacggtttccccctccctcttcggcatgatcatggaccaaaagttgaccgctgctatgacctggatcgttgtggagacgttgtttgtcaacaacaagcgaccgcggcaataacaactgaggcacaaccttcatcacatcatggaagggctccattgtctactactgcgtcaagatcaagtaggtctccgatggtatggctgacgtgggtcttcccatgtctgacgatgatcttgtcgctgccctccgtggacttgacaaatgtcacaagttcactaggaagatcatcagcaccactgaggcggccatcagctacatccgcgccaccaccatgttcatgcaggacgggctctatgaggagatcgccatcgagcagcaagaggatgtctccctcgtctctgtgggttgcgacgcgaactcctccgcgacgtcgaaccctcacaagattgcttacggcccgcctgtttcaggcttctcgccattgccaaaccagggcaagcagaagcgcaaacggacgtctaactcactgcagcagcaagctccatcaatgcctcccccgtgctcgcatctcccgcgacatatatggtttatgtgtaccatttttccgatgccgcagacgatgatactgccttgtctaatggtgcccaacaaccttggtcagtggtcggttcgacgatgattggatgaccaaggatgtcgggagccatcgatcgagatggcatcatcatttgcggcataagaaaatggtacatatgaaccatacctgtataagggagatgcaggcatgggaggaggcgatgacagagctttctgctgccgtgacttagacgtccgtttgcgcttctgcttgccctgcgttggcgaaggcgagaagcatgaatcagacaggctgtagtctgtcttgtgagggtttgacgttgcggagaagttggcgatgcggctcacaaagagaaggacgatgtcctactacttggagagctcgtcctgcatgagcatggtggtggcgcggatgtagttgatggctggctcggtggtggcgatgatctttcccatgaacttgtgacgttcgtcatgtccacggaggagggcagcgacgaggtcattgtcagacatgggaagtcccacgtcagccctcggccagatcatcggagacctccttaatcttggtgcaatggtcaatgatggagcccttgcacgatgcgatgaagtttgtgcaacgtctccacgatggcctaggccataggaatggtcgccttttggtccatgatcatgccgaagacggaggaggaaactgtggagtggattcacgaacaaatcgatgatccgccaattgttgtccttgaggtcaatgtggttcctgatgtcatacttctcgatctgtagaccgatctagtagcgctagtgagagtagaggcccgtggaattcaggtcgagtgcgatgtgagcgacgtggcggatgtccaaggtgctgacttggtagacgacagagggagttcgagatgagaggggctcatcagaggctacggatttcgtcatggcagaaggcacaaatcgtggcctaaactgatgccatgttagggttagggttgtaaacgagatagaattgcaacactgattctcatagattgactcagacaaataaatagagagttacaacgagagggagagagacgtgcacaatgggaagccttgactcactgctatcggatctcaatctaggctaatctaaaactgaaactacagagaaagaggaggaaggataacagaaaacaaccaaagatgttacatgaaatataacagtctaacacctgtctttctttctcttttgcattcccatcccctactaactacctgtgacgaaatccctccaccttgctctgataccacttgccttggcctcgctgaacgctgcgttcatgagcagtggattacttttctgagtgatcccgtcccttgcttcttgattcgtgtcctacacggcatgcccaccgaagcctattcggtatctgcacgcggataccaggaacccgtcagactccccggcgcctgcacacgcgccccgcgccgcctgaatccgaccttcgcccccctgccgctggaaacagccctgtaagctagcgcctgcccttcaccgcctgcctaaagctgctcttttttctttctttgatctgttttgaatccgagcagaactcccacgtgagccttctgcctacatgcaatccttttcctttttctgttggaatccgtgcccagccatggcccatggcacatacgtgcacgaatccttcttttctggttgcacaccgactactaatgctcctcctctgcatgccattgcgctacgctcgcctgctgcccgttttattgcctgacacgaacatgccttggactctttgactcggacttccaatccaaccgctgcagcctctcccgacgagttaattccggtgtatgtcacttgttgcatgaacacgctgccgccgacacttgtaacaatcgcacccttgtgcaaattctatgcacaaacccctgttgcaccctggccacctgcatcgtcgacacaactcgtccaccgtgccacaatgccgccctttgctacacccgatccaccgctataccgtgatgcatcccgccccgatctatccggttgcccttgcgtctggtcgccggcttgatcgcgagctgaagccgtcgttcgatccgcgacgtcttcccagccactgtgtcggcccgatcaccacgcctggtcaatccttgccaactgcaacccatcgaacggttcaggccgcctgaagtgtccgactccaccgatcggaaatccgattgccgccatgctccatcttgcaccgcattggacgttccgcggcgcccgtcgagcatgatcctcgcacctcgcacaagatctcctgcatccctccaccttcgctccgataccacttgttacgaaatccctccaccttgctccgataccacttgttacgaaatccggtggatgcacgatcaaggatgacactgaggcacgatgtttgttaacgaggttcggccgaagactacgtcccagggcatgactacgggcgctcctccccccataatatcgcaacaccggcaaccctaggcaccggcacaagccgtcggctccccctgcgagcctattgctattatgttgtcatggtctctttgggctaccccgtggtggctttatataataggcccgggttacacgtgttcgactcgaacacctaaccctccgctaattccaagtccaattgtaaccctactcgtacacatattcgacacatatctcaacactaccaattctagattaaaaagaaactcaagattgaaggtgcctggtatttcctattgagtgttgtaattggatgagtacgatctcatggtgccgtagcttgcaaggaagataaaatggcatactcatataggactagttgggcacttgggctaccttatggcatgtgtagttcctgaaggaaccacattcacgtctattctacgctattctcataatgcccttccataaggttacaggtaatttttttgggaggaaaggtagttcacaaaccagtactaactactccctccgatcctaaattattgtcgaaatattacatgtatctagacgctttttaaaaatagatacattcatatttggacaaatttgagtcaataatttaggatcagagggtcatatatttttttacatttattttctctatgagtttggctttggtttatagggagattaccaacatgcctcttcatgagtcagcaaataactttataattggatctatagggtgctggtgcatattctaaaaaatattttaggcagcgtttttagacggttacattactgaataccgatgcttgattggtcctgctaattttatgtggttataattctgaaaagttgggcttgttccttttcttggcctcagcatagacgtggtttcgaaggcgtttgaggggaaat

SEQ ID NO: 2134 - DNA, 2047 bp, Brachypodium distachyon
  Intron number 1 from transcript Bradi1g12230.1 (locus Brad i1g12230) derived from phytozome v7.0 (chr-ID Bd1; pos 914 8974 to 9151020)
cctcgccgcagctcaggtatacattccaaccgaccatgtttccttttcaggagctctacgcggcttctattggatctggcgttggcgtgtaggtttggtccttaggtcggaccgattaactatgtgcatctgacttttgatagaatgatttgtgtattctatgaaagaagttttgatagaatgaattgcggtggttcgacgcatctagaatgatttgtgtattctatgaaagaagttttgatagaatgacttgaggtggttcaactcatctaggtacacaaattgtggatctgaaggagattttcgtaggttacccttgctttcctagatccgtgaaaacgaaccgtttctataatcgccgaagacctgtgcttctcgaataaccggctgcagttattttacccattctcaggcggttcagacaggggcatataacaaattggaaccctgttttaggagaagggtctgatttcaatcgatcctttccttgatgtgtttcatatagtctctcctttatatttggcctctggtgtattgtagaaacgaatcacacatttctaatcggtagtaaaatgattgcttctcgaataaccgattgcagattccagttcccattcggttcagacaggggcatataacaaatttgaatccttccattttttatgataaggatgctctgatttatatccatccttgctcagatggattcatatagacccacatagttagaagttatcatctgctcttgtgtgcttcagttagtaatctagtgaatcttgtctgatgtcatgatgtattatattcacttctgcctctttgagtagccattatggttttttataccgttttggcttagttaggaggcgcatactaaatgagcattccatgctcatccaggccttttgagggagcagccatctgtgttaactagatgtgctccgcaagcagcccgagatattcatagtttttatctccaatttagatcgtgtctgattgatgatgccattgctgtgtatcatgtttgcactgctaagacaaaggatatgacctatgtttgtctttatagcttcacaaagcttatggtattgcctttttgagtagccattatggtttcttcttttatgctgtcttggcttagttaggaggcgcacacttaatgagcattgcatgctcatccaggccttttggggggcagtcatctgtattaactagatgtgctccccaagcagcctgagatatttcatagtttttttcctccaagttaggttgtatcagtttgatgttatcattgttgtgtgtcatcttagaactgcgaaggcacattatctgacctatcatcattgcttcacaacgcttatggtatttgcctttttgagtagccattatggtcatacatactatcttggtttagttaaggggcatatagagatgttttcaatgaatccacttgaactgtattgcggggacctcacatatctctaataggagtgagcccaaacagtctttgacattttcgtcattctaattgctttggaagtttaaggttattagttttatgtgatcagttgatattttttcttcctgaagtgcagtgaccaaattggcttcagcctgtttaattgtgtctgatttaatttggccgttaattagatcaactacttcctctttctttttataagatgtcttggcaagccaagctaacttgccaaaacgtcctacgaaagggaatgttatggcttgcatacaaatgttgtaatgctaggcttcattcaatgattttatgttctattgatgtcattatctttgatccgtagtgtaactgaatgtacaattttttctactagtaaattctgctgatttgtctataccaatgcagtgtccgtagtataactgaatgtgcaatttttctaataaattctgctgttttatgtatagtgatgcagtgttcatatccggcaatacatttttggttggtatttaatattcttgatgtactcactttgcattaacaggaaggtctgcaccccgccctgctccacgtgctgct

SEQ ID NO: 2135 - DNA, 1068 bp, Brachypodium distachyon
  Intron number 2 from transcript Bradi3g48600.1 (locus Brad i3g48600) derived from phytozome v7.0 (chr-ID Bd3; pos 500 04769 to 50005836 reverse strand)
ccttggtttcaagactcccaaggaagccattgagggtaatgttctgtagtccatttctccaagcagtgctattgtttgggtggtctgcctgttccattttataatacctaatgttattgctccatattggttgtgtttcggtaatttcttcgtgtattccatatgctgtacgcctgtacggctagatatatgcctttcatttctgtagatcataaaaaactagtagtccgcaactatgtcaaattcaatgttgttttgtctgtttcgcttctgaggattatctatggctagcatctaattttacttgccgtgaaatatggtgtttcagctgtcaatcttttgcaccgttcgattatttttgagaatgctctaaggtattgtttttgtcatttaacatatttaggtttctaatatagaacggtctgaatgtttttatggcgatgacggcaaaatgtaatacttgtttctaaacatttgccgttactgatgtcttggctagagagttcatatccaattatttcttggctgtttgatactcttatctctttgtgtcgacgatttttttgagcctgaatagctttcaaatgttgagcactaaatttcatgtgtgctacctggcctaatctaaaactgtagtgcatttcttttctcttagtgatctttggcgcatttgatctatgaagttctctctgttctaatgatgtccctgaatctttgtgtatctgatgttatatgagtacaatatttttattctttgaattcatatgttcactgcgtggattactttcgcattcagtatttgtcgttttttaaggtattcagcatttgtgattgtttaggcttgcttcacatttttttcagattttgcaagaacacattagaacaactcaaatagcagaacttgtttgaattgtagtatttattaatcttttttgttgttgtttttgcattgtggtttaatcaatattgtttgtcccatccattgcactgcctggaaacttttgttgtactttgaattttaactgtccttaatttggcttgtgttacaggaacctacattgataagaa

SEQ ID NO: 2136 - DNA, 3225 bp, Brachypodium distachyon
  Intron number 1 from transcript Bradi3g51680.1 (locus Brad i3g51680) derived from phytozome v7.0 (chr-ID Bd3; pos 527 21307 to 52724531)
tcgtcggatcattctactctaaaaccaaggccgtatgccctgtgctcatttgacttgcttttacgctttgattatccgcatatgtgcttctatattgtagcaaagtgcaaatagatcgggtccgttttgctcaatttgtaatgtcaaaaccgtcaatgtcggattatgtgctgaaacgttgaagaaaagtatgatcattgagggaaatgtagcttgtcggtggctgagattccattgatgtgcaattgaggccttgcaaacttgagggggattttttaaatttcatgtcagtgctaatatttgattagttatcgtttagttagatccagtgtcttttgtggaatatctcagatatgtttgtccagacgattttaattatagtccttaaggttgacgatggcgttagcttgggttgacttaatcaaattgatgacagagtgtacaaaaaggatgtttacttatggggtctgcttgagttctctgagcattctaattggttttccacatccatgcagactagttatttgttttgataattgcacgctttaaatttttcacctcctttacagagcttggtaattttgatcaagcaaaggggttagtagcaagttcccattgaattaaatgtgaaagatcatgctttgtgcttggtgcacggacattgctgtcagagacattttatcttatcttttgatggttgctttttggtagtataaaattgtcgtctgttgctctgcgtgatgttggtttgaacaaataaattcttgaagtgcactataagtacagtagtcaaagccaatgtggtctgatataatttatcacattttctgcagcttagtccgttgttctagcctgatcgggtagaagaagataaaatgatctttatctttttctttactcttataacattttgagttggtgatcgtccgttcactccaccacctacttagattatgaggaaatcgccattattgcccatccattatgtatggtagatatatgaatcacagtcattgattatcggtgattggattggtgtatattgtgacataattgttacggatttaggggaatatgagtgctcacacagttaaaacaactcctgcatatttttaaattttcgtagcaacgcacgtgcatttagctagtaggttgagaagttgcgagtgaataaactgaatacgtgaattcgatgaaaaatataacggaaagaaaagagaatagtgcgatttgaggccaaggcccaagcagggagcgacttgggagtggggactaaactcttaccaggaaaaacctggtaaacgccccccgcacttactacaactagcctcttttccccccgagattttttaagtaattttttcgctcaagaaaactgccaagaactgcattagaaaccagtgcagagagagtagagactgctgcagaaaacaccgcaaaccaatgtaaaaatgaaatagactcaaagtgatgtacacattagtggaaaaaaagagagcagagaacaagtggtaaaaaaaaaatcctcgaaacatattcaatcgggatgcagtttcaaagctatcgttgaaataaatgcaatggtgaaaatgattattgttttggatgtacggtttgagagcagccaccttgtgaagtatccaaatctgttttaaaaggatgacgccatctatttaggaaggtagctctttccaaccaaggaatcatgtgcgggaagcctgaaggttttaggacaaagaaaaccaaaattaggtggtcggaacacccagaattggaaattaccaaaagtagaaggtctttactccaattcttgtgggtaaacatgcgcctgttagcatttcacatgatttattgggcttagcctcattattttaacttttacaatgtgctttagcctttcgaagatatcgtcgaaacaaacacaatggtggaaatgatttttggtttggacattctgtttgagagtagcgacgttttgaagtttccaaatctgttttaaaaaggatgacgccatctatttaggaaggtagctcgttctaaccaaggaatcatgcatgggaagccggaaggttttaggacaaagaaaaaccaaaattaggtggtgggaacaccaagaataggaaattgccaaaagtagaaggcgactccaattcttgtgggtaaaaaaaggcactcactagcatttgacataatttattgggcgtggcctcattattttaacttttagcctttgggcgattagagttagactaatagtaccagagtgtatttagtgtcaaggtgaaagaacttgtcaacaagtacagcatctcctgtgaactcaactgcctgtcacagattgtttctgtgatgtctcattatctatatccccttgtacacattcagtagggaaggtgcaatgttgttacttcgttggaactttggaaatgaagtaaacagccgtatagctattcaattgtcgatgtagtttgacaaactatttttgttcatgctgtttttctcgatacaataactccatgtggaccgttcatttttttaaaatagaatggctaaatgttcatttgtcagtttaggcagcagtcacataggagtaccattatgtaggtactttggtattgaaggaaattgcaattttgaaatagagagaattgtacttatgaaacgggcgtcagtttatatgtaattttcttcggggtggtgtggttgagtaattattagttctaaactattagttgcaaccagctagtgtttgtgtctttgcactgttttctgcatcaagcagctcaatctgaaaccttaattaaacatgttataaccgaaattttgtatgcaatcattcagttagcttctgaatcaatggcatattgaactcaattgccattgttttcgcaaaaaataactcaattgacatgtgagtgcagatccaaagagtgatcagagtcggatatgcggtaacttgaatagccggttaatgttgtacaactcaaagttaatacctattctgaacaaacagagagcagaaataacccatctgattttggtgaaaaagaaacacaccctgttatccgtgctgttgtgcttaaatttgcatgttatcatgctatctcacgatctcagattttcttggtagttgctgcttttaattagattaatggaacaggtatgtcatggtgaatctaatatttacctctaaacaggttgaggaactgctgaaaaactacgaaa

SEQ ID NO: 2137 - DNA, 36898 bp, Brachypodium distachyon
  Intron number 3 from transcript Bradi3g36340.1 (locus Brad i3g36340) derived from phytozome v7.0 (chr-ID Bd3; pos 386 00683 to 38637580 reverse strand)
aggtgaggagcaagacgcccaagggccagcaggcggtgaaggaggacgacctgagatccaccgctcaagttcttgcccaaggagctccaccgctcgccccacttcaaggacgagactttgtagatgttctccttgttagatatagttgctgtaacaacattgtaatctcggatatggcatgatgcaagctcctccttatcacttctcccgtgtaacaacgttgagatataaatacaacaccgcggcctccatagggggttggaacgcttcaccaaactttacatggtatcagagcttctcttccatccaatctaatctagcttcccatcaccaacctgccatccatggcttcctcctccaacagcccggcgtccctcggtgcgccgccgtcggagaagcttaccaaggagaaccatctcctgtggaaagcgcaggtgctcctagcagtgcgtggcgcgcacatgattggactgctcgacgactgaagccgagccggccaagaagatcaaggtcaccaaggatgaccagacgaccatagaagtcgccaatccagagtatgcctcctggcttaccaaggatcagcaggttcttggctacctgctgaactcactctcaaaggagatctgctgaactcactctccaaggagatcctcacgcaagtcatcagcatggagcatgccgctgaagtgtggggcacgattgagaagatgttctcatctcaatccagatcgcggatcacgaatctgcgccatgccctcgccaacaccaagaagggtaacatgactgcatcgcagtacatctccaagatgaaatcactaggctccgagcttgtggccgccggtcgcacgatttcagaagcggagctagttgaatatatgattgcgggtctcgaaattgagtataatgtcatggtggtgtcacggcagatgccataggatgtcttatgttggggccgaaggaggaaccggaggagagaggacgtgaagagaaacacgcacacacacacacacaagcactcacagatttacccaggttcggagccctcttgtagaggtaagactcctactcctgctttgttgtataaaccgagataaccagatctacaatggtgatccttgagcagttttcttgaggaagaagaagaagaaggggaaaccctagatgtctaagtgtgggatccctctccaggaaggggtagtgctctatttatggaccgcccatgtcacactgacatgtgggtcaagggctaacgttatcttctatgggccacgccgggcacgcgccttggttccctccgggtggcaccgcaggagataagacaactttacttttcctggcgtcctgcaataagtacagcagcctcttgcccggcttccgtcactgattctctttcggtgcttctctgcgcagtcgcctggcaccgcaacgtaagcaacgactgctttcctgtgataaagagaacgctgctttactttgcaccatgagataaggataagactgttgagccatctcggcggtggccgagatcaaagtactcgtccttatcctgcaatcacataagacaagatagtcatgccggcatacacttggtatgtcggcttagtattagcttggcttaaggatgccggcgcacatgcccgtgccggttttgccttcgtcatctcggctaaagtgtgtcgtcatgaccctacccgaggtcatccccccgacactagtccccgaagctgttgcggtccggcagggaagaatgtcgggccacgacagcttcccacacacaaaccaccgaagctcaccagggcttagccgaaaaggatgccgagacagccccgagttcttcttagccgagatcaagttattccgacataccgagttggcgtgcttatttagcgtcgagccgagattcttttctccttcatggccaacagtagaaaactcgtttctgccgacattagtgccacctgttgcttgtactccgcactccgcttaaataacgggaagataagacccgaagtactgccggcgcgtcttttgaggcgagcgcgtcatcccatcggacagtaaaaccgacaggccattaagagaggaatatcggttcccacgcagatccttatcctcccggattcgacgggactaactacgccacaccgcgcagtaaccgagcgcgtgcgcgttaatggggttgattgcccccatgatcatgcgcgacccttccgttggccacaggggtcatgggcgcggaagatccgcgcccactagttgcgctgcgggtataaatagagggagcgggcgagggtgaaaacccttcgcactcccgcaacactctcactctctcctgctcttctctgctcctcgcttgctccgtcattgctgctaggtccgagctcttccgccgccgtgcttcctaggtctcatcgaccgagctcgccaccgcatcctcgcccgcgctcgattagctttccgccgccgcttccttgctcactcgggccttgcgccaccgtcctttcaccagagaaactaaacctagatccagtttccaacaatggcttcttcttcccgtgccgccgccgccgctgcccccgctgctcagcacaccgaggaggagacgggctcggagcgagctggttgggaaggctccgatgtctccccggcggacatcgagtggctctgccgctccaggcggatcccggaggaggtggagtgccggattcccggcgatgaaaccgtgccgacacctgaacccggtgagcatgtcgtcttcctcgctcatttcgaacgcggctttgctctgccggctagtgatttcactaggaaatttttagacttcttcggccttctgtcgcaccaccttccggcaaacgccattcttacactcggcgtttttcacttgctgtgaggcctatctcggcctctggccttccatcgacttgtgggccaaatatttcacgtttcggccccaagttcttcccgataaagataatcccgacgccactaagccgctgacccagcgcggcgccgccaccgtcataccccgcgaggctcggccttccctcggatctagggtcttgagtcctgcaagaaatggctcaagaatttcttctatgtcaagaactcctccgacatcaacaaggtcagcttgccgagattcgtagtcggccctcccgaggagaagaagaactggaagtatgatccgaaggacacccttcccgagatcaacgagatccacgccggcatcctcgaactcaaggccgaagggatgatggctgatgatttgctggcaaccttcgtgtaccggtggttgtgcccgctccaaagccggacacacaagatgtgtttttacggcgggaagtttgacccaaaccgggtgtcaaccgttcggctcgacaaggctgaagtccggcgccgggttaaggcaatcgcgaagacgagtttgcccgagcactgggaattgtgtatgccggcgtacagtcggaagcaccgtctgcccccggtgagtttttatttatatatgtcttctgttcttatccgacatatggttatgctggctttcatctgacaaagagttatctcggcactacttgatttctatgtgcaaaggttcacccttcagcacaatgaagacgggaaatccccagacaagtgctttgggagccaacgcgtgatcatcgatcatgaagatccggactcggaggatcacatgccgatcgctcatgccggcccccatcgcaccgaaggtaataactcccggcatcgtctcatagttattatcacacttatcattaaaatgcttacgccttcattaatcctgaaacagccgactcggatgatcccaccgctgttgaggcgtcgggtccagctgccgctgcggcgccggcctgtgaaaaacgcactgccgagagggatcttccaagaactatgaaacggaagaaagtcgcctctcgtggaccaaagccgaagcccatgaccgttgggtaaggctttcaacatctcaatccttggtgtcggttttcttcttaactatcattaaaataaccaactctcattcctgcagaggctctgacagccactcagtctcagacgtgcatcgcgtctgggatcccggcagctccatctccccatgccgaacctgcaactcaggccacgagagagaccgagactgctgcggatccgacatcccccgtccgggatgtcggcccgagcatcgacgcttcgagcgtcgcacaagccgggatgtctgcagccgggactgctccttcatcggcggcaaccgagactccttagcagccggccacagagtgccaagaaccgcagactacaacaacaccgccgtcattgccaccgcagccgcaagctacccaactagcggctgtgcaagctaggagaactaggagctccgctatccccgcaggacaagcgcctccgagttccccagctcacagtctgcctggggcaacaagggagttcccctcaggacgaccagcgggcaaagctaggggtcgctgggccagttcgtaatggactggaacaacgctggcagttacgaggtgacctccagcaccctctagacagcggcagagccctctagtggggcccgcacctgtggcgactccggagtctgtgtcggcccagatgttccaggcaagggttgccttgtttgagtccagccgagctgctgaggtacgacaaattctttgaagtttttactttatttttagtgtccatactcctagtccccgaggttgagggcgagcaagaattagtcggcctgaagcttattttagaaaacttcaaacactctgcagcacttaaaaacttcaaacaccattccccgagattcaggccgggtttagaatagtcggcctgaagctttaaaactttaaacacttattccccgagattcaggccgggtttataatagtcggcctgaagcttaaaaacttcaaacacttattccccgagatttaggccgggtttagaatagttggcctgaagcttaaaaacttcaaacacttattccccgagattcaggccatgtttttagcatagtcggcctgaagctaataactgttgacttcccactgcaatagaattaattgttgattattgtcttgcagacctgcatgaacaagcgcactgccacctttaaggtcctgttggcgaagcacaagaagctggcggcagagcacaaggctttggtggccgagcgtcagagccagagtaagtacatttttactgacataaaaactttgcccgaatattaatccactgcgaaaactaatatgtgctctcgttcgcagtcggggacaatgctcaagtgtcggagctcttgaagcgcgtcgttgaagtacaaggtacaagcttgtacttatcccgggtttcatccattttaaagtcaagcttctgtaacacacgtctgctaaaccgatgagaagactcagctaaaagagcagcaccgggacaaactggcccggctgaaggcgcataagaccgaggtaggtcaacttacctcggctctgtctaaccaagccgacgagaagatcctccttgaaggcgaagtgcagaaatgcaaggatcttgtcgccgaggtcgagacccgcgccacttctgccgagaaggagaaggccgagaacgcccgcctgctcagcgtgtgccggcgtgacctcatcaaaatcgacgcaatgctgactagtaagttgtccttgtccaaatctcttcctctgatcatttgtccgaaaacagcaatagggtgccgagactcattactatatttttgcctttgtcagaaattttcccacaatctgttgagactgcccaagctgccgtgatcaaggcccgtaaaaggagggatccagccggggcagtacccttcgaatatgacttggaggattacttggtcagcattgcgagccgggttaagcctctaaagtcgttcggggtaaacatgctcaatgctggcatccgggccttccgagcgttgtggccgggagaataagtgtaacatcccaaaatttcaaattcttacatgtgcattgcatccatgagcatcatgccacaattgcatatttgaattcaattttgaatctcaaaaggctttaaaagattttatttcaatttaaaccctagggttttcacccatttgagctttggatcctcaaaccaatagggtttatctataaaaggggtttatttcatacataagctatcccataatttttggataattatttggagttgaaaaaatatgttatttaaatagttatatagccctaaaggcatttatagggcaaatgtatttttatatattttattttgaggggaaattactctcaaatgttgaatcatgatagaacatgattttacaaattttctggaatttatttggaccaatttggagttcaaaatcaaaagatatgaaagaaatgagaaaaaggaaaaagagaaaaaaaaagggaaaaccggaccggcccggccaaatgggccgaaccggcccagcttcgcccgcgcccgatctggaccgaaccagcccagcgcgcgcgcacccgcgtgagccaccgacaggtgggccccgcctgtcggggtcgtcttccccgcagggaaaccctcgcgcgtcatgccggccaacccgcgcgcgccgtcgccgccgccatcgccgttcccgttgatttcggccttcccgaaatcgcccgagcgcgtccctttaaagcccggagccccctctcttctttccctctatttgccctcactcgcacgcgcccacgccgccgcgatttctcgccgtagctcgccgccgcctgccgccgttccgagctcgtcgccgactgcacggtacaccatggacaaccaaacctcacccctctctttcctctctttcttgaggttcttgtgacgtgcgccgtttccttttttgtccaccgcagccgtcgcccgttgctcgccggagctccgccgccgcccgcagcgcctccgttgtcctagctgccgactccgtcgcgcccgagccctgccgacgccgccgtccgctccgcctcgacgcgccgcgccttccccgcgcttccccgagccgctagctccgccaaaacagcccgcgccaccgccgcccgagctcgcgtcgtcgccggaaccgtagcgccgccggtaaaccctcatgtcaatctcgtccgttggatcttgatcaacggccgagattagatccagttaattcttttaatcaaaccggtaccgtccaattagaagctgacacgtggcactttaatagaaaaataaaaatgtaattttaatcccccggtttaattaaatggcacttttgcagaaaagcccctctaacttcaaatgcttgtaacttttaaaccctttggccaatttgacaaagtttacctttttggaaagctctcaacctgtagaatcttttggcactgtttaaatttaaatctgaatattttaatcacagtcaatttacagaatagggtttaatgtcatttaattcacaactaattatttataaatcctttttaattgaaaccagtgcccaaaaatttgttttattatcctctatccattgggatagagacataaatattttgaattaaattatttggctgatgccaataaaactataatttagggttttaatcaattgtttttgcctttttgtttaaaaccctaatacatttgttttaattacttatgcttaggatcagttgatcacccaaataaaataaacccaatcatgtcacatgtttatattgcatcatagcatacattcttttgtcgtgatttgaattgtgtgtgtatattgtttgtttcgtatagttttctcgcagagcgaaccttgtgattgtgacgagtgtttgaactccaactgctaccaaggcaagttcactttaatcatatcgtattactgtttgtttttaaaatacttatgcattagagttgtttgtagaaatgcatcgataggactattactcgtacttatgctagctatgacttgacctattagtgataggattacctttgccattacccttccaccaattgccatcgtaagtagttggatgctatgctatgttagtatacgtgggagggaatctcaattaccatgaaactgttattatgaagtattttggaaacctgacaaaaacaactttaatgaaccgtcctgggtgggctgctttgaggaattggagatgtatgcgacgtcaggtccatttctatgggtccatttctgtgagtcgtctcgccatttctatgggagcgcctacgtcgcaaatgaggaatgccactcggggtaaccaaagactggactagtttcctgtttagtagcttccagtacaaccacatggtaatatgggctctgccaagatgaatataagacatatgatcctggatccgaaggattgtgcagatgtagccgtgtaggtgggaacgtaggtccctcaggtggtctgggtgattatggtctgaaaattcctgtaatcgatgccgttgctactctaccctgaggacaacaagggattaagacgtcgatttctgtggggaatgtgtacaacctctcgagagtgtcaaactaagtacttagccatgtccccggttatggacaattatgagcaactagatattggggctgtaaggaaggtctcactcattccaatttctaaataaaatgaatgtttgaacttgggtttaggagcatctatgtgtctactcgctgtccttagattaataggagcatcggtgtttctacccggtgtccactagttaacaatattgtaacattcaattgtagtaggataaactatgttttgctaccatgccataaagcctgaaccccactatacctcaattgcatatacttggtaggatctgttataacttccaggtgaacttgccaatacattcaatgtattgaccacgtagtggctgcaattaataatgcaggtgaatctgacgaagagtgaggttcgtcgatgttctttgggtcatgtgcttacattccaacatgctctctcctctgggagtagttaaggcccatttgttctaccctttttccgctgcagtttttgaaaacaatgtttaataatgttgaaaccgtattttgtttatgctggcctaaggggtcatgcaagtttgtaagtacaattaattctggatgatacgatgtaataaagtacttttgacctttgtatcttggtattacatcccgaaactgtgtgtgctagtgagtcgatccagggactagcacaaataagcacagagatcgaaccctgtaagggggggggtcgcttcaagaagctccgaccggcatcccggaattggcgaagcgccttctggaggtggaggaccggctgaacgagtggcgggaatcggccgctcatgtcggcgccgacgaggctttgtcgtttgtactctcttggtacgacggcatcaacctcgacgtgctgcaatcgatgcgagtcggctccccattcctctcagattcggaactcattgcgaaacggcaggagcgggcctactcctttatccaatatgccgatgtgcataaatttgtggagggcccggtgtcagaagcagatgcaaaaatggccgaggaagacgaagaagaagtcgacgaagagattgtcgtcgagtcggcttctactacaacggacgctccgagttccggcgccgccaatccttctgtttcattttagcatgtcggaataaatattttaagattatcagatccccgggatgccgggtgcacatgtaaccgggttaaaacaattttgtttgtgaagaaccatacttttaatttatttaagtcttttaattatcgagttcccgaccgagtccctgagtttatcttttctgttggtgaaattttatgactccagctctttgtctgccttgtcggtgttcgacgtatgaatcgcgaagtcatagaacaaccctttcaaaaagttaaactcgacaaattcgcttggcaatactcgagacaagaatgaaatgccgggttaagtaaaacaacgcgcatctcggctcgcttttttgcttgtttccgcaatcgtttttcatgtgtccagttatctcgtacccaatctctagcttgccatgaagccgggttgcggacaacagcttagtcatagaggggattttcaatactgacacactactaaatcgacataagattacacaaccaagccatgccgacatacaaatagataatcgcaattcaatactttaacaacatgggagtccctgagtcccttttaagaacccgacggataatttcattgtctcaaaacattcaacataagggaaaaacgatacaaatactcatctttcaagtatagaacggacgaagcaaagctacgttccatggcctcttggtcttctcgcttgacctgtccatcatgtttgctttgggatcctgcgcatctataagatagtaggaatcgttgtgtagcgctttgctcacaatgaagggtccttcccatggaggtgacagtttatgcatgtcggctgtgcgctacacaagtcggagcacgaggtctccttcccggaattctcgcgggtttaccctccggctgtgataacgccttaggtgttattgatagatggctgaccgagatagagccaaatcccgtgcttcttcgagcaggtcgacatcattttctcgggcctcttttacctcggccttcgtatatatggtcactcgcggagagtcatgttcaatgtcggctggtaagacaacttccgccccgtacacgaggaaaaatggcgtgtagcctgtagagcgatttggagttgtcctgagactccatagcacagctgggagttcatctaatcagcatcctggagtgcattccagtggctcaatcaaccgaggttttatgtcggctagaaccatgccgtttgctctttcaacctgtccgttggactgaggatgtgccacgtaggcgacgtctagccggattttcttttccgcgcaaaatcgcgcaaaaggtcctttcgcgaagtttgttccgttatccgtaatgacactgtgggggtaaccatacctcaagatgatgtccttcgagaatgataccgcggtcttgccgtcacactttcgtatcggcttcacttcgatccatttgctgaacttgtcaaccaggaccaaaatatgtgtcatgcctcctcgcgcccgcttgaaaggtcccaccatatccaaacaccaaacagcaaatggccaagtgattggaatagttttgagctcagatgccggcatgtgaatcttcctggcatatctctggcaaccgttgcatttccggaccatgtcttctgcttcctgtagcacactcggccagtagaaaccgtgccggaatgccttgcccaccaatgttcttgaagacgcatggtgaccgcactctccctgatgaatatctcggagtatctcttgcccttctgccggctcctggtgtcgccgtcgcggagcatcctcggcccgcgactcaactcgctgcccggcgcgggcggcaccgtgcgtgctcgcgtgactggccccggcattgggggcagccggtcccctcggccgattgtcggcagacggccgaggaggcgggggaggcagctgtgtctgctgcaccctcgagggctcggggttctcctgagcccccgactcgagtcgcatgtcatgcgaccgcgtgtgcgccgctggggcttcacgcgggtctatacgaggatcaccagcccgcttggggggcatggtgactattctcgtcggcgaagaaggcgaggccgatgtcgatgcaaacgatgctgccggcgaccaccggcaggctcttttcccgcgccccctacctggcgcgccagatgtcgtcgcacggtgctccgaatccgggggcgtgcggtcacggcccccttttaggttcggtaggggcgtcggggttcaccccggcgaaatgaagtattaaaagtgcgcgctaatcaaagaacagatacacgcacgtttttaccgaggttcgggccacccggaggtgtaaaaccctacgtcttgcttgtctgagctggtattggttttgaatcaagtgtttataggttgccgggtaagttcctggacaccctctccctttggctaggtactccttactatctctgctaatgctagaggctaactgtcggttgatcgaactcaaccgaaccctaccgtctactggaaccaactgagattccaacccaacgaagcccttgaccgttggcgggggtcctccttttatactcaaggggatgccacaggtgccacggtgcatgggctacaagtgtcgagcggggaggcatacaactcccccccggtgagctggtggcgcgcatggacgccacctcggccgctaggggtctaaaaccctagtgtaagattggactgccactgttcacttgatcggacgggtaacgccccgtcggtcggctcatttaatgagccgtgcgccttactccttgccccggtggggccgcgcaccccacgcgcgccacgcgcccgcgtggcgctgttgatctgcctactgggccccacgcttgaggcgggggcatgcgtccgggaactccctgtcccggcaagtcgctccctgggaagcgcctcggcccaacgcacccgggaacctccccctgggaagcggcttcccgggaagtgcccacgcgggaatattccccgaagccccgctagcccttccgggctggtagcttgccgggctgctcgtagccgctgcccgggatggaacttccccgggaacccagggacggggcccacgcgtcacgcagcggtggtaccccgggtgccactggtgcgacagtagcccccgggcgtgggccggcatcacctgctcccggatgagtctcccccaggtcggttgccgggttacgcccttaaccgacgtgtgggccccggtctgccgcgggcccgcgtcccttcgctgccccgtgtatggcgctgttacagacggaaagttaaggccactccacgcatcactcctaatgacgggaagttaaggccactccatgctttccatggcgcccccaccaccagaaaggagaaggaggtccaggtttcaaagaaagccgcgggcagcaagagtgaagcggcaaccaaggcggccgccgccaaggaccaaaagaggcgggagatgcgggccgcggtcgctttcttccgccccggctacaacaacgaggcgctggggaaactctggcacgccatcgcctccaacttcaacgagcacggggagacgctgatcttcccggcgggcgtcgagcgactaggacaacgacttccgggtgttcgcgcgcttcctcctctgcggcctggtgccgcccttctcactattcctccacgcactgatggagtcttaccatctgcgggtggcgcagctccaccccacgtcgctattcctcctcgccaccttccagttcctctgcgaggtgttcgtgggggtgatgccatcggtggggctcttccgccactacttctacccccgcattgataacgcgaaggcaatgtcgtcgggggtggtattccgcgcccgcgaccagatgaagtccgaattcatcgtccggtcggggaagaaaatcgaaaaggagtggcagagcgattggtgttgggtctgagtggaggacccctaggagttcatccagtcgtcgacggagctgccgcaaccccagaacgactggtaggacaggtaccaccgcaacgccgacctcctccccatcgtggagaagatcaaggcgctgtggctagcggggctcaccgacgtggacgtggcacgcacctttgtccatcggcgcatagccccgctgcagctacgctcccggcctgtgtggatgtacacgggtcccggggacaggacatgcctccagcaggacgacgtggacttggagaccctcaggacgtgggtgagggggatctccggcgagatcttccaatcaacggagttcccgccaggggtttcttgtctccacgctggcgtcaaggcgctcagtgatatcgtcggcgccttcccgccctgcaacgagtgggggttgatggacgacacccccactcgggtcccgcacgctcccccgcaagcaccccgcgagaagcaggtgctcgaggagagcgggggcggatctgagcccagctggccctccctccagtcgctggacgacgaggcgggccaggcggctgcgtccccggaggtcgtcgccgtggacgacgacgatgaaagccgcgacagtgcgcccctgatcgtgaggaggtcgagggcgtttgcagcagccgcagccatctcctcgacggcgacgtccgccccggcagcggccaccaaccttgcggcaacagtcgcttcagggacgcccgtcgatacctcggcagcggcctccgcctcaacggcagccgccagcaccatggcggcagctgctcccagggcgcccgtcggtactccggtagcgcccgcgtccgcaggggtcgccggagtctcggcaacggccctcgccccagtggcgggagcctccccaaggtcggctctcggcaccgcggcggcatcaccgttgacacccgggactctccgggtcacgacgactcagcgggcgcccccggtgccgcccgctcggggagtcttccggggcttcgcgctccggcgtaaccccccgaagtccaactcgccggcgggtgccagcaagagggtgaggagcgattccccgcccggcacaccaagcaagagggcacgcgccgatgcgagcagcgccgccgaccccaccgccgcaggggttggcagcgacgcgatcgtgccccctgacggcccagcccccacggaggcagggccggcaaccggtatgtcttcgttacttatccgcagctgcaattttctgttagccaaactcatgaacgtaccttttttcgcagtgagcggtagctcgcccgcggcaagcctcttggacgctcctgccggcgcaggcgaggcaggagaggctccccccgcaagcccgacagctgcgcaaggtaaccatcctggtctcctttgtccgtttttgatagtcacgttactcgccgatcctcatgcttctcatcgtcgcagccacaagtgcgcccacacctggaatgggcgcgaccgtggtcgatcttgacccgatcgtcgaagtcgcgggggcggaggtggagccggaaccggctctcacgtcaagccccgccgatgcggaggcaggggcagcggtggacaccgccgccgctgagacgacacccggcgacggcccgtagctgcggatgtgactggcgcgggctcacctgccgcccagcaggggacagcccccgccgggagcagggaggcttccccagccccgaggtccctgggcgcaggcacaggggaagttgccggggaaggacagcaagacccccgggagctggctggtgaccccgcacacagcctcacatcggcagcgggggcttcatcatcctcggcggctctccccggtaccgacctcggcaccctcgccggggtcgcttggaaccccctcacctgggatccgagcatcttcgagcgggggcaccggttcctggacgccgttagggaccagcaacaggccttcgtcaccaccttcaacgaggtgagggagcatcacgctgccgccaagaaccaagttggcgaggtgcgggaggccatggagagagagcggcgagaattgtcccggctgcgcgaggagatgcacctcgccgaggaggaggcgcggctggcccggcaagccctggaggacgtccgggagcctatggtcccggaggccgagctccaccggcagctggaggcccaacgcatggagctccaggggaagctcgactcaatggcggccaccctcgaggcgaccaagaaggaacatgccgaggtggtcgcggcggcccagacccggctagacgagaagagtgtcctgatcgccaactatcgtggcaaaatccaaggccttcgcgccatgctggaggtgcaagtcaaggccaccgaagacgcggtaggagcggcggctcggccggagaccgagctcggctccgccaaggacagagcggccaggcttgagaccgagctggccaccgtccgggaggagctcgtcaagccaggcgaggacaatgtggccaaggccacagagttcgagaagctggcgggccacctcagcaaggccaaggaggctgccgtcaacgcccggcttcatcacggcacgctaatcggtcagcggaaaatcgagatcgataagctgctgaagatcgcccagtcgctgtgcgacctgctgcccaagttcgagctgcaggcagcggaagtggacgggacagatgtcacgacgctgatccccttcttctccgatctgatgggaaagcttggggcgctcgacgtctggatcgcccagtacggcgccaacgaagtcgccaactgtgcttgggaggttgccgggacaatcctcccgcggattcatctccgggacccggagtttcccttcgagtccctgctggacgcttggtctgacagcgaggacgagcccacgcacacccaagcagtgcgcgagttcgttgacgaggtggtcgagcggatggagatgaagccggagccaaatctccccaccgacccctcggccgaagacggcggcaactagttgccgcagcccccagccgtgcttgttgctccccaatgtatcttcttttgtttgctttccctgcaagtgtggcgcttatcattgtttgaacaattatacttcggattaggccatgtaatcgttcgactcttagtcaattaagtttttcgacatgttcattgttcccggtgctgtctagcggggcggcccttttagccttcgtgcattttgccttgtgttgcaggggactcgcgcgcctcacccttgactagactagggacccgggacggacccgcggtgccgacctggggccaagcggtagcggggagccactccactcgcagggtaactattccaagccgtgcccttccgggacggacccgcaaagccacacggggagcgcactccccccgcaagcgtccttttaacactctggctatgcacagaatctgggaccacacccaacgagacagtgctcaattccgttcagttcttagcgaattcggcattcatgttcaggcaccgacaagccgtcttcggtttccagccggacaacccccaacctggtcacctgcactacccggaaggggccctcccatttcggagtcaacttgttcctggccttcgttccttgtatccggcgcaggacaaggtcgccgttctcgagcccccggggacggactcgcctgtcgtgataacgacggagtccctgctcgcacagcagcccgacattgaagctcttcgatgaagtttagatcggcaaccctttggtcgtgttggctggtgtcgccgtacgcgcgtacccggggagatccgtgcttgagctcgagaggcagcaccgcttctgccccgtagacaaaggcgaaaggagtttcgcccgttgcccgactaggtgtggtcctgattgcgttggcttgttccgcctgtccgttacaccttgggtgagcaacggacgcgaaacgcagcttagtgcccatgtcttcgcagtatgcctggaacgctgcacttgtgaactgtgtgccgttgtcggtgatgatgctcttaggcacagcaaaccggcacacaatgcctttgaagaacttgatggccgcctgggcggtcaccttccgcactggttccacctccacccacttggagaacttgtcgatggctacgaacagatattcgtaaccgccaactgcccttggtaggttaccgacgatgtcgagcccctagaccgcgaacggccacgaggaagggatgacatgtagggtctgcgccggctggttgctcttcttcgaatagaactggcatgcttcgcacgtcctcaccagctgctccgcgtcggccagggccgtgggccagtagaagccgtgttgaaacgccttgccggctaaagcccgggaggccacatggtgtgagcatgtgcctcggtgtatgtcttccaacagtgcgtgcccttcatcctgcggcacgcagataagcttgacaccgtttgcacgccttcggtagaggttcccatccaccatagtctacatcttggcttgccgcgctactcgctctgcggcgacgtcatcttccgggagagcccctcctttcaagtagtgggcgatctcttccgcccagagagggatctccttgccaacgcatgccgctatgtcagcggcatggacccctgctgctgcaggggttccttcgattgccggaggggcgtctccggcagccagctggggggcgactgaaggagccgcttgcttctgagagaacacccccgccggaggtttccggcgctctgctgccatcttggccagctcgtcaacagcgaagttatccttccgcttgacgtgctcgaaacgcaaacctttgaacttaccttctagcttgcggacctcctccacgtacggcgccatttgcgggcagtcgtagtccttgttcacctggttgatcacgagctgggaatcgccgcgaacaactaggcgcttaatatcgagggcgaccgccgcccgcaacccagcaagcaggccctcgtattccgccgtgttgttggtggagttcgcgaagtcgagttggacaacgaatctcaactggtcccctgtcggtgactcgatgacgaccccggcgcttactccttggagactgaacgcgccgttgaagtagaggacccagtggccctcgtccagcttgccgggcaggctggtctccagctcactttcttccatgcctgtggacgtccattcagcgacgaagtccgccaaggctgtgctcttaatgcttttggagttggcgaaatggaggtcgaactccgacaactccatcctccattcggccaccctcccggtggcttcacggttggtgagggcccgctcaaggcagaacccggacaccaccgtgacgcggtgcgcctgaaagtagtagcgcagcttgcgggacgcaaggagaatccccagaaggagcttctgtacttgcgagtacctcgtccacgcgtcgtgcagcaccgtactaacgaagtacaccgggtgctgcaccaaccgcttccgcggtgccgaggctgctgactcgggggtggtccccaggtccgaggcggttgccgggggccggtcaaccccctgccctgcagcctcagtccccgggacatcttcctccctctcggcaaccagcaccgagctgaccacctggtcagtcgccgctaggtagagtagcagcggctcgcccggcttgggggcgacgaggacgggcggcgacctcaggtactgtttgagttcccggaacgccgcctcggcctcgggagtctagtcgactggacccttcttcttcatcaccttgaagaaaggcagggcacgctcccccagccgggagatgaaacgtcccagcgcggcaacatagctgtcgaggcgctggacatccttcaccttgcgaggggcctccatcttctcgatggcttctatcttgctcgggttggcctgtatccccctgtgtgaaaccaagaaactcagaagctgcccggagttgacaccgaaggtgcacttatcggggttcagcttgagcttgatcctgcggaggttgtcaaatgtctcccgcaggtcatcaaccagcgagtcctcatgcttcgatttgatgacgatgtcgtccatgtaggcctccacgttgtggcctagctgggccccaaacattcgtgcagggcgcgttgaaatgtggagctcgcgttcttcaacccgaaaggcatgcatgtataacaataacagccaaccggggtgatgaacgctgtcttttcctcatcctcgaccgccatcttgatttgatggtagccggagaaagcatccagaaaactcagcaagtcacaaccagcggtagaatcaactatttgatcgatacggggtacagggaggggatccttggggcatgcgcgattaagatccgtaaaatctacacacatgcgaagcttattccctgctttaggcactactacagggttagccagccaagtagggtactgaactttcctgatcaccccggcagccttgagcttgtccacctcttgcttgatgaaatccttacgctcttgtgcttgccgccgaatcttatgcacggtaacggtgcgctccttgtcgccggcttggaggggcagcttcttcaacttggcggcctcctcccggagcctctgccccttgccggggcgcgagctcgagcgtgcgcctcccccggcaagctcttgcggggtagcacgggccttcttcgttgccggggcatcacccggcaagctgtcgtctccggcagcatcctcgtcgccggcgtcagctacggtagcagcccggacgacttcgtcgacgcaccaggccgcgtccttgaggtcgcacctgatggagaggactccatagatggacggcatcttcatcacgccataggcgcaatgcgtggccgccatgaacttgatcagcgctggccgaccaaggatctcgttgtagggcagcggggtatgcaccacgttggacactaggtgttcggtcctgaacgcttcccgggacccaaaggtgactggcagcgtgatgcgtcccagcgggcgcacgatcccggggttcaccccccggaacgggtcggtgggcttcagctgctccatcggcaactggagtttttccaccagcctggcggataggaggttaagccccgctctgttctccaccaacaccttggtcaccatcatattgctaatgatcggcgagacgacgaagggtattacccctgaacccaactgccgtgctgggtgatcgtcggcgctgaaggtgatcggcacgtgcgaccacctcagcggctgttgcggctctgcatccggcaacagcgcgcacacgtcgcgggtgaggcgcttcaccgcggcatgggatgggagagcataagctcccccatgaatgcaggcgacgccgcgaggctcctggaagcccggctcgtcgccgccagtacagtcggactcgcgctgctcctctcctcagcgcacgccctgtcgcgtccccgggggggggggggggggcgttcccgcccagcgcggggctgaccgcgccccccttggggttcatccctgctggcaccgccgccggcaggccttggccccgcagtctcgggagagatgcccgatgtcgccacagttgaagcaggcgtcggcggcgcggcgctcctcatggcgctgctcccgccgctgcttgatcccctgcagaacacggtagttctgcgcgtcgtgggtggagttgctgtgaatggggcagcggggcgcgtcgccctgcttcccgccagatccgtcacccggcgaggccttcttcacaggcctcgcggcaggagcccccgagtccgcgacgagaacttgcttcccgcagcgcttgcgggaacccttcttcttcgaccccttgccagggctcgcggcagccttagctgctagctcgggcgctaggcgcccttcctcggccatggcgcatttgtgcgccagggcatataggtcccgtgtcgtccggatccgatgcgtgctcagcttctcgtgcatcttgggatcacggacgttgatggcgaaggtgttgatgatggccgccgcctccgcctctgggatggaataggagaggttggagaagcggttgacgaaggcccgcaacgtctctcccggcttctgcacaatagtgtgcagctccgccatggttcccgggcgcttataaccgccctggaatgcgctcacgaactgctcgcgcaggtccgcccatgtggcgatggacccggtgggcaggttgagtagccaggttcgcgctgatccttttaggaccatcgggaaccagtttgccctgaccttgtcgtcggcgccaatgacgtgcatacccaacgtgtaggtcaagaggaaatccttggggttggcggtcccgtcgtacgtaccgagcgcaggcgctcggaacttacggggccacgtcacccgccgcaactcgcgtgtgaacgcggtgcaaccatgcttggggcccatgggagcgtcttcctgctcctgtgggcgctggcactctacctcgcgcctacgccgacactccaagcgctggcgcaaatcctcttgctagcgggcattgaagatgccgcgcgcatcgccccccggaacagtgggcgacgagttcgaggacccctccgggcccccgtctccttggcctccctgcaaagggggaggattctccccctgtcgcgaggcgggtggcgcgtccatgcgctccgggttctgcccgtggccggagcctactggggcgccctcgccttgcggctgctgggcggccagggcgaggagcacctctaactcctcgccccacgtctcgtgcgccggcgtgccttgctgcggttcgtaccgcaccatgacgcacgcggcgatgatggcttcagccggggttcgtgcggggggcagccggtttcccgagcggctgcttcctgcgctggccccggacgcctccgggtgcgcagggtgcgaacccctaggggtcgccggcgacgcggtatgctcctggtgccgccgtcgcggagcatcctcggcccgcgactcaacccgctgcccggagcgggcggcaccgggcgtgctcgcgcgactggccccggcactgggggcagccgttcccctcggccgattgtcggcagacggccgaggaggcgggggaggcagctgtgtctgctgcacccttgagggctcgaggttctccgaagcctccgactcgggtcgcatgtcatgcgaccgcgtgtgcgccgctggggcttcacgcgggtctatacgaggatcaccagcccgcttggggggcatggtgactattctcgtcggcgaagaaggcgaggccgacgtcgatgcaaacgatgctgccggcgaccaccggcaggctctttttccgcgccccctacctggcgcgccagatgtcgtcgcacggtgctccgacaccgggggcgtgcggtcacggcccccttttaggttcggtaggggcgtcagggtttggaaacatctgcgatggtttacatggtttgtgatttggtgttataaagctatttgtgaatttaattgaactgtattattattatgagattttatttggagttcaacccaatggggtatttagctaaggaacggttttagtgcaaagtatgacaacccaacattttattggagtttaaactaatttaagaaacaaaggtttcataatagatttcaaaacctattttatgtattacttataaagccttaatgacatttatataagcaaaagtattttcacttattttattttgaaaggaatcaagtcccaaaagttcacactttggaggatttgaatttacaaatttactggagtttatttggacttatttggagttaggaatcaaaagttattaataaaaacaaaaatggaaaaaaagaaaaagaaaaaaaaagagagaatggaccgacccaaactgggccggcccatctccacctagcagcccagccgagcacgagctcgtgctcgtgttcttcctcctctgcaagtaaaggaaacccctcctttcatattttctttcttcgatttctttccttcccacgtgtctctcttcgaaaggacatcaccctatcaatcctcaccatcccaggaaccgattcagtcaattaatttgaagtttcctctcataatcgcagtttccaaaagaggcgccccgaatgccgcctgtcgacatcccgcacccgatctccctcctcggccagtataaaaggatttcacgcgcgtcactttgagcctttgcctctcctctcccattcccatgtagaaagtttcgcatcaaaacctctgtacatccggctacgtcgacgtctttatccgcccgtcgcctccgccattgttgccggtgagctctctccgaaggtccgtttttaaattccattcaccggtgcactcacttgaccatctcctacctccgtgacaagtttatgcgatccatcttcatcgttggccgcgccgtgcctgaccccatgccgacgccgtgcccggagctttgcccgtcgccatccggagatgttacgaccgcgcaagccgcgtcacgatgtccgcctcgacgtctttcacggccccattgaaccctacgttgacatcatcgccatcctcttttaactccggcgaactccttgtcttttccggtgagcaacttttcagccgcagcagttttgattagccatgtttagaagcccatatcttttgatctgtgtatcatttttggctgaatttttctgttgtaattagatcacgtactcacctatatattatatcagtttttataccccttctccatgatcttcagtacggcatattcgttggaaattgctattcacagtatgctgcttctagattagccacgtttcgaaattcatgtaggttgttccattgatccgtttggttccaaaccttctgtagttcataaattatatcatggtctacacattagtgtactccttgcacaacttaggattcatctacagaggtgcatcttcaatcaaaagtcgtatctgttaacactatcacatcagttagctgtcttccgaagcctatatcttttgagccgttacttcaaattagatgattatttctttcacgtcaatatcaaatacaaatataaatactatacctcttttaacacctttccaagttcatccacactagtgcatcgtcattgaaaaacagaaccttcaacagttccccacactgccaattctaagcctttagttacagaaactttgttatagattagccttttttgtaagcctgcatcttttgactcacaactcctatttaggttacaccagtggagtttgaaatcttgttagatctagtttaattcatcacattggccctctgtcttttgaagtcattcgcaccagtaaaatttcaattggaattagtacctttagtctgccagtttctgactagccgtctttgcaagctcatatatttttatccgtctgtcctattaatccaattccttctgtaatacaaagaatagatcaccctcctcacaccagtccaatttttcacctagttcaagttcataataaatagtgtatttccagttgaaaattgtatctgctgcagtctgattactggttagctaccttcgaagaggcatatctgttgatccctaattctaaaccagttctttctttctgtgttgacaagaataaacccaactcttgattctggatcactttgtgcacctttttaagttcatctaccatagctcatgacccctagaaaattgtatctgttaacagtcaatgacttcactgtttcaactccgatagaacccaagacttgttcctacctcttagatctatgcctacgatagcctaacagtagttaggtactatctaatttaaactttgtatttgcttttggttctttaattggagttatgatttggagttctcgaatagttatttattattgcttttcgttcttcgcgatagattgtacggagtgcagtaactatgactatcgaaaagaagaagaatacaaagacactaatcaggcaagttcactttgaccatcatcctattattttcttatgcactagtttttattagttacattgttaggattattatagtatctatgctagctatgatctctcctagtagtataggatacccttgccatgtcctcaccaccaattaccatcgtggtagtaaaatgctatgctatgataatatacgagagtggtattattacaatgtgatactattgaattacaatatggttttcctagtgtatggcaaaacaagtaattcaatgaaccgtcctgggtgggctgctttgaggaagtggagatgtatgtggcgtcaggtccatttctatgggtccatttctatgagtcatcatgccatttctatgggagtgcctgcgttgcaaccgaggaatgccacccggggtaaccagagactggactagtttcctgtttagtagcttccagtacaaccacatggtattatgggctctaccaggatggatgtaagaaatatgaacccggatccgaggtgacatcggtatgtagcagtgtaggtgggggcacgtccctgaggtggtctggaggattatgttctgaaaattcctgtagtcgatgccgttgctactctaccctgaggacagcaagggattaacacgtcgatttcttgtgggtaaagtgtaccacctctcaagagtgtcaaacgaagtacttagccgtgtccccggttacggacagttatgagaaactagatattggggctgtaaggaaggtctcactcattccaatttcctaataaaacgaatggattgaactgcgtaggagcattgatgtatctactcaatgtgcctaggttaataggagcatgggtgtttctaccccgtgtccaatagaattcaaaactatttgtttaaaaatgataggattgaacaatgatgcttttatgcaaatagccaaacccctcctagccaaattacgcatgtacttggtaggtcttttataactctggtgaacttgccaatacattcaaatgtattgaccacatagtggctgcaattaataatgcaggtgaatccgacgatgagtgaggttcttcgttgtctcgtgggtcatgtgcttacatttcaacatgctctcaccttggagtagttgtggcccttatgttctacccttttccgctgcagttgtgaaaacaatgttttatcatgttgaaacagtatttgtttatgctgacccaaggggtcatgcgaggttctaagtcctatttaaatcctggatgatgcgatgtaataaagtactttgacctttgtttctgtatatttcatcatgaaactgtgtgtgctagtgagtcgatccagggactagcacagtaagcacagagatcgaaccctgtaagggggaggatcacttcacacattgagccgagcttcgacaacgtgttagctgcctcattctccgcccgcggtatataatggaattcgcatccttcgaagtgaccactgatcttctgaacatgaaagcggtatagcgccatattggcatccaatgcatcccaattgccggaagcttgctggactacctagtcggaatcgccaaagcactgaatccggcgaacgccaatttcttttgccatcttcagtccgtgcacaagcgcctcatactcggcaacattgttggatgccgcaaaatgaatttgcagcacatatttaagttggtcgcgcttaagtgaacttaagactatgccagcaccaagcccacttttcattttaaagccatcaaaatgcatcttctagtagctagtttcaggcggcggtggttcatattctatctcggcccagtctaccaggaaatccgcgagagcctgagattttatggcatcccgtctgtcgtactgcagcgtgtagggtgctaactcaatagcccattttgcgatccggcctcttgcgtatttattgctcatgatttccgagatggactcctcgcatataacccggatctgatgcgcatcaaaataatgcttcagcttctttgccgccatataaacgccgtatgctatcttctgttaatggggataattctgcttagacaacgataacacctcgctcaggtaatataccgacctctgcatcgatttgctgttttcatctctttccaccactatgattgcgctaacgactcagtttgttgctgctatgtacaacaacattggatctttttccatcgtcgaggctaatatcggcgccgtagcaatcatcttcttcagctcttgaaatgctacttctgcctgttgcatccacacaaatttgtcggttttctttatcagctggtataagggcattgccttttcatccagccgactaacgaaacgacttagagatgctaggcatccagtgaatttctgcaaatctttgagacatttcggcaatttcattctctctttggcggcgattttcacatggttcgtttctatacctcgacttgataccaggaacccaagcgacttccctgtcggcacaccgaatgtgcatttggccgggtttagcttcattcggaatctcctcaaatttgcgaatgttttccggatatcatccagcagcgtggtgctttctttggtttttatgacaacatcgccaacatacacctgcacatttttgccaagttgatcgtgcaagcatttctgcatgcatctttgataagtagcccctgcatttctcaaaccaaatggcataatgcgatagaaataagccccgaacggggtgatcaatgatgtatttatttgatcattagggttcagcggtatctggtgaaaaccagagtacgcgtgaagcgaccgcccccgtataaactagcgctgaagacaaacgaggtgaaccgtcctgggtgggctgctttgaagattttgaggattagcggcgtcaggtccatttctatgggtccctctgagtcgagctcctgtggattcaggaatggatcgtccatggacgtctctcccgtggattcggggagcgcctacgttgcaaatgtggaatgccacctggggtaaccgagactagactagtttcctatttagaagcttccagtacaaccacaatgctatatgggctctggcgagacaagagtaagttgtatgaacctagacccggacagtgccaaaagattctacataacctaaggattccaaaaagctgtggaacattaaatttggtcaaacagatttaaagttatgatcatttgaagttacaggggcctatctgcaaaagtaccttttaattattccggggaattaaaaattacattatcattttatttacgcagttacacgtggtggctcctgattggtgcgtaccggttcgtttaagtgaataagaacgatctaatctacaccgttgatcaaagatcggacggacgaggggctagggtttttaccaggcggcggcgacggtcaccggagacagaggggatggcggcgcgggcacgggcatggcggcgcggggtgctccggcgacgcgggcggctcggggaagtcacgaggaggcgcggcgcggcacggcgaggtcgatggcgcggtcggcgcggcacggggcggtcggacgcctcgcctaggacgaagcgagctcggcggcgcggggggcggactccggcgaggttcggtgtcgacgtgggcggcgctgcagtgcgcgaaagcgacactggagtgcatcacagggtgcacgagagagagaggagaagaatggggcaagcggctttgaggtttactcacggagctcgtcggcgtgacgcgaagacagcgacggcgcgggcgcggctccggcgaagaatcggggcggcctggtggcgcgattggctggggaagcaagggggaagaagagaggagggcatgggctatttatggacgcgctcgggctcgaggattaagggacgcagcgaggggaatccggtggtgagcgcgcggcggcgaagaaggaaggcgcgcggcggacgcggggctttccttccggggaagaagccccctgacaggtgggccccacctgtcagcgggtgtgggcacggcgcggggcgctgctgggctgggctgcgcgcgcgcgtgcgtgaggaatgggccggttcagcccaaagtggccgggccggtccgtttctccttttttttttcttttagccctcttctttttctgcttttctcatttctttgatatcttttgagtttgaactccaaattggtccaaatgatatccagaaaatttgcaaaatcatgtcctaccatgaaacaacttttgaaagtagtttctcttcaaaataaaatatataaaaatacctttgccctataaatgcctttagggccatatatctatttaaataaaacaatttttcaactccaaataattatccaaatattatgggatagcttatatatgcattaaacccttttatgcataaaccctattggtttgaaaattccaaagctcaaatgggtgtaaaccaaatcttttaaagccttttgagattcaaaatttgagttcaaatatgcaattgtggcatgatgctcatgcatgcaatgcacatgtaaaagtttgaaattttgggatgttacagcagcactgcttctgccccgtagacaagggcgaaaagagtttcgcccgttgcccggctaggtgtggtcctgattgaccacagcacgggttagagttcttcgacccagtgtttcccatggcctttgagcttgtcaaaggttctcgtcttgagcccccgcagcacttccgcattggctcgctccgcctgcccgttactcctccggtgagcaacggacgcgaagtgtatcttggtgcccatgccctcgcaataggcctggaacaacgcgctcgtgaattgcgtgccgttgtcggtgatgatgccgttaggcacaccaaaccggcacacaatgttcttgaaaaacttgatggccgcctgggcaatcaccttccgcactggttccacctccacccacttggagaacttgtcgatggccacgagcaagtactcgtagccgccgattgctctcagcagcttgccgacgatgtccagcccccagaccgcaaatggcattgaggacgggatgacatgcaaggcctgcgccggctggttgctcttcttcgagtggaactggcacgcctcacatgtcttcaccagttgctccgcgtcggccagggccgtgggccagtaaaaaccgtgccgaaacgtcttgccggacagcgcccgggaggccacatggtgggagcatgtgcctcgatgtatatcctccaatagtgcgtgcccttcatcctgaggcacccagagaagcatgattccatttgcgcacctgcggtagaggttcccgtccaccatggcgtacattttggcttgccgggccactcgttccacagagacgtcatcttccgggagggcctcccccttcagatagcgggcgatttccaccacccagggaggggtctccctgccaacgcatgctgctacgtcagcggcatggacccctgttgttgtggggcttccttcggttgccggaggggcttccccggcaaccggctcgggggcgactgagggcgcagcttgcctgtgccagaacacccccgtcggaggcttccggcgttccgtcagaagttgtcctttcgcttgacgtgctcgaattgcaaacccttgaacttccgttctaacttacggacttcctccacatatggtgccatctgcgggcagtcatagtccttattaacctggttgatcacagctgggagtccccgcgaacaaccaagcgcataatgtctagggcaaaagctgcccgcaacccggcgagcaaaccctcgtactctgccgtgttgttggtggagttcgggaaatcgagttggacagcgaacctcaactgatcccccgtcggtgactcgatgacgaccccggcgccagctccctggagattgaacgcgccattgaagtagaggacccagtggccttcgtctagccagcctggcaggctggtctccggcgcctcctcttctacgctcgtcgacgtccactcagggacaaagtccgccagagccgcactcttgatgctcttggagttggtgaagtgcagatcgaactctgacagctccatccttcattcggccacccttccggtggcttcacggttggtgagggctcgctcaaggtagaaccttgacaccaccgtgacgcggtgcgcctgaaagtagtggcgcagcttgcgggacgcaaacagaatccccaggaggagtttctgcacttgcgggtacctcgtacgggcgtcgcgcagcaccgtgctaacgaagtacactaggtgctgcacgagttgcttgtgcggtgctaaagtccccaggtccgaggtggttgccgggggccgcgcagccccctgccctgcagcctgggtccccggaacgtctttctccctttcgggaaccagcaccgagctgaccccctggtcagtcgctgctaggtatagtagcagcggctcgcccggcttgggggcgacgaggacgggcggcgacctcaggtactgcttgagttcccggaacgccgcctcggcctcgggggtccagtcaaccggacccttcttcttcattaccttgaagaaaggcagggcgcgttcgcccaaccttgagatgaagcggcccaacgcggcaacgcaaccgttgaggcgctggacatccttcaccttgcggggagcctccatcttctcgatagcttctatcttgcgtgggttggcttgtatccccctgtgcgaaaccaagaaagccagaagctggcccgagtctacaccgaaggtgcacttctcaaggttcaacttgagtttgatcctgcgaaggttatcaaacgtttcccgcaggtcatcaattagcgagtccccgagcctcgatttgatgacgatatcgtccatgtaggcctccacgttctggcctagctggggtcccaaacattcacgcagcgcgcgttggaatgttgagcccgcgttcttcaacctgaaaggcatgcatgtgtaacagtaacagccaaccggggtgatgaacgctgttttctcctcgtcttcgactgccatcttgatttgatggtagccggaaaaagcgtccaaaaaactcagcaagtcgcaaccagcagtggaatcaactatttgattgatgcggggcacagggaaaggatccttggggcatgcatggttaagatcagtaaaatctacatacatgcgaagcttatttcccgccttgggtaccactacagggttagctaaccaagttgggtacagaactcccctgatagccccgacagccttgaacttgtccacttcttgcttgataaaatccttccgctcctgcgcttggcggcggatcatctgcttgacggggcgggcgtccgggcgcaccgtgagtcgatgctcaatcacctccctagggactccgggaaggtccgactgctcccaagcgaacacgtcgacgttctcccggaggaaagtgatgagggcgctttcctattcggcagtaaggttcgcaccgacggtgacggtgcgctcctggttgccggcttggaggggcagcttcttcaccttggaggcctcctcccggagcttctggcccttgccagggcacgagctcgagcctgtgcttccctcggcaagcacttgcggggcagcacgggccttctttgttgtcgggccgtcgcccggcgagcctctgtctccggcaacgtcttcgtcacctgcgtcggctgcggcggcggccctgacgacctcaccaacacggacggcatcttcatcacgccgtaggcgcagtgcgttgccgccatgaacttgatcatcgctagccgaccaaggatcccattgtatggcaacggggtgtgcaccacgtcgaacaccacgtgctcggtccggaacgcttcccgggacccgaaggtcaccggcagcgtgatgcgccccagggggcgcacgatcccggggttcactccccggaacgggtcagtgggtttcatctgctccaccggcaactggagtttttccaccaacctggcggacaagaggtttaaccccgctccgttgtccaccagcaccttggtcaccgtcatgttactgatgattggtgaaaccacgaagggtatgacccctgaactcagctgtcgcgccgggtgatcgtcggcgctgaaggtgatcggcacatgcgaccacctcagcggctgctacggctccgcgtccggcaacagcgtgcacacgtcccgggtgaggcgcttcaccgcggcgtgggatgggagagcttaagctcccccatggatgcaggcgatgccgcgaggctcctggaagcctggctcgtcgccgccagtgcagtcggactcgcgctgctcctcagcacgagccctgtctcgtccccggggagggcgctccctgccagcgcgggcttggccgcatcccccctgggcttcctccctgccggcgccaccgccggcaggcctcggccctgctctggggtcgttcgggcaatctcgggagagatgcccgatgtcgccgcagttgaagcaggcgccggctgctcggcgctcctcgtggcgctgctcgcgccgctgcttgataccctgcaggatgcggcagtcctgcgcatcgtgcgtgaagttggcgtggatgcggtggtggggcacgtcaccctgcttgcctccagacccaccaccgggcgaggccttcttcgcaggcctcgcggcagcccccgactccacggcaaggacttgcctcccgctgcgcttgcgggaactcttcttctgcgagccctctcctgggctcgcggcggctttagctgctagttcggacgctaagcgcccttcctcggccatggcacacttgtgcgccaaggagtacagatcatgcgttgtccggatccgatgcgtgctcagattctcgcgcatcttggggtcgcggacgttgatggcgaaggtgttgacgatggcagcagcctccgcctccgggatggagtaggagagactggagaaacggttgacgaagttccgcaacgtctctcccggcttctgcactacagtgtgtagctccaccatggttcccgggcgctggtagccgccctggaacgcgctcacaaactgctcgcgcaggtccgcccaagtggcgatggacccagcaggcaggttgagaagtcaggttctcgctgatcctttcagaaccatccagaaccagttggctctgaccttgtcgtcggcgccgatggcatgcatccccaacgtgtaggtcaggaggaaatccttcggattcacggtcccgtcatacgtaccgagcgggggcgctcaaaacttgcggggccatgtcacccgctgcaactcgcgcgtaaacgcggtgcagccgtcttcggggcccataggagcatcctcctgctcctgtgggcgttggcgctccacctcgcgtcggcgccagcgctccaggcgctgacgcaggtcctcctgctggcgggcaatcaagatgacgcgcgcgtcaccccgcgcgacggtgggtgatgagtccgaagacccctccaggtccccgcctcccaggcctccctgcgggggagggttttcccattgccgcgaggtgcggagcacgtctccgcgccccaggttctgcccgcggcctgagcctgccgggccgcattcgcctcgtggatgttgggcggcgagcgcgaggagcgcgtccaactcggcgctccatgcctcgtgcgccggcgtgccctggggcggctcgtagcgcaccatgactcgcgcggcgatgatggcctccgccagggtttacgcggggggctgccggtttcccgaacggttgccctccgctctatccccgaacaaccccggctaagtcggacgcaagctggttggcgtcgcccgcgacgctccgtgctcctcgtgcggctgctgccgctgctgcggttcgtcgacctgcgggcctccctgcttcagggcgcgggcggcgttgtgaccgctcgcgcagctggctctggcgctgggagccgtcggccctctcaaccggttatcagccgacggtcggggaggcggcggcggcagctgtgatggctgcactcgggcaggctcaggatcaccctgttcctgcgacacgcgtggcatgtcatgcgatcgcgtgtgcgccgctggggccgcacgtgggtcgatcctcgagtcaccagcccgcttggggggcatggtgaccggctctgtcgtcgacgagaacgaggccgatgtttatgcagacgctgccgccggcgatcaccggcgagctctcctcacgcgacccctacctggcgcgccagatgtcgttgcacggggctccgacaccggggatgcacgggcaccccctttttaggttcggcagtgggctacggggatcgctccggcaatcgccgacgggaccaatgctaggcgtaggaatgcaccatgaacgctaccaagggcacatgcacacactttttacccaggttcgggccaccttgcggtgtaaaaccctacgtcctgcttgtctgaccttgtattattgtgaaacagaggaattacaagttcccggggaagggtccccgggtgctctcttttcggctaagtgctccttattacttttggtcaaggctagtgtcgaactgtgagatcgtagaaccctttgaccattggcgagggtcctccttttatagccaagggcataccacaggagccacggtgcatggtttacaagtggcgagcaaggagctcgggcagctcctcctcagtgtgctggcatgcatgcatgagtgccaaccccgcggctagatgtctaagacctaaaaaataggactggacaggcattgttcgtccgactagacggataacgcccctcatgtcggctcattaaatgcgccgtgcgcttcactccttgccctggcgagactgcacactgggcgcctgtcgcacgcccacgtggcatcgctgctctgctcgcttggccccgccctcacggcgggaacctgcacccgggaactccccttcccggcaagtgccttcccgggaggtgtccaggcgggaatattccctgaagccccgcgagcccttctgggctggtagcttgctgggcagccttcaagttgccgcccgatgcgagatcctcccgggaactcagcaatgcgacccacgcgtcgtgtagcggtggtactccgggtgccactggtgcgatatgggtttcttccgcacatgtcgtaggaaaaattttgtttttcatacgacgaacccatcacgccatggcggagatggtgcgaaagccacgtctattggccaagctccacgccgaggtgaggagcaagacgcccaagggccagcaggcggt

SEQ ID NO: 2138 - DNA, 11720 bp, Brachypodium distachyon
  Intron number 3 from transcript Bradi4g27360.1 (locus Brad i4g27360) derived from phytozome v7.0 (chr-ID Bd4; pos 324 90966 to 32502685 reverse strand)
atactacagttcctagagatgtccgtcctcattttagccttgcacagattatctacacttttaatcaacttctgatcaacttatcaacccataggaaacgtaatattcaataccaaacgatgaaacatagtggatcggatggcttggctgtgtgcatcaaacgatgcagagtcgaaaaaaaatagatcagatggcatgttgttgcgacagttcctgcgcttcatcgaagcctaggtacacggcaaactctaatacacaagcatagtataccgaccacaagcaacggaattttagatacatattaaaaaattaattaagtgctaatgttgacaaagaaaaatccacaacaatctcaatcatatcacacagtagtagccactatcaacttgcaacgagttgataacaaaagtccaaaatccaatgtctgagcaacccatcaacaaggtcacaagagaatctagagacagcaaaatcaataagtatgtagaccaatgaaaaaaccaaatgtttatccgtttctaccatctttatagccaaactttcacgatcaatcaacgaagaaaacacagcatgccttctcacatgatgaatgtaagtttgaattatgtttctaatagttgcacgatcaccatttgagaaactgcgacggtaaatttcagctatggcaacaaacagaatagggacatctggggattttttatttgaggatcggaaattgtcagatttgagttttatgaaagcaagaccgatctgatccgccagtggagaggatcagaggacgaggcgcccaggcgcccaggcccaatgcccaacggagacggatagttcgagtcctgaaggcccagaaaaatcaggcgcagcttcgaaattatgaggggaagagccgaaagatcgatcctttcattttcaggggcgcgtctggtttcctgcgcgtcgatcagccgcagcaactcgccggagctccggcacgtgcccacggtgcctccgcccacgcgagtttgatggaatgtagcacaatttgtacttttacactatattaaatgttttgtttagaataaaaaagattcttttacactaccgtatgcaatcatgatgaactgaggctacctcaggtggtttggttgcttgtggtggaactaactcatccagattcaaattcttagattatttcagggtttaactagtgctattggttcgtcaatatttcaagatctgccggctctgtcttttagagatattcataaaggtagagttagctgatacgtgctttcacgacctgatggacccttgccctcttggcctgccggcccagagggcgtgctggcccaacccaagtccttccaacccaagagtggttggtgatgaatgtgtggcacgagctgtgtgcattgtttcatgtgggaatgtttgtattaccggtggtgtgagctttgtgtgcaatgtcttgtgtgcaccgatcttcagtttgtcgacgttcgggactacaatggttctgcaacaaacagaggaggcaaaaccctaactctggtatgtttcgggagacagggtcatctcattatatagccacgcggcagtagttgattcgggctagaaaaccaaaatcgactccacaaaaattgaatatctgacgcaaccgtaacaaatctgaccggcaaagacttaataatgagccgggacccgaatcggccgagtgaactcgattcacatgatacgcccggcaaggcaggcaacggaggagcgcgcttgggaataaccattgattcttttgccggaggagagataatgagcatccttccattctctacgctaacaaggtgggattgttttcatatcctaaaaaagatgggactattccatcatccacttcatacataggattttgagattttttagaatttaattagaaatcaagccttggcccactcaagcatccatacattttcacaaaaccacattggggtagtcttctcacctaggcaccacttttgctaatttgtccggaaaaccacacattttcagtcacaatgtaacaacaagcccgtaatgacatgattaagcgagttgatagttttccttacaggttgggcccacatgtaagatgacaagtctggatgaacccggctcgacccattagcccggtaaccacacccttggaagatgatgtctccatcaaaggctccgggagctcgtgggcaggcagcagcgggggcaggtgtgcaggcgggcctgcagagcagcagcggctcgcgggcaggcgggggcaggcggcaggggcgtgcgggcaggcggcgatgcgcgcggccaggctcctcctctccctcagcctctgtctccctcctcgggaagcgcccgcgcgaggaacaggagctggtgccatcctcgttctgggaggagttgcaggcgcgtcccatggcctggggctgcttcccatcataggaggcgcaggcctacgcgttcgtggcccaccaccaccaccacctgagctttgccggggagcaagaagaagatgaacggacataacgggctaacgggtttgacagttcatctgacatgtgggcctgagctgtaagaaaaattgtcaactcgtttaatagcttttttacggacttgttgttacattgtgactaaatatgtgtggtttttcgcgcaaattagcaaaactggtgcatgcgtgagaagactgccccaatatgtgtggttttgtgaaatttactttttttagaaaagagagtgcagatgcagatgtttagaaacaccgatgcacactcaccctatatatgaatgcacgcacgcacacacatcccacccatatgagcacatccgagagactggaccgacatatcttaaattgatgaagtcgccgtaagcgtctcgtacttgacgaatacatcacttccactgaaaaaacatcgccgggtaaccctcaaataaatccgtgtaaatgcacccatgtcaagtttagcatttgaatttggatgggttagttttaccataagtaatcaaactatccgaggtacgctcatgaaatagagtaagccaaaaattgtaagctcgtttgttgtgtctctgagcaactttcaggatcgaaactaattctataaaagtgaaaattttctacttcaggcagggtaaagattttgaggacttctatactttgctcttggacactaccccttctgctatccgggcacaacggtaagtttcaaaacttgggaacagttagaggtgcaacatggtaaccttcaaggtatcatttaaccctccttagttcaaacaaatgaactagttttccaataagttgtgtcattttaaaattttagttcatttggttgaattaagaaggtaccctgaggatcacaattttgcggctctaggaacagtgagtgaaagtctatcgaagattggttcgagaatagaggagcattacggtagcgaaggattaataccagcgtctgttaaaatccgaagtaattgtggactttttttggctcatctttttataaattactcatgtatcactcgatgtacgatcgacctgataggctaatacttattcacggttcagtccagcatggatatttttctggccacttctgattcaatacatctcccctcatcttacgtaaaacacaaggacggttcagatcactccgtaaccccttcgtaaaaagggtatgatgggcattaaacaatatttccttatctcttttccgcctggctccgtacaacactcggtgttttcgattttgtcggagattgcaccgttggattttcacgaaatttcatgagatagttgtagacacaatttctcacaatcccaccgaagggatcagcgaaaattttcttgagtcagcccgaaacaggcgaacaagtcagatgttcgtgttgtcccgcacggacacgagaaatccaaacatcattcggtgttttgaagttttctggagattgcaccgttggatcgcgatgaaatttcatattgtagtagtagataaaattccgcacaatcccaccgaagggatcggcgaaaccattctcgaggcatcacgaaacgtgcgaacaagttggatgttcttgctgtcccgcacggtcgcgagaattccaaataacactcagttttcaaaatttcgcggagattccaacgttggatcgcgatgaaatttcacattgtaatggtagacaaatttccgcacgatctcaccgaagggatcgttaaaacattgcacggatcagtgggaaacatgtgaacatcaaactatcacgaatggcttcgagaaatccgaacagcactcggtattttggtattggtcggagatctcacctttggatcgcgattaaatttcacagcatcgtagaagagacaattctgaacattctcatcagagggatcgtcgaaatagttcttgagccaacggatagcttgcgagagagaagaggcaggacgaagtaaagagtaggacgaagaaaaaaaagatgaaaagactatcctacccttctgagtttggaaaatggggtgtattgaattaggacgcttttctggcatgtaatcccagcataaacctaaacctctgcaaatcacacatcccattaagcaagcctcagaatcgatgcagctgaagtcacgcagactgttcaaattgagcttagcaaatgtttgagagcgaggtggatgaccagcagcttgggcgaggaagtctgcaggcgctgataagccggataatagtgtgtgcgcgagcggagtggcggactagcatgatcgaacgagcatgcagggagattttcccttctgttttccagcgagattgatttgatcgagagtgatacgtcctagcagaagtaaacctttgaaattctattacatggccttaggcccaataaaacaaggttataaccctcatctttggcccatagatacccattggaggggaaatccttcacttggccgaaatcccattgatgaaaaaatgcggcttttttctcatctctcgttatggcggtttcaatgttctgaaatcatcacttgagctaactcccgccaccttgctgccacctccatggtttgctgtacaacgctgatccttgaggtacaaactagctcattcattcccaaaaaatacataaaagaacccatcttagataacatcatattctcattaatattaaatgaagtaccgagaaacaaaaatacctgataatttaattgtcatgcacgagctctagtaattagtccatgtatctccggtacttgaggtgtaggtgctgtaggggctgtggttgtatcattggttggaatgtcctcgtcactgctactcaaccatcgtcaggtctggcgtgtgaagaagcaaagaccacgtgtttgcacatgaaacaaaatagcaggtcgcttgataggggttagctccagtagtgctgtcacagcgcaaggggaaaactgagtcaagactggagagcggcctattttcgaatcaaataactgaagacccatgactggaatatggataccccgtacatcaaaatttatacaactcgtcctaaatccacaacttgtacaagttggacgccacacaacataatcacccattgtcctaacgcaaccacttgtacaagcgggacgccaagtagctcagcaagttagagatctaacaaccaggaacgttcttgcaaacatgaagctccgtcttgactgtggatatcctgcaggtaggtgataattgattcatgtacagatcgtaagtcgcattcgcaccatcgcaagatgccagcctaggtcgtcgatcatcagagtcgtcgtcgccaattcttcatgccaggaaaatgcctacatgattagggcattaattaatgcgtgacactataattaatctggatgcattaaatatgtaaagcatacgaaagggcaggttgctgcttgtggcaagcatccccaggtcgcgcccacggatttgccttctggaaacaaccacctttgagaaacatcactcagttcagtccgttgtcatcctttgtcctctccgtttgttccgtgaaacttccctatacatagatacattggtacatacacgacgagatacatatcacgcgccagctctaattggtgaggctcgagctagttacagttatgtttgctgcaagcaggagcctgcagcttctcctccagctcaacgccggctgcttcctcctcagcatattgccatttgatgttgccgccgcggcagcggcagcgccacccttctccttcagcttcgacttctccaactcatccacgtacaacctacaagacctccatttcgagggcaacgcgacgcacgatttgcacggtaaactcatcgaccttacctgcaactctatcgattccatccgcaattgcacggggcggatatcgtacgcagatccggtgccgttctacgacgacgccaagggcatcgtggccagcttcgccacacggttcaccttcagggtcagctggctccctggtcaagaaagcaggaagggggatggcatggctttcttcctcaccggttacccgtcagacatgccgcctgactcagaaggcggcggcctcggcctcatgaacagtgacaacagcattgccgttggcaatcaccgcttcgtcgctgttgagtttgacacgcacaacaactcctatgaacacccagccccgaaatccttggaccacatcgccatcaacctaaactctgtcagaaactcgtttaagatgacgcatctgcccagcttcagcattcagggcactatgacggcgtccatcaatttcgacggcaacacccgtaggttggtcgctaccctgcaattcgacgaccgtccttttacaccaccagttgaggtcagcgcgcaattgcccgagccaatcacagccttgctcccgccagaggtggccgtggggttctctgcgtccaccggccaactagtggagctccatcaaatattgtcctggtccttcaactccacacttgcacaagaaacagaaaggtatttgtttatccattggaaatacaaccgataccatctactagcacaaggaattatgctaattattggaatttgcctcaccttaagtttaacttcttttatgtatattatttcatatctcttctagagtttggcacaggtggattatacacaatttctagggaattttggggattgcagtttattttaaatttgaatccacaaaattccctcaaaatcgcgtgaaatccacccgtagcaaacaattgttcaagcttccactcataccataaggatcactgcaccataacaactaatgaaatgaatgtaagtatcgctaggtaaacttttggttttaagtgctgtccacaaaacacatcccatacaggactcgctagggtcaactgtaaatctggtagtagcctgcggtgccagccgcaaagctgtatatccatacgaaaaaagaagatataatagctcaatttatttggcaaaaagctaggggatagctgtatcaaggtaacatgggaaaggacatggcttagctcaatttatttggcacaaagcaatcgtagatattatactctcactataaagagaactctcattcttaatggatcgcagtatcctctcacaccaacttacaacctctcatgtaaaagaatgcaaataagttacactgaagctgtgcatcttgagcagagcatataattatttcataacttgcagcttcgacgggtgggggcctaatcatagcagcgattgttggaggatttcttgtgtttatagtcgtgatttggttcattctggcatggtttatgcgtaaacgagggcgtgattccattatggcgggtactggccaaaggcgattccggtaccgcgatttggttaatgcaactgacaacttctccgagaagaggaagctcggcaagggtgcctttggcgcagtgtaccaggggacatccctcaagggtcatggaggccaggtggctgtcaagaagatcttcaaggggtcactaggagggcctaagaacttcctcgacgaaatcaacaccattagcaagacaaagcacaagaatcttgtcagcctggaaggttggtgttgcagcagcagcggaagctggaacttgatgtgttgttgctgccaaaaggaggatgatcataacatcttccttgtctatgaactgatgcctcaggggaatctccacgatcacctacacaaggaggatacagttcttccatggcccaccaggtacaaaatagtgaagggaattgggtcagctcttctttacctccaccacgagtgtcatccatacatcctgcacagggatatcaagcccgggaacatactcctggacaatgattacaatgcgaagctcgccgatttcgggctgtcgaggatcgccgaccacaacaacgccacggtggtgaccaacgccgtggggacaaggggatacatggacccgcagtgcatgaaagcaggcaaagtcaggttcaaccgtagcactgacctctacagctttgggattgtgctgctggagatcgcctgccagcgtaacaagtcgagggatggagtctgggatctgtatagcaacaacgatgctgagcgcatggtggaggtcgcggctgatgaaaggttaggcggcaactttgacagggcgcagatgcatcgtgtgcttgtcctggggctctggtgttctctgcgtgatggtgcacagcgaccttcgatgcaggacgcaatgcaattgctggagcacgataacacaccattgccccaccttgcatcgtctgccactggctcttctatttaatccgatggttattcagcatagttgcttgtttaatcagttggttataacttcagacacgcccagacttatctattgcacgttgtaccaatgatatgtatcaccaaatgaacatctagcatttttttaatcaaaacatatgtaaattgatatgagtgagtaatcgagcgggcaggagggggggagagaggcttcgcttatgtctggtttgagcccaactagagagataggctttggtatgtcgggtttgaaccccaactatccttcaccaaaattttggcatgactgaaatttgtgcgagttctagttgtttgggttgtagccagagtatccttccaatattttcacaaaatagttggtcctctattttgtctggagccaatttacttggcaaattttcatcaactttggttgaccggtgcctggtttggttctaatggaaagattatatgttgagccaacaatttgtcatgacaaatattcttttgcaaaatagaacaaaaatgacttaccaattcattgctgcccatgtaccgttaccacgaaatgactatcattccttaatatttcaccatattcttcctcgaaccttatttcctgtacatctacgctccccaccatagtgctaggaaaagaagaagcaccgatttttcctaatgagctgatccagcttatccatgtctatcggcaaatctagtatcacagataacaagtagaagttgctaaaatacatgacggcaaatctagtaattcactacaacacaaatgtcttgtagagacattttcattgaggcaatatactctttgtctctacctagagacagttttgagacagagtttcatgtagagacagtctatgagacgttatggataatgtcttaaatatagagacactagttgagacattatggtgtagagacattttttgaggcatttaatagattgtcacaagactcatgtagagacatggttttgggatacttgatgaaatgaccttatggtatggttagagacactatttgagacacattttatgttgtgtagagacatttttagcaagtttgagacatgtagcagactactcataataatttcattagaagtataagcaagaattggtatcatgagatggttaggtgagtgtgtagttttccttaaggtcttgagttcgagtataggtttcaacatgattttttcaatgtatattttctagcacatgagtatagagacacaatttaatgtctttacaaaatgtcgcattgaatgtagagacaatacagtgtctctatgaaatgtctaaaaagtatagaaacacaatgcaatgtctttacgaaatgtcgtaatgaacgtagagacggtatagtatctctatgtaatgtctaaaacaatagagacgttttattaatgtctcatcacacataacgacactgtccgtagtggcaattttgtggcattgtacgaagtgtggctaaagttatgtagagacaattatagtgtctctacgaaccaaaactaatgtctttacggctatttctcttgtagtgattccagcaaatatgctagacgcgtgaagctgccaacattttttttgagagaattccatatttgccactgagaatttgcctgtatgctcaaatgccactgagaatttgtgtgttccacatatatgacactaccgttagttgaccgttaagtacgaaataaaaagacaattttgcccctatgaagcactccctcagtcccaatttaagtgtcattttaggtttttaaactccaaaattaagtgtcgcgttagcggcaatctactgcatgaccgagtaaaagctttggcattaactgtttttttttctctcacggctgttcagggcttgtatgcagcgatttaaagcactgattagtggcaacacgtgccttggttatggccaagcaacattaaagagtaagcatgtcaaaaattgcatgcggctgcatgcagcaattaatccgagcagcctattttttttccgaccaagggacgaacacaaaatttgagtgccatatttggaacatgcaaattctcagtggcatttgggcatacggacaaattctgagtgacaaatatgaaattctctctttttctattatatacgttccaggaaaaacatgagattccaaacacagccagcagcattgagcggcagaagagcacaaatccatacagggctccatttctatgctttgtgcacaggcgaccagcatctcgacccaccagggggtgctttctcgagcagttcgttaggtccagatgtgctgcttcctctcttctaagcagcgaggaactcgtccgcacttgccggagcagttgacgagatctgccccacttgccgaagcagttgataaactcccagagtctgagagtagctctgcatctggtggtgaaaactagaagacgcggacctttttgtgtggtttacttcacttgattgagaagaggatggatggtatagaacattttggatggcactagatccttacgtgcaatcaattccatggctcgattcacttgtcccatgcacccaaatacccgattcagttgccctagaggaaaacagaaaggaaaaatgaaagccagaggaggaagaaaaataacgggaggagagattggctgtcaatactttggctaaagatttcgtcgccctccggtcaccagagtatcttatgtcacttggcggcgcggaggtctgttccatctttgaaccgttgtacttctttttagacgtcgtaattacaagcattagtataatcttcttaaatatgtattataatttttttaaaccaatagcaatatgcgggctttgtactagttgacaaattttctggaatttatttggaccaatttggagttcaaaatcaaaagatatcaaagaattgagaaaaacagaaaaagaaaagggctaaaagaaaaaaaaa

SEQ ID NO: 2139 - DNA, 2132 bp, Brachypodium distachyon
  Intron number 2 from transcript Bradi3g46400.2 (locus Brad i3g46400) derived from phytozome v7.0 (chr-ID Bd3; pos 482 45448 to 48247579 reverse strand)
aactactactcgccctacgacgattccgagtggaggtgagggcattttcagctgggttttgaattttcgtagtggtttagcagtttaatttcgtaaatgtagtgctcaatagggctagttaggatgcagttactttccgcgcaacatgtaattatctaactctccgtaaggtagcaacgtgcagcactacatcttataaccacctggtatggtagaacaagcattgttcctttagatttgttattcaaattgaaggacacatcaaagctcacttcttttaggacaaactagaacacatttctgttacttggttcaggaattcaaagagataaatgctaagaatggcaataatgtaagacgatgggacagaacgtaccttctgtaaatttgagtttcgctgtcaaaacgttagaaacagaaataagtaatgaagcatgaaaaacaatcttaaggcaccgttttcgtgggtagaagcaatgaaaaccggtcaacgtagaatgatggaatttctcatcagaacaagatgggattgactcaaccatctacctgatatttcttttagagaaccatttgcatgaaaccttttgtaaggaaccatctttttttcccatacaaccttgcagcgggttccatagaacatcaatgacacccacccccaccgccatgtaagttttcacattcctgcggccacaggctaacaggtatacatgctaaggtctagtattataaacagttcaatcagctcaaaaggtaaagctaagccatgacaacggcacaaagggcctcgagcgctaatcccaaacagcgaatcagtttttgtcagcatcatattgtggctttgcccaattctccttccatccttcactgcctgctattcatgatgacacattgtttcctgttgaatccttgctgcaccagctcatagaagctcctctttgttcccagattgtaaacctgcccagtatttcatgaaagaacaaggatagcaggttatttcaggcggcaatcttatcatgtttttcctcgaaacaaactcgattcctgaccttccaggtagcccagcatacagccgaaagcccaattatttgcaaatttctactcatatgcgccaccttaggtaatcaccacaaatactgggtaaactagtaaagcacccagttctagtgccagctcatatggccatacttataacccaccgtgtgtatttagcggcagcaaacccgtgttgaatactttcctgctcagagaagaatctacaagtggtatcttcgaactaaatctattttttcaatgttatccttaatagctatagcattgtgccagattaaccacaacgaaatcttatttttagcagtagttttgccttcgagagatgtctaaagtacctgtcaggaccattgccttccagagatggatggaaaagtaggaatcttccccttggtggaagagttaccttactgaatgcttgttgtaccaactgatcttatcttccaaagaaatctcatttatcctatcagcacttactggcatcctcaagtatttaatgggccatttccctttctgacatttgaacatctctgcatattcctgtattttttgtctcatcattcaacacaataattacctcacttttctgaatcttaattttctgacctgacactgattgaaagaaatataacacaaatttcaagttcctagcttcttcaatatcatctgtcacaaaaagaatagtgttaaaaaaaattaggatcgcaaccccatgctcaatcaggtgaggtgccaatctagtaattctaccattatgctaggcagctttgtacggaaccatctatatgatactggcaatcgttgtgccagagaaactaacagaatatgagggcagtcttagtcattatgactgcacaaattataaagtgtccaacttgattctcaaccctgtcattcagaaaccagtatggcagaccaggatgtttccccaaaaggattcttatctgctgtatctttataacctccttgcagttttgacgtaaatcgcgatgacttccatctgccattcagtgcctactgtattacaatgaaattgaagtgatgcatattggattgcaggttgaaactctggcttttcatttctt

SEQ ID NO: 2140 - DNA, 3320 bp, Brachypodium distachyon
  Intron number 1 from transcript Bradi3g47700.1 (locus Brad i3g47700) derived from phytozome v7.0 (chr-ID Bd3; pos 493 12358 to 49315677)
attgaccttgagttggagcatcgtcgtattgataggtatgtcatgtatggagctgccttttgatatcaaactttaaattacaaactgggcactcgcagcatttaacctgtgaatgttacatcgactaaggttaatagatctgtgaccttccatagacatgggattctgtttagccgagacctgtggttttgttttgctagtggggcttaatttaaataatagatttttggcaaaaacttccattagccacttttctctactgcttttttatgcatagcttgtcgattcggcattcaataaaatggccagtgtgcctccttttttctagtaaatagttcaaaccattttatcaatatgagtgttctatatcagataaattctacattgcctatttcccgtttaaagcaaccaacaagattaacttacttttccagttgtactttcaaaagtttgttctgttcttctgtctaaagttctacaatatgcagaagagatgaggaagtgggaagtgcgaactttatcgcttagagctggttatttgtagtgaaaattatcagctcagacccggttatttgcagtgaaaattttaaccaaatgaccaacgatgtatttgttagctactgagctatcagtgagaaatgcataatgagggatggtgttcacatccacaataaatcaataatgctatggtcataaattgttttgtttgcatgtattgacactgccacttgtcacaccactagttaaattaaaaaaaagttagcccctaagatcaggtcatcaagtcaaggagatgtatgaacagaaatgtggggtaagttcatggatctcagacggaggaggatcccctgacgtatggtgctgtggctgacacatggggccggggccacccgtcagccacccccacgacagcagctgtacatcagaggagccgcgtccttctcagatcattttttgttggatctgacctgagatctgaccatgcatttttttccaaaaaaaagttctgctgaggaagtaaatgtggcaaaagggtagtgaaatatcatagacatgttaaggacatccctaggacaacagccttccacatcatccctgtccagatcccctctgtcgtcacctgctcgctggagattggagttgagtgagggggagcatcccttgtgctatatagtaggtcttagctttcttttctgttagttttatccccatatagtggtttcttccttaagtggacttggggctcgttgcctccatttgtgtccatggccatggaccatgatgagcgcctgcaggatcttcagcctggctgccatggagttgccctttgtttcttctctagaagggttttgtttggttgtcgggagtataatacccaggggagagaagccacatgcaagattttatcggcctcaaaaacatggtcagactattcccctgccactgtttggctgagtcggagattccatggttcacgagagctccagaaaaaaaacaagaacaggggagagtgagtcttgagtcttcaacttcaaccacggcctgtcgaggaacgctttggcttctcgaaccgattgcttttccatggatgctggcatgccgctaggctggtgctgctccggtggattcctgcgcttgccgttgttagcgtcatgtggaggccacttgatgactgccttgagggacctgacaagcaatgctaccgcccgtgccactatcatccaaataatctctccaggctctcggttcacgttttcttgatcaggcccaggagaagcatgtggaaacctcaaagaaagttgtttcaagaagtgttcatcttagttggtactcggtgctatgttatctttgtagtttcttcaaatcagagggaaaatttgtactcttctatgtgctttgttactttttctatcattagtaatacaagtcagggattctcctccaggtggtattttcctgtgtttctcacaccgtatttttcttctgacacacaaacttgaatacttgtgcatgtttttgacaacttgatcatgtatctttgctttggatggcacaatgatcttaattgactggatcacctcattagttgtccagttgacctatatcttgagtggttataaacttataattttattggaaacctaatactacccagtctgtcttggtttttctcagtgtctattatccgtccattttgaataaatctttgctttcaatactggcagttttgtatggctgctgtgtaccacccgcttttagtcctaaaatttattatagagaaaattatgctgttcgcaccagttttttcatcatatctgatgagttcattgttagcaatactttgatattgataagtctggatttgttaaccatggacaagatttcagttacttattgcactgcttctgctgacattagttagtctactggaaaagctaccgcatatcattcctttgtctaggattgccattaaatcaattgctcatattgggagttctctttgtatcttttggagtactcattgctcctctgtcaatatatcctgacattcaggttagttctagagggcctcgagtaaattttgacaccttcagaatataccattgagtagtcatctcaagatgtcaaatgaagataacatcagcccttttttaatagacacaatgctttgctgtgttccactgagcgccaactttctcatatctgacttcataatctatcaatgattggtagcatagatagaatattgctttggtattcagaaggattaataaatgaatattttgcacagctgatcaaagttaacacttgataaggtagttagagaaaatgaaccttcaccagctcagactttttttttcagggtagcttaaaacttaaccaacctttagaaacttaacccgcctgtctacttgtcaattaccattatgctttgaattaattaacggatagacaaatagcagtgggtttgggtgacccgttatatctaggccttggctaaaatagagtactcaagatgtttcacttaagtaaattgatttttaatcttttcaaaataaatatacatgcacctgggtcttcccactgaaatttattcctgtaggttcggggtggtgtcttccagttgttgtgctttaaaatcagtacatcacgcctacgggatcaagtgtggcttgttaaaatttaagttttcttgtatttgtcaacgtatcgcataatatggacatgtggttatatcgctgcagtgccgtgtttcctgtgtatgtgccatttgacttcaatacaagtacatggacttgattatttcaggccagagacaa

SEQ ID NO: 2141 - DNA, 3883 bp, Brachypodium distachyon
  Intron number 6 from transcript Bradi4g21770.1 (locus Brad i4g21770) derived from phytozome v7.0 (chr-ID Bd4; pos 254 62043 to 25465925)
acctctcaggcccaacaccatcctctgctgcttcggtaagttcattatacttgcggagttacagtagttaaacaattagatgtgcctaataccaaatatgcatgatctactgatgacgcaaagttttgtgagatgtatttcttagttactcatgtcgcgtagcttattgccatttcttagttggacagtcttgcttttcagttacctcagacccatagaagttgggtaatttaagtaccaaaaacatgcatgaactcgatcagctcagaatttccaatataaggaagcttgaaaatagttgaatagtgtttattttcagcaaaatctgtcaatgcttgaatagtgatttccagcttggaagtccatatttaatgaccttctgatgtccacgatggattgtccaagcttgaaaatagttgaatagttgcgacttaaagatggttcttaacttagatgtactgtacataagctttatcaaggcatggagatttatgcttgacactatggtcagtgaaacaatacaaatttcatcctgggcaaccaggtatacagtatactacataattttaagttgcttgatgacctggagatgagagaaaatgcattctgtacttttgatactctgatttggcattaacatgccttattgaacctatagtacttaacatatttattctgaaacatgtcatttgcattgcctgtgcaccatctcttagctagtgcctagcacgctttagaacacttttgttaggtcctgcatgctgggtcaatcaaaaaatttgtacaagagaacagaagacaaactatacttgttaaacaccgtgtgttgctatggagcaataaatttaattaccttaacacatcgagtcagtatcgtcatgtccaatagtgccttttgttttgtctctacactcggttaatcttcaaatgtaagttgtttgcgagcaacaacactttgggtagatattaattgtcttctgaattggtagaagaagaaaacatctattgtattctccatgcaaaaaataaaacatgtaaagaagggagaagatatatcatccacatgcaaagaagggtgctaccaatgcgtgagagcactcaaaagaagttttagttttttttaattgattatttatatatatatatgcagtctcagctgccatcttctccctgaaaataccccccatcctcaagatctaatatttgagcatagatgcattaagagatatattgcggctctcgtagaggcatcgtttcatgaatcacaggaaattcaacagagtttaaatatcactcaacttcacaacaatgaggctgatgtctggcattacatatgaggtgtccatcagtaatctacagtctaattgttatttggtgggtttgaaatgcaaatgtgttccaaagctctgcgtctctgcttggcttttaatcaaaggtcggctaaactcaaagacccctagtaaatcataagtatttttctggccatagctctataaaaaattgctgaacttctgacccagatcaaaagtattctttatctgaaaaaatcataaacatcctctctatcatactactatcaagacaatagtacctaatttttctagctcttattaatttatgtttctaacagagtcattttctggccatctctaatactacttgacattgaatggtagaacttgaatggacggaccaaaactagagttgaagccattgaccctgaaacagtttgttcaaactagtcagcaagtttcagttgatacaagcttcagatatcatcaacaactccttgatctagcttgtgttggaattcttctcctttacgatctggccagttacaattatttaatccccaatcactttgacccaatgcaagaaataggaaatccgcaaataccaaatcagtgtatacattccgcacaagcatgacccgagcacaacagatgtggagggtgttggaggagttgcctgttagacgggagcagcagctaggataggggtgcatgctaggatagtggtgcgtgtgaggtgtggcgaggccgagaaaacgtggggcatgaggactgggaaagggagcaatcggcagtgtcatatggaggggaatttcggtgaacttggtatgtactgtcaccactaactccaaattaagagatagtaaagattaaataccgtaggcaacacccttttgagtttctgaaaactcagaaatagggtttggctacgttgcaccaatacggcgacatgcatacattttccaaaaacagtcataggggacacagggcatatgtatattatataaataatgaaaaaatgtaattagtaagggaagaagagaagagatacggcctgtttcctattgatgaatcattttaaagctcgaagcagtgtagcaggtactaaagcccatgtccatataacccttcacgtaagcccatgaaaggcccagttcagaaaaaaccctagactatagtattgctccagcctccagccgccagccacgctccagctacagaacgggcgatgaggacagcagcaacgtctagtagtggcgggagatgaggcacagcgtcaggcgatgaggacagcagcctacagctccagatttgtggtggcatgcagcgtccacagcggcgggagaagaggcgcagcgtcctgcgagcccggcgacgggggcagcggcggccggcattggcacaggcacaacgttgcaggaggctgatcggggtgctttagcaaatgatctggtctcgctgcaggttagtgtttttgttgggccatatgcccatatcccgacggccgtatcatacaccgtgtcccatcgttgttcagccgtgtcctgatttatttttatatttttttaattcgaaaattccagggcatttcgggacacccgcgtccccgcggcatgccgacacgtctgctctggccgtatgggtgctttcgaggtgttcggtgatgtaattttacaagatcccattacatcctaaaaagttttaaaggtggactagatgaacatgaacaagaaacattttaattgtactcaggaatagtgaaggcaatatcctcattcttatgccaatcatacattccttgcaattttcaccaagggaacttgctatccaggttatgaatttttttgactttctgacataatcagtgttgtatttctgtggttgaactagatcttctaaggtcgttgtgtgatacatctttcctgcataactttttccagacatttcttaaaatgaatttggtgttctcatgctcacttccctatttaagactacattttagatgttggttcctattatttgtagtcatccatgcaagactcagtttccacgtgacatagtatccactatcactgaactagtaaatgcatggctgacttattttactggtttgtactttgtagtaaaaggggaagaaagaaggaaagcttacctgtattatcctgctctaactgtggccaactctacatgtccaaatcttagctctgcaactgcaaacctacctatttggtaattgatattcgaccaacctccttagctggcattttggtattcactaccagtgcctttctgtaacaggacttggcaaaacttgccacactttatgatgttcaattggaaaacaaagaacatattaagcaaactatatcaaatccagggatcagtgtgatgagaactttccgaaaacttccgtgtactgggtgttgtatatcattgtttactacatttccttgcaagtttgtgcttttcgctgtaatttgcatgaaagttcctgtatgtaatgcttgaaggtgcttcactgcttgcattcttctgtaatgtttgtttgatatgttctaatgctattactcccctgactgttgtgcaggaca

SEQ ID NO: 2142 - DNA, 2430 bp, Brachypodium distachyon
  Intron number 1 from transcript Bradi1g43530.1 (locus Brad i1g43530) derived from phytozome v7.0 (chr-ID Bd1; pos 413 32516 to 41334945 reverse strand)
tggtgagcgatcaatcgtgtgtgcttggaatcagcgccgctgttttggggaactccgatatcctgagattaattccttcgcttcccccaatgagaacagtcgttgatggctgccgtggaccgtggttacgctgttccagcaagcttgatttcagcacaataatatcttatcgtgtcgtttgcgtttggatattaatctgtttatgcgcgtcgcatcactcgcatgcatggatcaaattcgaaattagcttccagtttgctgcatcatgaaatgggaaattttggacaatgcgaatccaccgtttttatcaagaggaataaagccaattttacaagctcgatcgcatatcagcaaaattcatactccactgtcaagtgtggaacctaattaaaagatgaaatcgcacctcccgatggtgtggacgagtgccaccatcccaagttccgcattttttttaaacaagaatatgagaggatcagtgttctagattgtgaacccgcgaaagtttatcaagaaatctgacagttcgtcctttgtacgaaaaaatatcttatctcgtcgattttgctgtgagataagtattcaaatttctgtgtaacttttttgcgcataattgttgatactttccatgttggttcaaatggactggaagtcctaaaagtaacttatggatgccacatacttgagttctaaataactgtgaaattgagtcataactgtacactaagtcgtcagtcacaagaggttctaaaagcaacgtatcaactccgacacatacatgtgtggtgggtagaccactaccatacatagtaacataggcaacattttccaaaaaaaagtttctaaaatgtcctgccacgttcaaagcatccccgatgatgatgtagccagcgtggctagggctcggttgggtaataagcaaagatatcacacaaaacaactcgcattgactgagacagcgcaaacctattttttcaaccaaaagtagaactctatcaagtactcttggttgctaattttcatgggaatatcacacaaccatgttattgggcaatctctttaaaatcaaacaaggcgaaggagagaccttgcgatgcttcttcatgcagttctacaagcgcaaagccaaatcgtcaatacactgagcacgaaggtgatcgacacttgcttacaaagcctccttccctggtgagatgaatcgggcttacatcgtaaccctccaaaaacaaccgaagagtagaactctaaatataatgagtctgtgcgaggccaaggtcttcacaccaagttgggcccattgtcgcaaaattaaggtgcaactttggctcaaaagaccaagaacccactaatgaagagattgatccaaaagtaagaagcaaccatacctgaggaagccgaaggtcatgaccctttatatgtaaccttgccaaaaaaaacttgaggcgcgacaaaggcgcacgtggccccaagaagtgcggaggcatgtggtgcactttccccaatttcggtcggtaatggacaatgcggaggcatgtgaccccaagaagtgttgacgcatggagaggttggcttggccaaatgccgcaaggcgggagtacacatagcgagggactgaggggcggggttggggtacatggcaccacatggccttggtggcttttcttctcttttttttgcttttctgcacggtttgtattctattgatttgaaggacaaatcagttcaaactttaattttgcaaagaggaaagtttgaccatcattgacctaccataaaatttcatttcattttgaccaactttgaatttatttgaatttaagtttaaattcaaataaggattatgctcaatttgaactacaagttttattttcagattttgatgacaactatattttaaaatatttgcttataattatggtttggatcacataaatcacatgtttatggagtaattgatggtcaaacgctatgaaaacaaatgaaacaaactcgtttagcaccatttaagcccgtttagcaccaatacatgcctttgacagagaagcaaaaaagaaaaaaaaactttacgatagaaatgctaaacacgcatcacagcgaccacacactacatccttcgacggagggagcagtagtaataaaaaacgacgaaaattctaatttaccgtcctcgggacctaccggcaaagaatcacccgtttacgggcgccaagatctgtgccagcggaagcgtcagacctgggcgtatgcttgtatttgtcattttcaggaatccgtataggaaccgtatttctcgcctgggtatcgggccccgcaagcgttttattactttttcctgagaaatttttgttctagcattcctgatccccctcggcttctcgccttattctttctccagttcgtcgtccggttctcgtcctccattgttgggtg

SEQ ID NO: 2143 - DNA, 3100 bp, Brachypodium distachyon
  Intron number 2 from transcript Bradi3g22010.1 (locus Brad i3g22010) derived from phytozome v7.0 (chr-ID Bd3; pos 211 04803 to 21107902)
ggacgaacgccatcggattcgatctctcaccccaggtgagtagacattcatttctgctcctcttgacttttcttgaaaagttccttgcctgaaattaacggtgtgttttcccaaaaaagaagaagaaataaattaacagtgtgtgacagtcgttatgaagttgagatgtcatgatagtcaggtgctgcgtagctcaagtgtttgggatctgatttggattggggggaataatgatgtttgtctgtttgatcatggtagttttgtttggaattttgctacaaatgatgaattgaggagcgatttggctgtcatatcttaaagtaggtggatatgggatgtagactttgcggtgacatgtgttgaaaatttctgaatttcgcatatctaaagattcaaacattcattgtacatatccaactacaaagtgtgaaattaggttaacactaaaagtcaatactgttaccaaaataaagccatgatgttccacatagcgaaagaatacatgccaatcaaagaaatccataaatacatactagtcatcttcgtattcctatggtttctagatcatgacattcattagcttcaagcaggatgccaatcaaagaaatccataaatacatgccaatcttcgtcttcctatggcttcaaaggttacagctccactgaagtcacctacttccatgtctcaatgctactttttccagactttttgtgcagcaagaagaatccaaacaaaatgcaagttattgcaggaacaaaagaacatacggtatctgttttctttgggggagaagaaaaggacaaatggcgaagtgccccatatgtggctgtagtttagaccaaacactctgaaaaccggaggtgcagaggatagttcttttgtttgatggtggcagcaggttttcgccccatagtggtctggccgagtcggcttgatcacagtgggtttcctgctggtgcccaaatccgcttcccctgcttccttatttcattttttgctattctctttgtatgtcaggaaaacgatgttatttccgttttatgaaattgaaaatggggtcacccgattcgaaaaaaaaacccggaggtgcaaactttgtgagagaccagctggatgggagatgctagagcctagaggtgacggtaatctcaaaggtgacgagtgaaggaagccaaaagatgcaatatcctattgtgagacaatttgacatgacacgtgagtgataatgctttcaggatggagggagaggcttggctgccctgtcacgtctccatatgggtcgtttcttgaaatgtttccggtgatgccctagcatgtcatgtcataatgcaataatcagtttaattgtaaatcatgcggtgcatcaccaagtcatgaaacttaagaatatgagagcaatgctcgtgtttagcacatagttgtttggattggattcttcttgctaatctgttctcattcctatgagggggagagaagcctggggatggggattagatctttactagtctattctcactccttagataatcaaaaaggggtagatggggagacacgatttgatggctaagaatagaatcctactttcctaagaaactatatcgtcatcttcctatttacggcttgtatggttggtatcctaaggttgccacactttgcctcaccacaagttaggcaattttgactgaggtagtcacctgtttggttcatgccacacttgtgggatgcttcttttcatgcaacctaggtcccacatgtcactgactcaaaactgcgtgccaagatccccttaattgtggcaaaggtggtgctaattttgattgcctcacgttaggcatgcatggcaaaaaagtgtggcaatcttagagtaccaaccaaacatgccctaaacctatcacttgcctaaccaaatagatatccttactgacccaatgccaatgtcatgtatgagttaagaactactccagctgcaaaacagtagtataccaatgcatgaccaaagcggtatattcgcatgggctaattgatacaattactgcatgtaaccaagcatgggcatggccatgtttgatgtttacatgttacttctgaactgggatggaagacttcaaaacaagcagttacttatacatcttttaatccaaaccgttgcagttttcttatcagatccttttctggaaacctcattttcggaatttgtatactattgtacacatcagttacttttatttatttatgtatgtatgtagaaatacgtatttgtataatatggggtctttccttaatcttaatctgacatagcctgggcttgctggatggaacaagtcagttaggcagatggaagattagggagtgctagtcgtattcctattggtttagactttgcattgggtcccaggaaatgctataaaaattattagcaataaaaaaatctttcttcctgaatgcttttggcaacctgtctaattttccaattcctaaacccctgctgccaactacaactcactgaccatggcccctacccacccatcactgccttcccaagctctggtggagcacttctttttttctgaaggatggcatctttaatctgacctgatgtaatttggtctgctagatagatggcttgatctgctacttataatttcgtttgtcagatagatgacttctccctctgttcctaaatgtaagatgttctagctttgtaagtcaaacttcttagattttgaccaagtttatagaaaaatctatcagcatctacaactctaaattatgtttgttaaatccatcttgatatattttcatagtatacttatttgatattgtagatgttagtacattttttatttttctataaacttggtcaaactttaagaagtttgacttaggacaaagctacaacatcttatatttaggaacggaggtagtagatctttccagagttaatgtgggatattccttggagtttgtaactagtatatgtatatatattttcatgttatctagcatatcattttctagttcttttagatcttgcatcctggttgggatgaggtattaatggtgtgtatcaattatcttcaggcctcatttgcccgtcac

SEQ ID NO: 2144 - DNA, 366 bp, Brachypodium distachyon
  Intron number 4 from transcript Bradi2g00230.1 (locus Brad i2g00230) derived from phytozome v7.0 (chr-ID Bd2; pos 212 18 to 21583)
cttctgtgggaaaacatactttgaggttgaacttggtagactcttaatttctattgttgatttctttatatgagttatgttcggtcctgtctatttccttacacaagattattaggagaaattatcagcatggaacagctgtattccaaccatttttatgtgttcttgtgcacttgcctaaattgtaactcttgctacggtttcatttatatgttcatcctcagagtgtctcctgactcactcaaggtctgtatactgctagtgtgttgaatagttattctgtagttgctaagtttcactttgtagatttaaatgcataactctattgtaggttccttgtgggactgagaagaatcagaaaccacc

SEQ ID NO: 2145 - DNA, 3434 bp, Brachypodium distachyon
  Intron number 2 from transcript Bradi3g24650.1 (locus Brad i3g24650) derived from phytozome v7.0 (chr-ID Bd3; pos 242 19903 to 24223336)
caaggcgcttcctgtgatatcaagttcacaggtgagttaagcgatactccttacatttcaagttttcaataatgatagggaactagcaggaattgtgcgcttcgctgcactgtcaattcttcgaaccaagaaatttatgaaatatatccctagtgtcaaattaatttttatttgcgtcaacaaacttgtaaattccccacacatcttgctctgcaacaaaatttgttgtatttgattgttagtattatctccaacaaacaaaatctgcaagtacaaacagtgcatataaagctggatagcttttgatggattcagaactaaaaacatcatattaacctgacctgatgaataatgatattattcaggttactatcaaattattcaggaccaacccaagacttcacaactctaacgatattgcaagctccaaagtaaaaagagagatcgcaaacactctagcccccggaccaaaaggaaggccctaacatggtagcaaaacggagaaaaaaaaatgctaagagcagcatgataattgttctactataaaattggtaacaaccataacgaatgccatctgaatccaatcatatttacatcccatactggctcaatattggtacagtaacatgtaatcctaactaactgaaaatttgccctattctacgatttgcaagccagctatttaggagtatctggagccccatgctaacacttacgagaagcctagaacacattgttgtattgtcatgcttgctgcttgcaatacctggaaagtgaaaaaaaaaggtgagactgaccggcggcgaagccaagggggaacgccattgagctcaacactatattacagtgtattctttgactaataagtatgggtaaagactaatccaataaaggtttgggaagtttcatttggttcacctgaaatcaacaagggtatgctggctccgcccctgaaactgctgtaattttactacagcttacaaaccaaccatacatgcaagaggaaaaaaatctggaagtaacacttcctaatttattactccgtccgtcccatattaagtgactttctattacatgtatcttgatgctttttaggcatagatacatccatatttgtgcaaatttgagtcacttggtatgggacggagggagtattgcccatacaaggcgatggatattacagatctgaaaagcatatcacttacaaacacatatacagctatactacaacttaaactcaccaatatagttgaaatgatgtgaagtgagaggctcaattcaaatgacacaagagctcaacagtcaccaggaacaacatgcgaagcatgccagttaaatcggtgaactgaaaatccatatttatgaaaaataacacatttctaaaaccaatttatatcatgctgactattcgaaaaacataattgattgagaaccgaaacgttaatgcacaagactcgtgaggaacctctagacagtatcaagagacaatatttttcacaagcttcgaagctaccaacaaaagatgcatcattgtgctcaatattaaaatttaatgagccaacattcagctgcatacttggattggaatggccccaagcacttcggcccttgattgtatactcccaaaacggtttagctctctttgagataggctcttggaagaaaggctatacatatcagaatatgaacacatgtcaatgccttgaggtttactttgagaatagaaagtttaccgctgactgtgggctcaggcacagggaactgaaagcggcgcgctgagagaacgcagagatagccatccttaggatattaactccgaaacagatgcctgcaaccaagaagaacaaacagtttctttaggcacaactctgcattaaaaatcatacatcaaaatatgaaatgtatgaatgtatgattcaagcaaaatatcacaacaactgttttcaaaattgtgcacgcaacttcagagaaacaacttaccgcttggaagtaaccaattcagatgacatggccgtgtccagtccagcatgcccctgattgtatgccacattttagtacaaacgaaaatattactgcctctatatttctaaataacctcatgtgaccgagacctgttttggagaaacagtactgcctctatttcaatatgatgttttggtaggtcttggcctaccaaaacgccttttattttaaaacagaggtagtagataccaagcaccacattatctatccatgtaaggatgcaattggagaaaaagatcgatttttgagatggatcagtccaatccaaaattgttgggcacaagcagcacatataggcatcagcatatcagaagtataccaaacagctaaagcctccagatcaaagctagcaacttgcgaaggaaagctaatcactaatgcgcagacacacattgcagctcaaattcagagcgatctggcaaagggcaactatcagtgtgtcacaccaacacaacaaagggaatgaaagtataactaaggaaactgaatttgctgaacgtgagaacttagtaactcaatctgaactgggctcattctttaattgatctagccatctgcggtacccttttgcattttctgcaactaaatgcatcactatcaaggataagctggcacatgcttagtaatatatgaagaaacatatcagcttgtaagggattgctatctgtaaaagctgaagttgtagatgcacactcccttgtcagatatcaaaggaagcctatatccaagcatcagatttattcaccatagcatttcccatatccaatagtcaacaattctagtctactatttctgtcatttctgtcatttctgtcaaattaggaacatagttaagccagataaaacattctttcagaattactgaaataaagaagaaaatatgacaatttcaaatattagtcatctttaaagagaaaacaggtacttttcatttcactgaggaccaaatatcataactaaaggacatacataagcacacggccttagaaacatcaccaaagatattcctattaccttaagcttgctgtaaataatacactcccaagctgtgacttgatatctcgtcttctttaactaacctcaaattgccattgataaacacacgtgtataatcatatataatcacaaatcataataactggcggaaaggtgctctatttagcattctcctctagacctgtccctctagaatatctctccaattaaagaattttgcaccatgttacaataaacactgaatgagaacatagagagaatctaaatttgtagatctaatcagaacagccaaccgcacacagcttttttcatctacattatttggcatgcgtaaacttctcttccatttccatgtcatggaaattctatctgattttctagtgtttcttccatcttttgatcagacaaggagcttg

SEQ ID NO: 2146 - DNA, 2894 bp, Brachypodium distachyon
  Intron number 2 from transcript Bradi4g35240.1 (locus Brad i4g35240) derived from phytozome v7.0 (chr-ID Bd4; pos 406 90229 to 40693122 reverse strand)
caacaacactgtcagcccagttggcattactgcaggtacgcactatcgctttgaagttttccccttataatcctttaagggaccattttggatgggcaaaaggaaattccatgtatgcatccattagtctcaacttagatgatataggtattaaatgatggttagggttctatctgatataattggaatttaggaaatggcctatgaaatttcatccaatttcttagaagaaccatctgttacatgcattttggtgtatggaggcttcttggacatcttctttaatggtttaaaagtattgagtatttttgtttctgtttgcaagataagccattctaagagtggaagatgtgttgtagaattgagtacacccacatgtgtgattatggtagttggaagcattatgttgtatgttacaagctacactgtcttgtctccctattatgtgaaactaatttcattgtattgctatgcatgtaaaactttggaacagattgatagtgttagggttccacttccatggtgggagagagtggcataaccatcttccactagttggtttgttagcagcttatgtccaccatatgagtaaaataattagacattatagcgcactttgaagcaacatcctgttaaacatgatagaaacatactgaataacactgatctactggtcctgcaccttattccctccattccttgaaggagggcatattagcttctttctttttctttgtggcttgccttataagccaaaagtcaaaggccacatttaagcctaaccaaacagggcggcgttgaggcatttttggcccaaatctgactaaactgcccccctgcaaggccccactgcatgctaacgcagtaactgccgcctccatttccataaataccaaagccccacctccatttccgcatttccactttccgactagtagtcctgcatgcaaatgaagggaatatacgtgcgcctagcttcttcctcttgccgtgacacgccgacaccgcgtccagccgcagcgcagcacgaccgcccaggctgaggccaccgtgaccaccccggtgagccctagcctgcttggcacgcggctgcacagcccgagcctgtcatagccatatccttgtccgtctgcatgggtgttgctgtcgtcctcttaggcatgctgcgtatggatgtcgccattgtccacgtaggcatggctggcaaaggcaccgtcttgggttggctggccgttctgtgcgtcgccattctgcacggtagtgtgttgtgcctggctggtgctggcaccgtcttcgtgcggctggacgttctgcagctggttggatgcgtcaccactaacggcagcaaatccttcccctgcaatcactccatctgttgtgaacaaaaccaagattgattgggtcaatccaaagggaacaatcgaaggcatgcagtacttggagtacaaacaactgggagtaccttggtcttcatcatactcttcaaacatgtaatcgtagttgatgtcttgcactggaccactatactaaaaaacgtcatcccaatcaattgcaaagttgaagtcaaagtccattgatgctacaacatgctcccaattgaacagggagaggtaggaggagagaagagaagaagggaagatgaagtggctgcacagcaagctttctcatggaggctttcttataacaacggtcgtcaaaatttgaatgaaaaaatggcgctacttggacaaaatttcaatttaaaaaaggcgctagaatttggagtttagaaattttttggcgatcaaaattcgcgctggaggaagagcgggagtagacttcatgcgccatgcagcaacatcctaggcgatgtgagccagtgcatgcaattgcagcattaactgctactgatcgcctccttaagccagcgcagtgctaagtcgccagcatgctcagtaattgcagcaagggaaaaatcgtccaaaacacatccatattggcttctttggtatgcgtactcatctctaatatgccctccttcaaggaacggagggagtacaatgatagttgggaaacttaggtcacccatagtcctacatgtgattgatatttaagactttgcttgaaactatttctgcaatactaagtgcttgcctgcatctgttcctggtttcccagttgagaaacttaagacgatacaaaatcacaaagagtactatccaagtttatagaaacgaagctgtttagcagctgacacatgaagaaacattcaacaaatgatatccattgtgatctgaggcagtgagccccactgctactgattcatgtggtagttgatgattgttggtcttcccatgtttcattcatatatcttcttaaggaaaatactgttaatagagttatgttgaccttttctttatgcaggaaggctgtcctttttagtttttatgcatatcatatttctaaatgaatgataaatccatgtaaaattatgtgtggaatgtatgtcaacatgccaacagtttgacatgttaatgtttgaaagaatctggtcaaatctataacttcatgccctttgctgcattcttgcaaatcaagtctccaggaaaaggcataaaaattgactcaatgaactgcacttagatatcttaagagtgcacagtgcagaccttaccaagatcattttacaaaatccatatttatgtagagcactgttatcctactgcacctatccgctgaaacacaaaatatcattcttttttttctggaggacatacttcatttgtatgctcccttatgctctactgattatgtaataatagaccatgcattttcttcagatatctaatgactattctgctcattatattcctatgtcagagagacactactggactaacaagtgagaatagtga

SEQ ID NO: 2147 - DNA, 1807 bp, Brachypodium distachyon
  Intron number 1 from transcript Bradi4g34380.1 (locus Brad i4g34380) derived from phytozome v7.0 (chr-ID Bd4; pos 400 07134 to 40008940 reverse strand)
gagagtaagtgcttttacgtgattatgctatcaatactttgtaccaatatttgatcagtaactgctttttcatttgctatctaaacagtcgctcgtatacaatgttaattagtagccatatataaattcatgatcacgtgttggtatatgaaattataattcttttaatgacctttaaaaacgtttataaaatatagattctggaaaattctataagctttcaacttaatattctcgttaaccgtgaaaatacaataaaaatattgttgtgtcaatcataattatcgtgtagcacactatgttgcgttagacaccatacaaataaatatttggcttagttagcatatcaggcttatgtgggcctcgagccactttgatgttttgtccctagcccatcagatatacccaaatcattatatcttaaccatcagatataatatctaacggtttaataattcagattatgtagatcatcatgaagcttcccctcggtatccctcatattgcttatataatatcggattaaaattctacgtgattatactatcaaaacctgcactaaagtttagatcctgagctaggcatttacgtttggacttccgtagcaatttcatttgctatcttgccaattgtttgtatgcgatgataattagtagccatagataaatttaagattgcatattgatatatagaattatactccctccgtcccatattaagtaactcaaatttgtctaaaaaggaggtatctatataccaaaatacgtctggatgcatgtaatgtttcaacagttaatatgggaccgaaggagtatttattttaatgctcgcttataaatcatgtttacaaaatatacgttagggcgaattcagcgagcgtattacataatattcttgtgttcctgagaaacaacgaaaaatttgtcacgtcatagcatatttatcgtctaacgcagttcgatgttgtgtttgaaggcatacaaacatttggcttagttagcacactgggcctatatgagcctcagaccactttgatgtttgtgcttatcccatcagatatatacccaccttattaaatcttaaccatcagatataaaatataacggtcttaatattcaaaatgatgtggatctttgtggagcctccgtttggtacctttaattgcttttagtataatagatttttttaagcatattcacttcaatttatttttgtattataaccgattgttgcccagtacaggcctgtcagtagagctggttttgggctaagaatcgatctctgtttatccaaaagtccaaagcacaatttacggtaacatgttttggagtacgtgggcttcggtttctcagccaacgtgacatgcgtacgtaacatattttctacggatctgaatttgaacgtgtctgtgaggataaaggcaaatgtttttcacggccctcagatctcagatctaacgatcagagtaattctgatgatgtggatcaacatggaggctcccctcggtacccctcatattgcttttaatatataatagattataatgaattaatgatcctctaaataaactggtgagccagctgtttttgattacatcatttctgtctctttaagttcctctagtcttttgtactcattcattgcattatgttaataatacattgaaattttactgctcttttatagtgaggctcctaatagaaacatttaaatgccttatttcagtttgtactgaaccattttagtggtctatttcaaatatcattgaatgtttgttgatttgtttatttgctgtttttaatagaac

SEQ ID NO: 2148 - DNA, 2316 bp, Brachypodium distachyon
  Intron number 1 from transcript Bradi4g43240.1 (locus Brad i4g43240) derived from phytozome v7.0 (chr-ID Bd4; pos 470 11797 to 47014112 reverse strand)
ccgccctccgccgccgccgccgcctccgggtcctggtacggattcgccggccgattggctgcccttcttctccgtcttcctcctattacattttttttgttagcacgatctgattgagaaggtggcagtacgtaatcatctagggttttcattcaatcgggccaggacctcgtcggcttagacatctaaagcttcattcttgttgttgcgtattgatttttcctggtgtgcctgaaatggatctgtctgttctttgagaacgataccactattgtagacatggtctaatggtccagtcggttcaggctttgaaccagagttgctagtgcataactgttcgtactatcggaaattgctctgcagggatgccagaaaaatgctagctttatctgactgcagttgcaaggtgcagattgacacttttttttgctgcagtctgcaaagagtatccatctgctctgacaaaacatgatctgagctttaacaacaccaatttgacttggggagatggaaatgacaatctagttttgatgttttaggatgcatggtctgtcattaatatagaaaatcgcctaatccagagaagaagttggtccctgttgtgcccctttgtttagttgtgagggtgttttgactcatctaaacctaccatagcatggcttggatattgagggaggaactaacatacaattttcatacactccaattatttacaactacattgattgtaaggcattcaaagtgttctgagaagttttatatgctaatcggtgtagacagtgttactcggacacacacatggaaactggtgtggaatcggactcagatttgcatgccaggtttggctagtttttttttaggacatggcagtaacactcggaatccgacatggattcggagtaccggttcagccaaaaataaataaatcgggatgccgtatctgcgcaatactaattgtctcatctgtctgacaatgtactaatggaaagaagacaaagatgtatattcacttcatatgtctttagcggatggggaaccgttgaattttaactcgctcgttatcatgctattagaaaaatcaaaccaactggggacatgtgagaaatcctacgttttatgtgaccatgttgtgccctcaaagctataatctttgtgatgatacacggtcattttttttaatctgaatctaccaattatcgccattgctatttaaatgaccgcaattaaagatgcagttgtgtggtgacaaagttgctcacctttagaaggaatgttgtcattttagggttaaacccatataatagcattccgagtcactccgttgtttagtatgttatgagttgttcagtatcttctctttcatattaaaggaatgctttattgttggcgttctctacgaatgaaaattatttacttgtgatggagcttgaccttaccttatatcactttgttgtgctgtttccagtgacaattatctatgtttggcataaatttgaatagtagactgtaaaaaccacttgtcctgatgcgaggattccataaaatacttgactccctgtgcttcagctgtcctttactttctatgttgaactgttaccctgacatggttttagtcaagtggttgaaacttcacagatgcacctctggtttgactcatcttttcacctgtcctcatacatggcaactccaagtactttcatatcctagtttagtctaggtttgaattgcacttctgctgggcaattcattttctcccctgggacattgtactcactctaaaattctaaagcagcctgtggttttgaattttgtagagtggagtgttaagcaatcttgcctgaagattatttattgatatgatccctatttatattttccatttgcataatgcagtaggcaagaaatcttttatcttcctgcattattatgccggttccatgaatctgatattgttctaatacttacaggacacagtgatgggaataatcaatgcccggtcccattatgggaaagggaattttgctgtcatgttggcggcatttcctggaaaaggttctgcgagaacaagcagttttcctctatctataaggatatagagcaatgggatgattcagcggcctttgagaatttccagaatgcaaagtcaagattctgtgctcattatcatggtcagtcttctgacatacctttacctgaccctgatatgtacattgacagggtcgatcacagttgtgaagttgaccctgaattggtcgctgaactggataaggtacggctaccatttgaggcagacaatgtatatgccccagctactgg

SEQ ID NO: 2149 - DNA, 5342 bp, Brachypodium distachyon
  Intron number 1 from transcript Bradi1g07520.1 (locus Brad i1g07520) derived from phytozome v7.0 (chr-ID Bd1; pos 527 6497 to 5281838)
gggccgcacgccgtctactactccgccacccctctgtaagcgaactcccccatctccctctatcttcctatgcacacgagatccgtgtcccgaacgcgttagatctgaggctgttaagcggtccagtgtttgcctggtttcgtgatctgggtacggtgggaggaggaacggctgacgctgtctgttctatgtgtgatttggcttgtgggactggaatggcgtttaggccagtgcagttccagcgaattttgctcatctgagttggatccgcaggggactggtttagcgtgtggcagcggcgaatgtttactgaacttttcattgtgtgcgatttggcttgtgggactggaatggcgttttggcagtgtagttccagcgaatttagctcatctgagttggatcgcagggaactggtttagcgtgcggcagcggatgtttactgaatttttcgttgggttttggggatttatgagtgaactatattcttcgaattgtctgatcagcttagtcataattagtgtggtatgtgtatacctgagtggctgagtgtcaagtaagttaagagcatagctccactgcgtaagttggaggggaagatgatatggtataagatttgcctgtgagctgtactttgaaagcatgaagtgctgcatgcctgcaagtaggcaacttgaatctcgtcaagaacttgatgttagtgaaacaggacaatgtatgctgattatatccatgtgctcaataaaagatgacctttatgaatatataactttatttaagtatgcagggtgattttggtataacacaaatcacgctaattgtgactaagccaatcagattaaattcagacagcataattcaccaacaaaatcaccaaatcaatgaaaaatgcaatatacatatccaaatgataggggtaacttaagtaggcaagtgatttggtaacattgcttgttccttctagcatgttcattttttcccccagcaggtcttatctcgcgcaacagttgtgtccagttcaaataaaaccaatttgtgcttgagttgggatctattcaagcattgtgcatgtatccctggaacatatgaattagctctatgaattctggagcctagtttgatctgaatagctagctacttatttgacccgtgagatgactgagtacatctacaggtttaattaggacatttatagtttactttccctcaactccaattttgtccacctgtagctaaattactattggtgacgctttgcatacatctgttgtgtttttttcttgcaagtgttacaacttcatacttccatatacatggaggctaatctattgctacctgaccttttcttaatttgattttttttcctctgatagaggtactaattctgtacaaagggcaagttaggattaccgtctggaacaagtctctgcctttagttctttgggatggatttagaaggccctttctgctttctggacaagctagctagtatacacctgagatatttttgctcttacttccactttttgttacaaaactccaaatatatgcaactagaatatgcacgcattctatttaaacacctttgcatagctccaaagtttgcattctaccttatttaagaaaatacaaaccaccaatatcacccacttgagaacgatcccttggcataatggttaagggaacaactctagtagcactcctcaggtcctgagttcaactccccatgggagcgaatttcaggctggggttgaaaaatccccgtctgttccacaccttaagcacagacctaaggcccgcccagtctcacatgggcttgtttgccctccttgccgtttagccagtgcttctatgtcaaccaccaatctaaagcacttcccactaatgatgcaaatggttaccatggatctgtgtaggcaggatatggtgcaggcattcagcatggacatggatggttacacaacagtggacatgtgggagccaatgtgtttcctgtggcaactgtgttgcatgcaggtccaggacatgatgccatactactctggtgccagctaccagatgttgctcaacatgtatcaggatgttagtgcatactatgacggagttgaggaacagcagatgatagtgatggaggagatgatggacagcatgtaccaacctactttcatctcttcccatgtggtggtggttgatgaaacaatggactatataagtcacacatactatgatgtgtgattttttagaaatagcaatcagcaataaaggcaaaaataagaaccatcgaataagaaattgatcagctgtcctatgctatccaatgttctgtcttctatccggttgtttgcaacgatgttttttacaatataacatgtatcatctctacaggaaattaagactttatttccacttgttctcagcttcttgtagagatgatacatcttatatttcattccatgcgggtttggaacttgtgcaaagaatatatttagtctgctgtggggcattcatttcatttcaggctggtttctcacaggttcgagctgtatcctagttcccacatgttattttcacaccgtagcatcataccttctctttaaaccagctctacattgaagcacttagtagtatgtgctaaaattaacctactaatagatagtgcaaggatgaaatcacacattaataatatccttgagttattgccatggacgtacatctctataggggacgcagccctcggtatccaaatacggcgatgtcaaattagtatcttctagattagttaggcaagagattagatatgaatattaagatatagtttgttaggaaagtagagattagtttcttggatgtccagttgagtcttccgtataaggataaatcaatctagttatcccgtccacttcctccctgcccttgaggtgtggctaccttcatggagctgcggcgcctcttgggtccagcatagtttgtgacaatttggtatcacagtagtcgatctccactgcgcattatgccattgagttctctcctttcaccaagattgaagcacatgacaagattcaagctacatttgacaagctacaagaaagccgtttctccaagtttgaaggtacgcttgaaagttacaagcaatctatgagcagcaaaaagccccttggccacccaacagcagggaagaagcgtctctcagggccggcggcagggaggcgatgtcactcggcacaggcaaaatgcagtgatacgtacggaagcaacatggaggttcctggccccaggcgcaagggagaatccacttccaaaagcagcaggcaggggcatcggtgtgtcctgtgctgcccaacaatgacggccatgtccaaccatcagcttggggccttggaattcagctgtgcagaggtggtcctgagatttagggcccccgtgcgaactccaaacatgggcctagcgactctactgggcccaacagatgtatacggtagctatatatacatatacactgcgtcgaggcccctatttaggctggaccccaggctgtcggccctcttgccctggcccagggccggctctgcaaccatggcctcgagctgctaaaaaggtgtgtgatgtcatgggtgtacctatagggggcgcaaccctaggtgtccagatacgggacgatatcacattggtaccttctaaattagttaggcaagattttttttcctcacgatcacatgatcggattccactatcaacagataacggaatacagagttcaacttagttaggcaagatattagatacgaatactaagatatggtttttaggaaagtagagattagtttcttggatgtcatgttgaatcttccctataaaagggtcccctgtaatcgttatgaggcagtcaagtataaatcaatctagatcccgtccactccctcccctccctcccctcccttgaggtgcggctaccttcatggagctgacatgccccttgggtccggggttaccccgtacaagacctagagccattagccctcctattgtgaacctagttcatgacagtaatactatattagccctcctatattgttataacaatgtggtgcccctctaggctgtgtcatgttgggcctcatgatagaagctggtctggggcatccgctatcttgtccatatcgcaaggctcacatcactatacctgatttgcgacaccacgcacagggcttagcaggcacgcagggagaagtaatgggcccaggaaggaaaagctgggtcgcgcccgggcaggagggaaaaggagtcgcgcaccttctcccttgaacgtgtaagccgagcaggagagagagagaggatttgggaaacccagttgtcggcggcgccttctcccgctgctccgaggtgcggcatcttctgctgctccgagctgcggcgcctcaagatctgtgtgagtgcgccgactctggcctcatcagcagcagatattcctcttccacctccctgccagcatctcctcgagcttgtgctcttatgtttgcagctttgccaccttcctgagttgatctgttctgtattgtctattctctctctctctctctctccccttcaattgatgcatcgttcaggcagagaatggtgttttgaagaaagaaagagatgatgttcatccgagaaggcacgggtgacgggattagactagtatagtgaggaagagttcgcaggctgtgcttttgcatcgtgctcttcttttatgttttcttttcttttttccattttgtgtgaggctgagaatttctgtggttgttttctatgtatgtgcacagggttatactaggctaagttgtgtgttgtgacttaatttggtagcgagtgtgtctgtgtgtgctgtgattaatctgccatcatactaagttggtgtcgtgatttaatttgcctgccatacaaagttagtatgtctatgaagtcgtctcgacacacgcaataagtgttataatgttgtgaaaggggggttggtcccttttgtgctactttgattgtggttgttgcaaagtgactggtaataagttgagtgaaaataaatacgaagtaggtggtattgataataagagagtttgaagatggtcagttgtaggagatgctaaagtggcgttgtttgtgtgcatgattacatggagcttggtctttcatctagggttgggggtggttgcagattgtttattacatcaaggagggttggcctcagatgctgagcaagaactgaaagtagctgaaattttaaatttttggataaaaatcttaatctacatttctatgtcaagagattcctcgggctgcacttatccaaatatttttttgcaggtcagagt

SEQ ID NO: 2150 - DNA, 3862 bp, Brachypodium distachyon
  Intron number 1 from transcript Bradi4g15800.1 (locus Brad i4g15800) derived from phytozome v7.0 (chr-ID Bd4; pos 164 23683 to 16427544)
acgacggtaagagatgcctcggtcgttcgttttctggtcaattcattcatgggcttcactgtgcgggcgttcacatgcatagtcgtctgtccggccgccagcacaaacacttacacatgcacgttaatttggtagtacgactagctagcacagcattattcgtgtgggacgtggacgtcgtcggcacgtgcagctagtgcattgcgcccgaagttttattccaacgtcgggacgactcgggggtacacgaatttatacgacgttacaatccatttcaatgcacgagtactgtgtctttccgagggtttggagtaaatgatagtcgtagagaaaacatatggtcaaatatctctattcactattagccgttaggtttcatgaatttcacttcatataggtttcgatctgtccattctcaaagaatttccaatgacttggaaagttcgtaaagtgtcttagtcgagtttcgtatgttcattgctttagagagttcgtagtgctagccctcttttgattcaaaagatttccgtaaggattctgtaggcttgaaatatttaggattttttcctagttgatgtttgattcgtagggttgaattctcaagaatttttttctaaggattcgtttatactacatttgataggaaaatttacatccactccaacctcttggataaaatcattttctccaatcaaacaaactttggttcaaacaaaatcttatgaagatgaagtagacatgacattgcatcctacatttttgcaatcctatgaatcaaagagggcctgagtcgtgatagattgaaagctgggtgtgcttcagaagttccaactaatatctcacggtaatcgctcccgatagaaaaaaagaggcccctgccctagccatcgccacccaacaccagatcgatctcatctcttggtcaacccggctggccggctaggaacgacgtcccttcatcctatacacttcgtgctatcataggttataaaaaattaggatttggtcaaccgaaagcggcactatggtggtgatggtgacactatgcgggtcaagaataaggttttcccgattcctcgtccacctcgtcgacgacgatcttgccggtggcgttaaggagtgcaggacagttggtcgctgctcttctggagtggtcgatctggtcttgtgtttgtgttttgcaggtcgtctgtgtgtatcggctgattggttcctgttcagatcggcgaggctcggccagcttcaacctcatcatggagttagcatggttaggtcttctcggatccgtctagccggattggggatggtcatccaaccctcttcatcgtgtttttttttccgagacttgtttttcatatcactgtcgtcggcgtcttctgactccgactgacgactttccagctactacgtcaacgacgtttttctaggtccgacattgttcggaggtccagagacagcattgaacttcgctcacagcgtgccaccggcgagtacggagaaagacaacgacttacaagaacttgcgtgtaattttttttacctcaaagatggttccaaaagagttggttgatttaacgtatggcctcggtcttttgggagaaaaaaaattgaaagccgagtgaaacatccatcggggaaacttgacggacggctgtcagttatggtgttagcaatttgcattgactgacggctgcaggcggaagagaaaaaaaaaatccgataatctccgccccgccgccgactcctcctgccggcgccgcctccctactgctcccctgcctccgcctcacatcctcactgcaacagcagccgccgagtgcccccttcccgccgccgactctcccgccccgccgctgcctcgctagcgatgggagtggcgcacattgggagcgggagcctgctgccgacggcgcaggtggaggtttgcgtctgcattcctattcctctctcaggagcaccccatgatgacgagccccctaatcctcttcacctccatctgaagttctattgcatacccttcccttccaccatcgctattgctgaccccgtctcctatggggggctacatcatacagatccggtctaggtctccttggatgggcccgaaccacgccatcatcaacaccagagcactgcaagtttgtcgattcacgaccggtcggcagaaattgatttggagacccacgccttaggtaatatattggctcacttcgctacttgtgtaggtcattttcgtcgattgtacaatctattgggtctccttatcaagctgcaagtacagattaagacctattatacaatatattgtaatatgccagagtggagatgctcttgtactgtctcatttttgctttggagcagcagctacgtacatactgaactctaatttttctgatcgtcagtgtttacagtgtcactatacagattacagtgtttgcaagagcatcctttagagctacagtctcttttcttgcttaaattttagccagatttttttttcttatcgttacagtgtttacagtgccagtatagagattacagttttctgattgcgaacgctcttaaattttatagcacattgtttattaccgctcatacagcaagtcaagagagtgtttgcaaagatcagaaacatggctataacacaagacaagagacaatcactaagttacagtatttggatgatactgtcttaaattttataatgcatcgttacaatatttacaatatagagattacagccactttttagttttctgatcagagttttaatgtatttgataagaactattttctagaagtgcagccaattgttgtttgtggatgtggttagagggttttgaactttgtaaagccatggctaaggagcctaggacatggtgggtctttatggatcacttggaaagagattcctacaataaatgctagatatgctttatttcttagtttacctgaatgatcatcacgtacccattggtcacttttctagcttgttttgcccaatgacatcatgatgcgcttggcgtgttacctctccagactaaagaaggaaagagatgagtctaggtcgctaggacactattggctcaagctgaaattaggttcctatttcagctgtaggagttccatctgttgctgttagcaatgggaaaagaggttttgtctgctcgaaaaagtcaaaaacgaacctggtgttagttcgtgcattcagaagttttagtatgcatcatgatgcacttgcgctttcggtattgatatatttttcctcgagaaaccttgtattgtagctttagtatgcatttctcattttcattggttgatgttctttacaagttaaagaattaacctatacgtttatggttgcaaataatatttacatatcaatagtttgttgcttttgtagaatacggaattatgagaatggatgatttttttttgcatactttgttgcattcaacttatttacatactttgttacatttaaatcatgaaaattttgtgacagaggacttgtggtctgtctagggccgagttctcgtattgccagcatgagtaaggcactggtgttttcttaatgtccattagtaacaggcatgtgatatgtttctgttgaaccaattagtgagacgtgctcgcatcgtgcgtgcaagattactattcaaacaaatacgatagtcggacggaggggaggggaaccacctggctggcctgccatgtcaaataatattccttctcgacattaattttgttatcactatcttttcggggggaatcctttagcattatttttccgacactgaaatttattaacattatatatattgcaggagcgccacttaacttgacgaacaactcgttccat

SEQ ID NO: 2151 - DNA, 1429 bp, Brachypodium distachyon
  Intron number 11 from transcript Bradi5g04780.1 (locus Bra di5g04780) derived from phytozome v7.0 (chr-ID Bd5; pos 61 14066 to 6115494)
tgggccaagaagacaagtggacaaggtttggagaagttttgcacgaatggggactccccatactctccccaaatttggggaagaaatggggggtgtggatcacttttggacaaatgggggttcccattggattgtgtattttgttcatggacccccatatggacagatttggacaaatgaggaggatttgaggggttcccttggagatgcccttatcctctaaatttcctttggtaggtgttctgctatcttaagtgttttttctttctccctgtccagtgtccacctgaccaccaaaaataagttgaatagaaatagttaactcttaatagtagctgatccattcagtttcatctagattactttcaaaattgcacaagcctcctgagtgttcatttgcatgactagagtacctaatgcatagttacctgattcgtaatttgtctgattcacgatttggataatctgttcgcaattcgctccctcatacgaatcggactcgtcaaggggtatacatctccatataggagttttggttctcgaacactttgtttctgattcgaaacacgcaagcatgtatacttatagcaacagtcagaaaactgtggtagaagattttaaacgtggctgatactaataggctgcaagttccaaaaaaattatttgccaataaatatagctattccactaaaatatgctgcagcagaaaatcccttaactctctcttgagaactcatctctctctccctctctctctctctctctcaagctcgatcttggaagaacccattgttcagagctgaagcgcatccttgcccccctgcagaacacggatgaggagaggatcgtgctcctccgtctgtgtgaggagctgccccggtctccatgtcctcaccattgtgttcgtccgcctttgttgcaggccgaatattagatgtcagctgctgctgcacatctgttaaccaaccacaaaagagaggaggctatccttggccttgcgtgaccgcgatgcacaggattctgtgtctttgtcgctgtcgccgttttcagcggaagcagattaagcgccactgcattcgatttttggtgctagcccctgccttcaattttgtttcttttgcctgcgacaaatgggaccctgaatcctgactgattggagcgattcgaaccctggcgtgagttgatcaatcggtatcggggtttgaggcccattgtaccgaatctggtaactatgagtcatgacctaatgcatgttaaatttcttgtttgcagtatagatctagtttcctgtgtggtgttctcttgtaattagaacatgtatttgtgttctgcattattattatgaggtttctaattttttttcctagtatggactcatgctactagatgtttacttggtatgaattgtgttatcttcctctgcagagtt

SEQ ID NO: 2152 - DNA, 1252 bp, Brachypodium distachyon
  Intron number 3 from transcript Bradi5g18390.1 (locus Brad i5g18390) derived from phytozome v7.0 (chr-ID Bd5; pos 214 08234 to 21409485 reverse strand)
tttaggtaagttgtgtctagtgacattgtgattacctctactttgttacctgcagcagttaccttttcttctttacttgtatttagtgtagatttggacaactgataaagatacactttttgctttgaagtgctaatgttcaggctgttgctatacttcgcacttaaaatttccttttgcagaatacgggtaaaacatacttttgaacaactcaaccttgtggtgggagtgcctcttgacttcattattgccctgtacatatgaatactagatcgcatggttttctcagttgatttatagcatagtatgaaaccagactggacttcccgggaaagaaatttaaccagaggcatcaacgctcccttatccccaaatcccgaaagatcaaactcttggctgggccggaaaaatgttgttcgaagccaccggtttatacaagaagcattgaaccagtggttatgactgaacagggcaatttagtttacagagtagacccctcttgtacactactttacttagggcaattttgggaagttagcgagagataagggcctagcaagctgaatggtaccacaaaagagattcctctacttgtgcgatactgcaatgtgtcatcagtgaatgtccatctgaccacacaaagcctagtgagcatcacaggcgtcgaggtatctaggagcttgaagaagtggtgcctttttgggagctgcttctgattcatattggccaaagagctcaaaacaaatggcgttagtctggtttttttttgctgatacaaaagatactttcttgttttcacatgcgcaaaaacttaactgttttagctgatgcatgaattttttttaaagacaactgcataatttaaattagtaggaatattaaaaaatgttttccacctatgaattggtggtccagctggtgtctgtcagtcgattcccctgtctgttccagtttcaaaagaaagtgcaatcatctcatctttacaccatatgctgaactaaagagtttgtagttcatagtttgtcttaagacaagtgtatcatgactcttaatcttaattgccttaccataattgtttcctttcattttgcatcctctgtgttctgctatgacttggcaatgtattgtagtgtttggtgcagcttgttaattcctttttctgtacttgtgggtgtttacttgtatgtttttttttacttgcatgtgtttatatgtaggtggggaagataaaacaattgcttttttgaagagg

SEQ ID NO: 2153 - DNA, 2075 bp, Brachypodium distachyon; identical to SEQ ID NO: 2007
  Intron number 1 from transcript Bradi3g19920.1 (locus Brad i3g19920) derived from phytozome v7.0 (chr-ID Bd3; pos 189 11790 to 18913864)

SEQ ID NO: 2154 - DNA, 1383 bp, Brachypodium distachyon
  Intron number 1 from transcript Bradi3g59270.1 (locus Brad i3g59270) derived from phytozome v7.0 (chr-ID Bd3; pos 584 97871 to 58499253)
ctgtcgccgcgcggataggcgaggcctgaggtgaggtgcgattgttgttggccagcatagatccttgtttattcctcctaccaggctacgcttattttccctctcgaattattcctactatacttttatttttatttttgttcttcgtaatgggcggctgcgaaaggcgacgaccgatagtcgtttcgtagtgctttgctaacgcaaggtttggctgggagcaacgcggcgacgagaccgtttgcgaggaaaaaaaaacccgatcagatttgccgtctttgctttcaggaggaaaagcggtgtaatctagactcgcattaaaggatcgatccggcctgctttgttgctgctgctcgattagatcttgtgtaactcgttaggcgtcgtgtgaattcttctgatttgccgctcagtaggaatcgcgatcctggtcagtcatggactggattgaggatttatctctgtttgtttaaggtgatgattttgcatatgctccgctcgctgcggtcctggaatggtaggtcgctgttaaattcaccaatcatccgtaagttgttcgtgtcagtatatatagctgtcaccaacttggaatgccatttcttacagtaaagccgcgagaggcatgcctgcatacgtatatacctatgttacctcagttgtaatttatttctaaatatctgtgcgcaatacatatcgtacttttttttttagttttatttctgctggtatcgctgagtggtttcagggtgggaagtgtgtatctgatctgttagttatgatttatgtttttttgcctctgattggattatttctgaataagtcgtctatatctgttgaagggtccatttctaattcgtgagttgcaggccttttgtcaaaagaactatctgttagtacggaggactaggtgaggctttgggtcgatttcgtcctccatggcatgttacagtgacatgttactgggaaatacttataggttgtagctttaggttggtttgggtaagtaagttatttttttcactcatctatccgtgttacagttgttagttcgatgttaggtcaagttattcacatgggtagtcagtaatcttgagcttctcctgtgctgttttgtaaattctgtaatcaatatggaccagcctcaaacttctaatgttgatcggcgtttgtagtttggtgaggggttttttcctggattggaatcatatgtgacctttgattggttaagctaagacacgtttggagttctctatcaaattttgttatgtacacctatgtacacagatgcccttttcagctgtacctcaatttgcataggtagataagtagtcttatttgattagagctcctgctaacatagtgttgatctcttgcagattgaag

SEQ ID NO: 2155 - DNA, 844 bp, Brachypodium distachyon
  Intron number 17 from transcript Bradi3g00510.1 (locus Bra di3g00510) derived from phytozome v7.0 (chr-ID Bd3; pos 25 0253 to 251096 reverse strand)
ttccacattttcctattaattcaaagacccctgcggtaaggacatgactaatttcagtaaaaaagaacaggactaagaaatatgatttgatcatttgtgtaaccatttcttgtgttggctgctgctaattctgttcaaataaaagaaattctgtgaatgttatgaacctactgaaaccacacatcaatattttgaagttcctttttttacctagtgagcactactgaattgatataagctctgttttcgtatactgtggtagttaaaaatgttctgaatggctatgaagaattgtcgaaatattgagactttcatgacaatactagctcagtatgatcactaagatgtacaaatttgaaaattccatccaccgtgaggatgacatgtacagcctgcggccatgggcggacccatgtggagggtgtgggggcagctgcccccacttgatttttttggcccatctctatttggcccatatatacgaaaaatgccccacttggcccatttcgcaccattttgccgcctctcagtttctttcctgggtccgcccatgcctgcggccccatgttagtgacacattggtggtattttccaactcggtgttcttgtgatcatattgagaaacactgccatttgttttttatgctatattacatgaaaggacatatgtggtctgaatttattctaaatgtgtcttctgtgtaattaactggcattttatttgtattgagtgtacgaaatcgacatatttttacagtgcaaatgattgttcgcttcaggtaagtacttctcttgtcttccattgacaggcaaaaggttttgttgctaattcattctataccgg

SEQ ID NO: 2156 - DNA, 13351 bp, Brachypodium distachyon
  Intron number 22 from transcript Bradi2g51710.2 (locus Bra di2g51710) derived from phytozome v7.0 (chr-ID Bd2; pos 51 298599 to 51311949)
gagcaacttgggtatataacatatctttcaaccaggtatatgttgattttgacgttttgacgtgttttacttgtcctttcaagagaaacatgtagattttatttgcattggtcatttacaatcctaccttactagtatatcctaatccatcagatctgatcgtggagttcgggcactcgaggttgttattcaatccactgtaaaggtacaggctcaaagatatagtaataagtacggcaattttgctgctttctcctactaatcttgtaatatgcaatcctaggatccttcgtaccttgatgctagaattgatgaattctttaagatcttcgaaagcaaaatccatgagttgtctgacaaggatttcaaggtttgtggcttcagttggcacttcagaattaattgaagttccaggtttttctaacttaaatatgatgtaccatgtcaaattttccatctattttcgtaagtacttatggtagatttgttccacataccacatcagggcatcagtttcttcttcaaaacaaaaactttttggcattaatgcagctcactttgacattgacgtgttcttttgacagagaaatgtcaaatcacttattgattcgaaactggagaaattcaaaaacttgtgggaggaatctggcttctactggggagagattgaatccggagctctcaagtttgataggattgagtcagaggtaagtgtttttctttcaggcaacaatacataaccgtgattaagaggaaaatgcataattttgaggcagacaagaaaacaaaatactccctccgaaagttaaacacgtcgctcttctttccaatgaaagatgaaggttgtgtcaccgtgagataactgacctcaaaataaatttgcaggttgctcttctaagagatctcacgaaagaagaattcatcgaattctttgaccagtacataaaagttgatgcgcctcaaaggcggaccataagcgtgcaggtcttcagcggcaaccattcggcagagtttaagaaggctatcaccgaagctgacccacccaaaacttaccggattaccgacatattcggcttcaagcgatcaagacctctgcacccctcgctgaaggcaggtccaggccgggtcacaatggactaacagctcacagctatgcgctgctatacattttgtgtttcctgtagtgtagtatatagcctgcgcgcatgcatgaactcaattctgatttacacgactgcacaatgctattcatcctgtatggctgtatggatcgagttaccacgtgttgccattttcagaacaaatctacctgcagtagataaccatatatacttttttgtttgtatgtatttcttcagacaactatacacactatatgtacaatagctttttacggtaaccgaaaattaatttgaactgtcatgcaaatgatgcgtgtatccttatatgatgatgatgcgaccatcttcgccaacccctcctcttctgagctggctgcaattaaacgtattctagaagattttggggccggccatctcggggctgcataccaacctttctaagaccagcatcttccccatcgcttgtgacaaacatcaatgtggatgagctgatggtctccttcccggcaaagttggaatgtttcccatgcaaatatttgaaccttccacttcacacaaggaatccacgaaggatcgacttccaactgcttattgacgaagttgcaggacgcttcagcggttggaaaggaggacttctacaggtcgtgctaccctcgtcaaatctaccttatctgcaattgctacctaccacctcacgtcttcgacttgcctgcctggtgctgcaaaagaattgataaaattaggcgcttgtcaattgaaaaacggtatcctaaagacctaggaggcctcgggatccttgatcttgagaggtttgggtgtgctctcagactgagatggccgtggctagaatggacaacgcctactggaccttggaatggaaccaagactccttgcaatgccaaggatatggatccgttcagatcttccacggtggttactattgaaaacggagagaaggcttccttttggcatgattcttggcaagatggtgcttcacttcaatctctcttccccaatctcttcgccatcgcgactaggaaaaacagaaccatcaagcatgagctgcaaaatgataattggattaaggccttggtgggcatctccatgattgagcagcttttggaatttgtcgcccttgttgaaattgttgagggggcgcagcttcaacttgacacccatgactccattcggtggagatggacggacgatggtagatatcccgcgtcttcagcttataaagctgagtttgtgggcgtcctattacgcgattcttcaaaagtctggaaagcggtggctgaaccgaaatgctaattctttgcatggactgttcttcataagaagatcttgacagccgataatcttgttgccaggggatgggagaatgaagaacgctgcgtcctctgctcctcttcaccggaaacggtgcaacatctatgcatgagttgtacattcctcaaatatgtttgggagacgttgaggagatggaattggaattttgattccaaaatcgacagaaccttcagcatcgatgaatggtgggatgcggatagagcgctaataactaaggagaagaaacgtgagatgaatcgccttctcatctacaccatttggaacatttggaaagaaaaaaaatcgacgtatcttctcaaatgagatgaaagagcctgaggaggtggcgcatattatccatgaagattttaatatgtttaggagggcaaccttgccagggtgggtcgcatgttgtaatttcagataacgaataattttcttatgatgtcgtatgggggtattctcgctaaccttaaccctccaaggttagcggcattcttttccttctttaatgaatggcagagctactgccatcttttcctaaaaaaaatttgaactgttcatttttaataatctaagggctcggatttttgctactttttgctactctaatttagatttttggagtagtccgtcaacgtgaaatggtattaccgctgaaggaggcggaggcgggtacatgtacctttactttcgggaaatcaataaaaaaaatcatgcaaatggattggtcggtccgagttagtcttactaaatggaacttagcgttgtggggtcgtcatgtattgcgtgactataaatggagtcgttgtgtacaattcatatcacgatgtgcatcatactgtactgtcacgaaaaggatctctacctaatgttatgttgtctacctacattgacttcgctagtgctttttcttctgctgggtctggtaggtgccgaaacccagaaataccacaatatcattcaaactttgtcaatatgaattttcttggtgaactgagcctaactcaggtggtgtggttccttgtggcgatggaatcagcccacccaggttcaaatcataaacttgacattgggtacacagcgagacgtctgcgatgacttcgtcaatttctcaaaacttaacattggggtgctcataagagtagggcgtgtgcgttcatattggtgagcgtatgcacgtgtgtgagcgtctgcatttgtaccgtgtttctaatttaaaaaatatcaattttcttttttaccatatcgataatatttcattacaatatcaatatcaaaattatttcattcattatatatagaccaaatttcattgcaatatcgacatttcattcattgacttgtgagtagaaatgacttcgcgtcaacttttaaaattctactccgtacaagtgatcagatttgctcgcaaggagctgaggaggactggggcagttccctttcgccgtcgcgagcacgtcattcgccggtgcgaaaaaggctctctcgtcaatcgtcatcccgcaccggcgccactccgcgagtcccatcgaagcctccaaggccacccaccctctctggctgcgttcctgcgcatagaatagaatagtaaagcccccactcgtttaagcctccaatccaccgttggagattggagcctcgtccaagcgggggaggggactataagtggagggggaggggaagcggaggcggcagcgcggtctagagtctgattctagagcgagtcgatatggcggcggcagcgttggcgacggcgacggcgggcaatgtggagttcatccgcgcgcgcagcgacaagcgagagtaccgccgcgtggtgctccccaacgcgctcgagtgcctcctcatcagcgacgccgacaccgacaaggtccgtcccggccgctcctgacctatatccctctcgctcgtccgcgcagcatcgcggagaacagagaacgcttgctggctgatcgatgtttctctcgcgcgattcaggcggcggcgtgtatggaggtcggcgtgggttcgttcagcaacccggagggcctcgagggcctcgcgcacttcctcggtgagttcggctccgttccttctggttctgggatgattctcctctcctttttgtctcagtagaatcaacagactaaggaatgaattgttgcaatcaagtcaatggattgttgaattagtcattggttaggttgagtgtcgccggaagagctttgaccgtcggatcaaaaggtgttaccgtacgacttttcattccaagcgtgatgagttgggagcgtccatgattttacgtgctgcacgtttactgcctatgttttgcctcgtctatagcagattcgtgtccttcactccgcgatagctgctaaatgtttccgaagtggccagctaaatatcgcaatcaaaagtcgtttctctgataatgtcagtataatttagcctacatctgctcgactgcccctacagttgttgcctagtggcactggcggatttatcgagatttttcaaagtcaacgtctcggtttgtcaggcgtgtgaattctacaggtaagcttgaacaacacgagataattctgctactcgagacagatgtgggacagtaccaatttttctgcacaataaagacgggcacaaagtaaagtaataaaccatttggatggaggaaatgattggcatgatgaatgttggtcacacctaatcaaaatttattttctcttaaccattttgctgagttgtttctgtcttgatttattcatggccttacctgcagagcatatgctattttatgccagcgagaaataccctggagaacatgattatacaaaatatatctcagaggtaccttccattaagctactccaagaaaacattctcaacctctttccgtttcatcatatgtttggttgcaagtattacttgcactaaagcgtgataccctgacacagccataccagattcgtaagagtttggcccagctttagggttccatgcatcatcatatatgctgggcagtcagaaaaataacacataaagtagagaacaagcgaaaatcaaatgtgttaggctatgtaggtgcaagtgggtagtggcacattacaactgatatcagtgctttgcaattagcatcatgcaaggaaattcacagttgtatcatagccctcccctccattgtgattgccaactaccaagtacagaccaagtgaaatctacttgagtactgtactttctatgaagcttttggctcaattgtagccttttgtattctcaaaccaaatacatctagcactgaagctaaagtacagagaaatagtacaaatttcccgactagcaacaactttgttaacaagtttgtaaaggggtccacccattctataattttatttgtgggaccttgttactatagttcttttggaacagcttaaatattctatttaatgcttggaagttacatccaatgcacttgcaatatatgttttttgagtgtttggcatgtcgtgaaaaatatcagcatggtggttcgttcaatgcctttacatcctccgagacaacaaatttccattttgatgttaacgtggacaatttcaaagaagccttagataggtaacttttcttagtagtttgatgcttggacattcaataaggccatgatttctgttcagcagatttgcatggttctttatttgaatcttaaataaggaggtgatttctgttgtgcagatttgcccagttcttcattaagccgctgatgtcgcaggatgctgtacttagagagatcaaagctgttgattctggtgagcatttgctttatacacggtggtgctatctgcatttaacattaccttttacttttcaaccttaccacaaccactttatatgtctgtaagggactaaggggtaagccaccccaggcatttacattaagaagaagactttctaatgcaagtcgagaaacccccgaacccctgtcccactcatacacagcagcaccaaagcccgtgtgaaactgggcgccccttaggtctgtgcttaaggcgggaggcagacgaggggctttttaacctcagcttgaaattcgcacgccatggggagtcgaacttaggacctgaggagtgctactagtgccacctaaccattaggctaggggccaaacacgttagtggctaacatgttttttgttatccttacagaacacaagaaaaatttgttgtcagatagctggagaatgtatcaggtacttcaaagtctcaaccgtcgttgttagacacatcagatatttttctgttgcaacactatgtcatattttcatcaaatactgcaatcgctaaagtaaacgttctttacttataattacaaggcatgcttctgcttccatattaactatatttggcatgacctaagcccgacttatgctcagaatgccattttactttcgtactaatcacatttggcatgatttaagactggtttatcctcagaatatcttgcatcccgttagccctgctgcactgttacttcagatttgaaacttctttccacagcttcaaaagcatctggcttcaaaggatcacccttaccataaattcagtaccggtaagcaattcttgatgttcagatattgctaatcctcatccacctaattatgatttttgtttcgtattagttagcatgcaaaacaaaaggaaggttcaattttgctgtgtcccacctctgaatatatctatgagattcagatatcacgtttttaattcaaatagaaagagtgtcaaatttgctcgtgcatatttttaaaatatctagttgtgcttcccaaataagcaacctctttgtggagttttagttaaaaaaaaaaactctttgtggagtttgcgtcttatttgcctgaaatcctatcatttaattttatcaggaagttgggaaacactggaaactaaacctaaagagaggggcttggacatcagacttgagcttctcaatttttacaagaaatattcagcaaatcttatgcaccttgttgtttatggaaagggtaaatgtaactgacttaccggctagtccattttggcataactaaaaagctaaacctatttgttactgataaaaaatattttgtagagagtctcgattgtattcagagcttagttgaaagcttatttggtaacgtcaaaaacactgaccagagaagcttaaaatgtccaagtcaacctctttcagcagaacatttgcaggtaacttgaagcaacaccaatcacaccataagtgaacataagaatggctaattgtatggaatttagcgtgctttcttctttgtcttgaagcttctcgtcaatgtaatcccgataacagaaggcgaccacctagaaatatcatggccagtcacgcctaacatccaattttacaaagaaggcccttgccattacctcagtcatctcattgggcatgaaggcgagggatccatcttccatactataaaggaattaggtaagttaacttcaacagtagtatattgttccaaacattcttttgccggcattaccttctcaaatactagtttcttgtgtcaacttgtctgtgacctgtaacatgtccacctttcactacattaggatgggccatggacttggtggctaggtccggcagtgacagtaatgaatactcttttttctcagttggcatgaggctcactgatgctggtcatggtgagtttccatcctcattttgttctcttcgaattgaaacgaccatttatcttatgattttaggcacccatttttatattattcagtaaacatctgatgtgcacatactattatttcagaacacatggaggatatcattgggttggtcttcaaatacctatacctattaaaagaagatggaatccatgaatggatatttaatgaggtaattgacagatacatcgtttatgtgattatgggtgcctatttcttcaatcaatgaaaactagtatagttcctcctagggaatcagtttatataaatttatttgatgggttatgcttataatatgcatttactgtgaatatccgcattgaacttgtggactctgatgtgttcttttaacaaaaacaacctcattggatttaaattttattacccgaggtttcttgttggagaaattcatgttgtgagtttttctgcatgtcttgagcattgtgaggggcaagtgcctcttacgtttcattacataaattttcatgctaacatgtttattgttctagctagcgtcaacaaatgaaacgaaattccactatcaagacaaagtccgtccaatcagctatgtgacacgtactgtctcaagcatgcgggtatatttctttagagctcattgcatatttcagcacttcccttgtaatagataatttaaattataaattctgatgtatatcttggggagttgtttgattactgacaatttttatgtagcaactcttctgcgtctaggatttcgctccaacatctgttgaattgtaccttttttccgtacttcagtactgttttctttcttttatttgaaatacttgctcaatggcttgcagttgttcccaccagaggaatggctggttgcagcatcattgccgtcgaagtatgcgccaaatacaataaatatgattcttgatgagttgtcacccgaaagagtaaggtatgtgtacacagttcacatggcagctttgattttttttttcttctcaaacacacatatttttattagaagaatacactgagaaggctctaatttcggaaaagtggagaagacctaaacaaaagccccaaatagattactaaaagaaaccaaatagcagaaaattgcaagtacaaaaacctagttaaccaaaaggtataaaggcaaaaaaatattaggcagctcggatttctggagagagcttcctaaggtccttatcccctgcccctgggagcggtcataagttatgcttcattgatgttgtcttgtgtcaaggactcgtggtgcctaactctatcgtagacgcaggcgccgtcgcatgttgtgctgcaacccatgccttgaaatggtgaaccagatttggggcgagaaggggcacccaacaagtagatgggagattgtctcatcggcttggtcgcatatgagacaaccttgatttgtttacttctatctgcatagtctctttgcacgccaacatgtaaacgtatatatgtggatgtctggtattggtaaattaatggtaactgatactgggactcatcaataaagaactatctacaaacatggcctaacttcatatcttaaagtttcgctcataagtttatttgtcagatgatctgcagttatgcacataaattagcatacaaagctaaatactacactttcatctttatttgatgcaatatttatttctgtctctagaatattctgcaagtctaaaaaatttgaaggaactacaaactgtgctgagccctggtacaaaacatcatattctgttgaaactgtcactccttatatgatacaggtttggattcaaaatttatttttattttccgaattttattttatttcccatcttatgcctctatttggcagcaatgggttcaaaaggctcctgctgagaagctccatctccctaagcccaacattttcatcccaaaggatttatctcttaaagaagtgtgtgacaaggtaaaattttgaggaactttgtttcgtgttcactttacacacttcgaattgtttaaaattttaaatgtttaaataatatttcttttaattcgaactgtttcaccaggttggatttccgacagtagtaaggaagacaccactttcacggttatggtataagcccaacatgctgttcgtcattccgaaggttaaaattataattgatttccactgtccactgtcaagccactcccccgaagcagtcgtatctacaagtctctttgtcagtttgttagtcgattacttgaatgcttatggtatgtgataatcctgaatttttctgaatattgcatattttattacagtatttaagttcaaaattacactgacaattagtttctgccatttgcagcttatgatgctcgaattgcgggtttattctattcgatacatcttacttctactggattccaggttttttcttattcggttactacttactgtgttcctttcggtttcctagtgttccctagctaactatctcctagtaaaattcctcatgctatctgctgttgcttcatgcattatgatgttgctggtgttcatccagttttgaatccgaactcaaacccttatctgccttttttttaaggtttcagtacgtggttacaatgacaagatgagagttctgctacatgctataatgaagcaaatagcaaactttgaagttaaagcagacaggttttctgccctgaaggttagatgttgatccttgggcttccttgtcaattttcatgatttgagctgggcataattatatatgtacttggtctctttgtcatcaactttgtggggattaacttcaaatactacagaattcactcgagtgaaacactgatcatttatctgttaagttacagcaaccaaccatctatccaaaagaccgatctgataggaatatgagatacgatacacttaacacccccttcacatctgacgtggatgtggaaataaaacaataactcccacatgcccgacgtgtttgtgggtaataattgggaaaatcagctctgataccatatgggcgtggataagtcaggaggcatctccccctttgccaacaaaaaaagttatggcaaccttttatcaaacatgtaacttaatgcagggttagagactacagattcatttgcacgagcacatcaatctagatatgcatagaaaatcaagaatttcttaaagattcataaattgttggacctaacgttgttctttttatcataatgcagtaatcttaatgctaagctcagttcgtaacattttgcttttctttatttaccacctgtcaggatattctttagagcagtcaaatttagtcttactgtatggtataacttgtaaataatggtaccgctggtactacttagcgaataacacttcattaagtgcacttttcaccaatatgattatgataactgtaacatcagcatacaactcctttcggctcaaaatggtactccctccgatcctaaattgttgtcgaaatattacatgtatgtagacgctttttaagaatagatacatctatatttgggcaaatttcagtcaagaatttaggatcagagggagtagcacatacgggttaacctttttgggcgaagtgagtgttgactatggaagctcaaacgaggtgctatgcatacgttgtctcacgtggggtttgcccttgtaacaaattttatgcagggtgttacaacaatgtattttcatgacgatggttgatttgagattgcgaaatattcttgccctttggattcttaatcggtgccttttgaaactactgtcatgatttctttgatggctaattatttaccaacatcttgccattacaggaaactttggttaaggattatcagaatttcaacttctcccaaccatattctcaagcttcttactatctctcactaatactggaagagacaaaatggtctgtggttgagaaacttcaagctctttctaagcttgagtcagattctcttgcgaagtttgtgccacacttgctatcaaagacatatttggaatgctatgttcaaggttcagtgaaattttatgtgttctcgcaaaaaaaatcttttatgctaataatcaccgaaatataatttccgaggattggactggactgcaatcccaattttgcttattaaaaattcttcttgcagggaacattgaaccagctgaggctgagtctattgtccaggagactgaagatactatatttaatacccctaattctctgttcaaatctatgtcctcatcacaatatctggtgaaaagggttatcatgcttgaaaatgagttaaaatgctactaccaaattgagggtttaaatcagaagaatgagaattcatcaatagtccaatacattcaggtatagattcctcctaactttgatgtagtgaactgatccaacacgacttggccgtcttgtccctcttctaatacaacatgaggcgcgcttaggcgtggattcgagaaaaatgttatccaaggggattacttgtcagtgatcagtaccttcttatctttgttacaaaactgatggtaaccttggtgtagcctagtgtacattacgttatgatcaacccagtattagttggaacaatgtgagtaggattgttggcagttcaccactcagttggggacaacacaaaaaacaattggagatttctacacctttctacttgaaacattattctgcaatgttgccttacatacaaagttaatgccaagtaatccaattcaaacataattacaattttaaggtacactaatccctaatgcgaagttcctgaacaatccgtcttaccgaaaatgactctgtctaatggtacctgtttgcttatcatgtcaagtgcataacgttctatttaaataagcatgccaggttactaaccaatgagcatattcacatattcaggtccatcaggacgacgcaatttcaaacatcaaacttcagttgttctctcaaattgctagacaagctgctttcaaccaactgcggactgtcgagcagcttgggtatatagcacatctttcaaccaggtatatgttggttttgatgtttagacttgttacttgtacgtgtcctttcaggagaaacatatagattttatttttactgctcatttacaatcctgctttactatgtatatcttaatcaatcagatctgatcgtggagttcgggcactcaaggttgtta

SEQ ID NO: 2157 - DNA, 729 bp, Brachypodium distachyon
  Intron number 2 from transcript Bradi4g28350.1 (locus Brad i4g28350) derived from phytozome v7.0 (chr-ID Bd4; pos 337 63725 to 33764453)
ttttgatcccaagtcatcaactgctatatccaagtgtgaggatctgaccatttcctttggatattttctctcgtgcgcatgctctgaaagcaaatagttagtacatgctgtcccttcgaattcattatcaagcttgtttactatgttgtgcacttgtgctgtaatgattgattagtgtgtgggcactagattacctctttttgaggtatcttgcttgtcctgttgctgttggaaagtaggtgctagtcatagattcatgtgtatacagattttcctttgtgtggctacttatagtagtacttaattataagagaagtccaattttatttatttcaacaagaaaggtcgcttttgtttacacctaatcagtgagcagggctctgcattagggtctaaattattgtatatacagtcctctgcatgtatattatgcctctttgtttctccgatattacttttaacctgtatacgcattatcttttttgcttctttattctccgtatgcaaccctgttgttaggaactagcttttgtttacacctaattacctttgtcgcctttgaattcttagttgacattattatagtagtttactgtaattcaaataaaaatctagtttgctgattttctatataagttttgaaaatataatacaaaattaataattccattgtacaaacaatgatagttcagcaagtttaattgagattttgtattctttgtgtcaggt

SEQ ID NO: 2158 - DNA, 2503 bp, Brachypodium distachyon
  Intron number 1 from transcript Bradi1g01130.1 (locus Brad i1g01130) derived from phytozome v7.0 (chr-ID Bd1; pos 759 040 to 761542)
acttctcctccttcgtcaggcagctcaacacctacgtacgctcctcccttctccccccaccctctctctgtcacttactcgctgctactattgctactgcagtttgatttatgggggatcactctctctgttactggagttaaaaaatttgaaggttttggttggaatgatcatgtgtggttgtagagttgtagtgttttgccggtatggttgagctgatctgattctgaacaccgcgcactgcgtaagaaaaccggtaggtttgggtacacagcctatttgcagtcagtgagaccatcatgagtaggattaccatgatgaaatcgtcacttgagtactgctttttttacttacagaacttctttcttggaggtactaacttaaagaacatagatgtgagttagttaagttaggcctaatactgttcccgcccctaatactgatcttgtgcctaatactattcttgtgtgagtgcgacatatttcttgttaggctgatgcaagggaacaaaaggcaattactggcacttcacagaggtttactcgagacactgaaatcacttgcatatggtggccttagtagtggtgtcgcactcgtttagcattgttcaagaaattggtaatcggtaactgctcggtcgggtagggattagcgattaatcggctatcggactgattaatcggtttaatcggtcgaccattatactatatagtatatataattatatattgggctacttgccgcatgagaaccttgggaaggtgcagccatctaaaacaaatcaagagaagcaaaggcatcagtgaaaatggatgggagcagcagcagcttgggaggaagcaaaggcatcattgaagctcttcaaggcttcgagcaggggctggccggcggattaatcccgattaatcggttgtcagaccgattaatcggcttgggcgattaactgcggcgataagtgttaatctgcacggtggtctgccggtcagcgattaatcggccgattaatcgctgaatcggccgatttcttgaacaatgtcgtttagtgggtattgaaattttctttggttgtgtatggaattggaccttcctgccagtaagccattctgtgtttaaaagtaagcttgcttgagtttagttttctagactctaaagtttgacttacgttctagtgtaattgaccacctctaaaaatttgaatcgcaaagcgctttgatttgtgtactacttggtctactgaagtcaccgatcgacataggcaaacctatggaactggctagacttgcatggccccctttttttttgtgcacgtcatgaactatttcaagagtcacctaaatgatgcatacgactaacataattctaatccaaagtaatatacttctaatgctagaataatagatgcatcaggtagtttggtctcattctgtgtcgtacatattagtcttcgaaataacttctcagatttatcctaagcgtaaataaatataatcttataagtagcaaactgtgtgaatatatgtgatttacgccataaccaatttcagcccttagtggcatctaaacatgcccaaggctcagatactttgaaatgctttattgtttctctcaacaataaagatacgtgtgcctagtattccctaggatttgatttaacaaaaaataacaacttaggtttttagtagatggggagaactatcggtgtcctcttgtaaagttattcttcacatgcacatagtcatctcattctgtacggttgtgtaatctccccaacctttggaacatgtaagcattttgaattgacatttaatggcaattccgaaaaaaaattcaaacctgaagaatttcttactaacgtggttaatgtcattcattttgcagtaacaggctgcctgcacttgttatttttagcttccgttctgaactgtccacctcggcttaaagcaattaccatttacaatatatcctgttaagaatattcttccaggaatgaaatattgtctatattgtctgtagttctgtacctttctgatgattgttgatcctgatggacgcatataagattgtcagtcattactctggtaatatctgagttgaatcgacatttacagaaatgaaatatagcaaaaataaaataaaattggggctcttgaagaacaggacttcattactgcagtccacagccagtatgcatgaagcttgacttatcttcagttgccctgagcctttatcattctggaccatttaattcttacgcacatgtctactaatgcaacctgtggtcaattaggctgttctgtgaatcacagatgtttttaggcgataaacagtgggaaatgtttgtgctgcatggctagtgtgcttgttccctacttccccttttactgatgctgcaaaattatcaaagcagatacactgtgcgatatgcatgagcccctttcctaataattgcttgctgctttactgaacagggatttagaaaagtggatccagataggtgggaatt

SEQ ID NO: 2159 - DNA, 2240 bp, Brachypodium distachyon
  Intron number 1 from transcript Bradi2g36060.1 (locus Brad i2g36060) derived from phytozome v7.0 (chr-ID Bd2; pos 364 45707 to 36447946 reverse strand)
cagaagttcaagggaagaaggatcactaaaagtgggtaagaagcagatgacttctcttcaaggcctgtgtgattccttcatatgcgccatgtgccgatacacggttccagtattccagggtttactggtatatgttgaatcttcagtggaggcatctcaggaagaatcagagaaccgcgaagctcaatgaaaaatgcatgatcaaagacagcttacgggcctgaatgaaatatcatggctgcagaaccttgttggactgaactgcatttcaagagacacccacactcgagttaccaggcagtggactaaatgagtatctctgtttgaggaatatgtgatgcacagctactctggtaggcatgtgaatcatgaccattgtccacttatggaaagaacattgttttgatctaaacttctgggtgtgatctggagaattgtgaaatcttgtgatctgctgtttcaacattttctgttccttttcagtggatccggagaattgcgaaatcttgtgatctgctatttctgtaggatgtgtttgtaaatcactaggcataatagtaatcagatctttttgttattggtatcctctatatccatgcggccaatgaatatacactacacttttgtaagtttattgaatccagatgttcttgttatttatttgatcatctatgattcacgctcaggtgcgatgaaatggattcagtatatttgaaacagttgaccttttcttttttttttcacagtttaaattcaatctagcgattaattagtgatctacagataacactggagtgtagagagaggaaccgaccattctcatggattttgcaagacttcacatctgcattttttttaatgaaaaacagctattccctccgtccatcaaaatgtctcaagtttgttacaatttgaatgtagacatgaattagtgtatagatgcatttaaatttagtcaaagttgagacatcctttgttggacggaggaagtacaatttttttctttcggtcacggatctctgctagagatgtcctccctccgatccataataagtgtcggagacttattgcaaaataataagtgtcggagacttattgcaaaattatactgactttgtactaaatcttcgacacttattatggatcggagggagcaccatttatcataattttcaagcgaaataattagtatgtcatgacacctcgcataatactaagcttttgcacatgttggaatgacgggttagtaagaaaagaaagaacatttcaatttttttagaagcttttcacatgttggacctagaatgaaaatcatttttatctcaaaaatgattattttaataacaaaaaaatacattttctcggaactcggcacttgagggttttagaagctttagaaactttgtgaaggcaggcctgaaatccgacccacccaaagcttagggtatgcccaggtctagttggacataccgtgggtagcaacggacttgagcccgaaacattgttcccgtgggttttactccattaacgacttactcggttcataagattttgaaatcatatgaacaaaaaaggtagaggattggaaggtcttgcaacttcaatgcttatgaattttcatgaggtctcccctaatgctaagaatcattaagaattagctcaatttggatacgatccttaggtctcacctaatgctaaaaatcacaaatgttgaaatcttgtaaaagtcctctaaaaatcgtgcaaactgaatgagtccttagggtggggacatgcaattttagtcttagagggctggttatgggtagcaaacctagattttgagggaaggggtctgttccaggtttggcactcttcgcacctgatatatgtcaaactcgtgagcatatgacacgtggctgcaaaattacaattgaattgaccaccactattggggtgtttacttgcaaaataggcaaaatcatgggaccgagagcatttggtagaaaatttgacgggtgtgagcatgtggcccgatgcttgatgccacgtggcatagaaaacaaaaaatgtggcctgccaggaatatatttgagttctacatagacgagtgctagggtttgaaaatttcaaaaagagaaatattttgacacacaaaatatgaaaaaaaaaagaaatttcaaataatttcaaaaacgaagtaacaaactcaaataaacccccaaaataaatgcgtgatgacagcttcctgattgagtgcg

SEQ ID NO: 2160 - DNA, 11607 bp, Brachypodium distachyon
  Intron number 4 from transcript Bradi1g31430.1 (locus Brad i1g31430) derived from phytozome v7.0 (chr-ID Bd1; pos 269 12432 to 26924038 reverse strand)
attgcacaggctaaaatttcggcagaaaaattggtcattaggttttttggattgtccacacacaacttcagcgcgttgatccacagggaagaagttatccacacacgcattagctccatttgccagccaccccaaatctagccaaggagcaagtgaagatgagacgagagacagttaatttcctttcccgctgcagaaatgacaccgagtatttcaggtccaacctccgttgatcaagctacccttggccaaaaggctattcttaagcagaagccacatagaaaccttgttttttaattttgaggcatcttgagtttccgcctacgctaagtagcatactccctccgtttcataattcttggctcaaatttgctcaaaaatagatgtatctatattcctaaaaagtgtctagatacatctaagatttcgacaagaattatgaaacggagcaagtataacattgctgcaggtctgaatcgcaaatatacagacagaccagtagtgtggaaaaagggaaaggtgaactcctcgctgttcagatcgagccatcggctcaggtaacaaagacgggcccagcaaaagacgagcccaacaatgctaagacgggccgagttgcaaaaaatacttattgaagttgtgatccaaattctccaggcatcgaaacttctgtctcaacatccagccgcacctcccgttgttccaggggcggagcaccatgtatggcaagttatggcctctgccataccttgattgggccggccggaagacccaggtccagtatttgtgtgccatgggatcagtttggggcaggttttttggctaggccttggatggacggtgctacagtgggctttttttttttcaggcaggcccagtggttggtaaatagaggacacggagtagatcgatccatattctcgtcttcctggctcgatcagttttctggtcttcctccttggctccctcgaagttagaacatcagattacattagatcaactacagatgctattaagatttgctaaatttggttttttagacactttatttcgtaaaactcatggtaaaaatttatgagtaaatatcacaaaactcctagtttctgacgaattgtatcgcagaagtacacattttcgtttttttttcacttaacccatatttttggactaatccgtatcgcaaaacccgtaattttgctttcaacgatgctaatagggaaactgccatgaggggcctacttgtcggcctatgaagcgaaatcatacttaacttagtaacgcatgccctgccccaagccccctcccgcgggtcttcttctccaagaccggtgaagtgccgcccgcgccaatccccttgcttgcaaccttccgcgccaagacgacaccagcaaaagcagcgtgacgtctcgaagatccctctggcgcactcgccctcatccccggctgcctcgagtgcccccgcaccgagctcctcctccgccggccgtgcctcgccgtcgactcgcctcaaccggcttcctcttccctgatcgacctcgcctacgagttcgtggtgagtttctcctttcttccctcctcggatccacccccgtagagccctgccgtattggatgccgccggcgagtttctcccttgagcgttctgctcccctgcgccgtccgtccatggtgggagcattccagcccaaaccaggcccgcagccccgccgcacctgcagcccccctgccccgcctagccgccatgctgcccagccgcgccgcccgctcgtcgtcccggacggaggcgaggccgccaccgctcgtcagtttccctgttagcgtcgttgacagtcagatttagagttttgtgatacggtttagtccaagaatacgggttaagtgataaaaaaccaaaatgtgtagttttgcgatacagttcgtcagaaattaggagttttgtgatatttactcaaaatttatcttacatcttactgtttttttatcaactagatgtaacaggttgatgtaattgctcttcgtaccaatatactcaataaattggtggtgtatccgttggaacttcacgcattgttcacatcccgtgctattggtttcgccacatcaaaatttgagttcgtcctccatcattggttgttctctgttactattcgaggaatttgcagaactttcggctgcgtatccagaacttccgaatattcagcgatagcccgtgatttatttttcctctcgttgtttgagagattatttcatgttaaatccgtgtatacttgtgtatgttatgtggtggtttcttctcgtcccgttcctaacaataccaccttcagcagtaaaggctaccctgagctgcacgtgcgtgtacgtacgtgttgtccgatctgcttggattcttagtaacagtagcacctgttccacttgtttttttctggacactccaatcctcgatcgtcatgatggtcctgatcctctcgctctctcgcagcctgatcaccggtttctcggtactaactcggtcatcatgtgcccgaactgattgctccaaactttttttttgtgtgtgcccgtcaaattcatctacagtggagtacttaactcgagggcaaaacgcccacaaagacaacacccctgaacgacgacatgtatccggtatccaacgcacgggcgccatataactactcctgggcaactccaccctgtcagcccggtgtccaaacacacctcgacgaccccccagcccaaaagaaatgcatgcaactaaactatgccagtgtggaagaaacgaacgcggtacggaactcttgtcttcgctactaaaaaaacgtccatcagtgacggtaaaaaatgcctatcagtaatgggcagaccgtctgtcactaacttcttgccagtgatgtgtggtacatcagtgacggatggtcggcccgttggtgatgatatgtacattagtggcgggcactgtaaggaccgacagtgatgacattttggtagaaaaaaatccgccccaaattccgctggggcacatccatgaccgtgccgtccacctcagcgcccgaatcaacaaatccaacatcacggaacgaatctcaaatcacatttttttctcaagcatcacagcggattacaacggaaaaaaaaatccaaaaacaaatcacgagaaaatcgccgacgtcctcgatcttgatctgcttctgcatgctgttgttcacgccggggccggatcccgcggcggcagtgggaagagggagggatccggcggccgcgaagtcggtctcggcgtcgatggtcgtggttagcgactgctagagagatagagatggtgagagatagagggtggagagagagaagtagatggagagagatagagggttaccggcggcggcgtaggtagtctcggccggaaccaacggtagtatggcgcggctggcggcgggggaggccggatccgcccgcttctgggctgaggtatgccggatcgggccgctgcagggtcatggccggcggatccggcgccgctgcgcgccatcgctgctgctctccatgcgccgcgtgacgggtgaagggagggggcgccgtgagacggaggtagggccgaagtacgtggtcgtcggaggcgggggccggcggtgggcgtgcgctgcaaggaggagagaaagggagaaggaagagagaaagaaaggaggaagagagaaagggctgtggcggctgggaggaaagaaagagagagaaaggatggggattctggagggggttaggatttgctcttatatagatatttggtatgggttgggcctgggttggcccaaactagcactagtgacgggtataaatgtcaaacccgacactgatgagcccataaattttttaaatagttgcacatttgtttgtcatgacaagaagcacgtttgtgcaaagcatggatacattatcatgaataatggcataaaaatggcaaaactctggtcatttggcttaaacctaaaattcaactatgagaaataacaagattgtactacatatgtcatttttcaaatgttaccatattatattattattctactatgttaagaaagaaaaaaaagattttagcaaaaagaatcacatttttctgatttttatgaattagtaatgatttttttaattttcaaagatctcccggggtcatcattggcgggcccagatgagcccgccactgatgtgtgtttttgtgatatttgcaatttttcatattttaacgttagtggcgggcttttcgtgcccgtcactgatgaggagtcattggtgacggtcgcaatacgcccgccattgatgagggttcatcagtgacgggtgttgtgcgcccgtcactaatgagggttcatcagtgatgggctcaccgcagacttcatcagtgacggacacgaaagacccgttgctgatgatgatttctcgtcagatatgcagtgttttgtagccgtggctcccgccttttcccgaagctaagctaagctagctacttgattaacaggcgcacgtcaccctcatcatcgtaagttcgactttggaggatgggcgccctgtcgctctctccgatcctattttttttgactccatctctcggccggactgggcggtggccgaccttattaggtttgcagccaggcaaacctaataatcctacttgtcacctttcggccacatttcttccatccgtggccccctacacgaccggccccaaacaaacagctcggctcagctcagcgccaacggcggtggcgaacgcaaaagctgtataatttagccagctgatcaatcaataagtactccagcgcgcggctgaattggaaagagtctcgagaaagagacggaggccacgtttaatcaatcggtaacttttgttaaataagcggcatccgtgccggctgtccgtaaaaagaggattttcctttcggtcgttgcacttaaactcttctgtaattaagttaaaggggaattaaggcgtgtctcttggcacgccatcttagccattttgctcacatgccaccctcttaatgatgaaactgtttcttatactagcgattgtctcttcacacaaaccaacaaaaagtcattaattctctctcacaaactcttaaataagtgctactttagatacaacaacaagagacaatgcattgggggtaagagacaacacctcagagacgatccattgggagtgacataagatcgatcgatcggtgcgaaacagacatgcatatctttgtaaccgaaagaaaacatgcatatactcgatcataagtatatggaaatatattttgcaagatttgtaacatggatcaatgtgaacttgatcataaatatttttcatgcatgaatttactccgctcgaagaaatatgcatggtttgcccttgcatgaatggaacgccgcatgcactctagtttcgctgtccagattgcaatatattcttcttctctataacaacaaggacagtaatgggatcatgcatatatatctacttaatgaaaattgtctacataatctgtacttaatgaaaatatgattgtccctccataaattgaaactgcgagttggaacttcctggcatgttttgaatacatacacggttactaccactctaggatgctcaacaagtaaagagtttccttctgtttcggttcttctataatcagaacggttactaccactctaggatgctcaacaagcaaagagttcccttctctttcggttcttctataatcggaaggccagcattgggatcatgcctagcccctttgtgtttgaaatatggaatatttacacgatcaaaaggcggtgcttccgtgaatggaaccggtggtgtggacatcctctcatattcataatgtttacacgatggcaactctagaagcgttgcaaagttggaatggtcgtgccaaatctatacttgatgatacgaagacgttgttgtaaaaagtggagcatgaatgtgccgaacgaatggcatggcattattcgaaccgttaccgaactaagttgaattgctttccgtgccacactttgtgcataatggcgaaataaatgttgttgcggtgggctttaatgaacgtaagacgacataatacctgaactatcatgccactcggagtccaagcgtttctcatgtattttgcaatcttttcatatgttcgatacaaacggtcataatatgtttaaccggggttttcgcgccatacaacatgtaacggaatagtcataacgctactctgaaataactaccatcaacctttctttcgcgccatattcaacacatagcaggtgcaacctaactacggggtctatgaatcgtcatgctgctctaatttttttttcccttcattcatcatctaaatttatcctcattgaaaactttcaaacttttagacaaaatgcagcatcccctctcatttttccaaagagtcaaattccaacaacctgatctagctgctcgctccactttgggttctttggcacactttctaccaactctctcctcggccgttggatcgatcccatcgcatcatctttaggtatatcctgtccagctctactcttttttttttccagttcctcgtcagagtgggaattaatttttcttcccaaaaatatataaagagctcaacaagctcccaaatcaattcttccaccacctcgccgctcgtcctcctccttcctccctccagcccgtagtggcgaccacgcctcgcctccaataattcccctcgctcttctccactccaccgccgtcccgagccagcgtggtctaccggcggattcaccggggtaaacccgcgctatgctgacgccatccatctagccagcgcgcccgagccaagcgtgtgcaagcaagcgcgcgcggcaccaccagcgatagcaacagccggggggtagctaagtcctgcgcacgactctctctgagtgtgaccccaggtgagcgcgaccgaatcccgtctggccgggcgccgatccttgatttttatttttaggaaaacaacggaatggggtgggagatttgtttaatggtggctttgcgttcgggggtgggagtggtgggaagggaagaggggagttgttaagttggtctggtcgatcggcgccgggggttacggcttcttctgctgctgctgctctgttctgctagtctggggccgatctgagggagggccggggccatggccgcgccggggtccgccgcgagtaaggtacgtacggccggtttcacgagttgccggtgttgggggatctgggggggatgcccgagttcggggagggagggacggcgttttgtttgctggtctctcttcttctccgtgtgtgtttgagttttttgatgctacggattgggttggcgatttagttgggttttgtggttagctcctcgattctgtgtaccgctgtgcagacgggatggatttgggcttttgctttggttcgtatggtgatctgggatctggtggtcttggcatttggcctggaggtggcggttcttccgtttggggtgtatgcattctgggagaagctgtttcagtgcttctttttcctttttgcggtcagttggatctgtgtagccggaaattgattctgtttgcgcagtgttcatttgcttcgttttcttgcgtcaacctccaacttgatggctttggtgtacgattctgattatctgttgctgactgaaagtcacaagatttgccgctcaggttgggctgtttttggagacgatgctttgatcaggtttacgttttaggagcttcgggattacgtgattcacattccacagtaggatcttcgggattatgtgattcacattccagtaggatcgttgggattatgtgattcacattacagtaggagcttcgggattatgtgattcacattcctttccattaggagcttcaggattatgtgattcacatttccattagccattaggagtttcgggattatgtgatccacatttccattagacattaggaggttcgggataatgtgattcacattacagtaggagcttcaggattatgtgattcacattccattgcattaggagcttcaggattatgtgattcacatttctggatgtggattgtttgtcccatcctggatgccaggcttagtactttggattttgcctgttgcacaaaaaatgacacatttcttggatttttgtttgactttttattgggttgatcaaattcagcctctgttgtatagggaatagaaggaggttcaattttgacataccttcaggcttcagcttagggatatccacaacttgtcatcttgtttttcttgacgttaaagtcttgattagtggcgtgcggccattggggttttgcaggtggtgggtttattgatcctcgttgccaccatctgcttcaattcgtcgattcccctcccttctgctgtgcatttcttagggctttagtagagcatggacaccaccggtttgaaagcaaagtttactggtttcaaatcctgttgccaaatggcatgagaagttgagaaccagccttaggctgtctgatcctggagaagagatgtggcttgatgacttcatacaccatattaggatggagttgggaatgccctgcagatggcttggaaaggcgagaagtaggatggacttgtgaaatttatctaaaggacctgcatggatcatgatagaaagataactgagaaagttaacttcagagattttgtcactaagagtattaatataatgacactccatgtaagccctcatccctttggatgatcacattggattatgttttgattcatgaatggctgtgtgtactatctaatatatatttatttccaaaaaaaatcttaattagtgagtgggttttcgaagatatccatagtccatatacagagtccaggagtgcatctgtgtgtgttgttgccactttccacggccatctgtggagtctgattgaagcagcttcatttaataccaacgatgtgtttaggtactgtctttgtcatgggcacaggaggttgatactgcaaaaggatgcaccattttgtctggaatttgctaaattttaattggtagtttcaaatcttaaccttgtgcccaattttaagtgagcaactcttggtgtatggttgaagccggttgatgtttgatctgattgtacccactcttaattttgatttattatttctccaaagcaactgtttactatgctagatattaagcgccttttgttggagctgcaatcagtgtattggggtctagcaattggcaaacattttgttgtatcggaagatgtaaactctcaagcttttggcgtggttttgtttttcatgagatgtttcaataggagaacttttttatcctttgctatttgttaatttatataatgggcttgccttgagcctcaaaacattatgttacaaatggtatctccactaattcacttatgaattttctgttttcagcacaccttctcttctctcttgaagcagaagtcactcaagactagtccgaccaaatctaggagtactatggctgtttcaatgagggaagtggaccctgtctttcaaggggctggtcaaaaggagtatcctttagttgctaattttgtcactgggttacataatcattttcatgtgtgtttcacatatctattcatccatcataactgttatgcactatgtttgaattgatgacgtgtatgagaaaatattgcaccgtaagtaagtgaacataaagacctgcaatgcttatagtcatattcgattatgtttattcgtataatgcatgcttaatcatctctggatagttattcttaacgattctcagtggattggagatatggcggattgaaaagttacaagccgttcctgttccaaaggaatcgcatgggaaattttttacaggcgattcctacataatactgaaggtatgctaccctgttcaaattgtagatgcacctaagtcctgtgattagttctgtgtgaaaaacatttcagagctgtattatgtcagcaatgcaatgcatctcattccttacacttatagctactataagtcgtttgattattttggcgtattgtttatgctacataatagtaataacataataataatgatggagatagtgtcatcagcacattggtgatatgtcacccctgtaggaattaagtgttttgttaatactacttgttggagtgcaatctgttagaattaatatatattactgcagaattgtgattgacattataattattttgtcactggaacagacaactgcccttaaaaatggttcttttcggaatgatatccattattggcttggaaaagataccagtcaggtttgctattacatttaccttatccgatatgccaatagcctacctaatgaaatagcagacttacttgttgcagtgtaactaatgaataggatgaagctggtacagctgcaatcaagactgtagaactggacgctgctcttggtggccgtgctgttcaataccgtgaagtacagggaaatgagactgagaaattcctttcatattttagaccctgcattattccagaggaaggtggagttgcatctggtttcaggcatactgaaatcaatgagcgggagcatgtaacacgattatttgtctgcagaggaaggcatacggtccatgtcaaagaggtggataatttttctgtgtttccatcaaaggaatatttttctgcatttattttgttactctgtccttttacgttgatagttaccagattcagatgtcacatcgcacttctcctgaacaggttccttttgcacgatcatcactcaaccatgatgatatattcattttggataccaagtccaagatattccagttcaatggatcgaattcaagtattcaggagagggctaaagcccttgaggttgtgcagtatctcaaagacactaaccatgagggaaaatgtgatgtagctgcagttggtaagttcatttttttaacaaaatgttctccatggaccaagtaatttttccttccagaattataatttacttattcaatcagaggatggaaagttgatggcggatgctgatgctggtgaattctggggtctctttggtggatttgctcctctaccaagaaagacattttccgagcttaatggaaaagatactgctttcgcttcaaagctgctctggtaatgtatatcacaggagacgaattcctttctacagtaaatgcactcttctaaaatatgtggttgttacatatttgttttttctcttgtgataaaacattgttttcatttgtattttcagtgtcaataagggccaaacagtttctgttgattgtgaagttctaacaagagcactgctagatacaacaaaatgctaccttctggactgtggatctgaaatctatgcctggatgggtagagaaacagcacttgaagatcggaaacgagcagggttggccgctgaggtagtattctgtcatttcttctctctggactgaataattttgacagtttgtgatattttgcaactcaaattaattgcatgtcatacatgattgggaaatcggtatctggttcatatccagattaatcagtaaagttaagaaaaaaaaa

SEQ ID NO: 2161 - DNA, 1862 bp, Brachypodium distachyon
  Intron number 1 from transcript Bradi4g05100.1 (locus Brad i4g05100) derived from phytozome v7.0 (chr-ID Bd4; pos 418 3985 to 4185846)
cggcagcaggtgcgcgcgagcctctgctcaattgctgatcactgtatgtagttagtaccgtagctctgtcgccgacgttacgcgaaggagaaatttgacctttctccgttcttgcgcgagatttttttcgcttcccttctctgtttctgttgcggtggtgcgtacaggggagaggattggttgcttccgtacgtacgtggggtttttcttggtcaatattgtcgctgttactttttatcttgtttggatttgcgcgaaagttttcaaggtgatattccccttctatttattttttggaaagcagcattctcgtactacttgcttgcaagcaaagaaaacgaaatatgctcttgagttaatcgatcattttcataccgtgatttttttttgtcatttgtctgttttttattgcgattacagcgtccatggttagtacagaaacagaaagtaggaagcaatctcagatattctagtggattttattatttctgttatcggaatttgctttgctgatttttatgggacataatttaattgtatcataataataataattgtaggagcttctagcttttagagcttatacgtgggtgctcatgcccatattaagctgaatggctctgtatgtgtgggttgtcacttttgatgcttgatttgcttaatgttaaggttaaggaaagtttagttggttgacgctatcgactactggataatctatgaccgtgactctatgaatgttatctagtactccctccgtttcataattcttgtctccaattagccccaaaatggatgtatctattcctaaaaagcgtctagatacatgtaatatttcgacaagaattatggaacggaggaagtatcaatttatcactgaatatattagctcgtatgtgatgtctgtttctttgttggattgttacctgctagctatgaagcgtgcaggaacacgattaagattaattacatagattacctaattgattgtaacatatgtttggttgctggattactacttgttagaagcatctagggaaaaatagactatgaagaatcgatgcgagaaccaattgaagaatttgtgtaaacattctaattttaagggttgaattagtatttttgctcctccctcccttcccaccaccgtcttttggaaagtttggttattttttaaaatagatatcactccctccattccgaactataaaacataatggcaagctaaaccaacccaccaaaacgtcttataatatgtaacagaatgagtagtagttaggtcctcttttggatatactccctttgttcttaaatgtaacgagtcctaactttgtcctaagtcaaacttcttaaagtttgaccgagtttatagaaaaatgtattagcatctagaatattaaataagttaggacaaagttaggacattagaaacggagggaatagatatttagcagtatttgttctgtttgcctactaggtcacttgaaggaagctcaatcgtgcaatgcttagttttcagtgcgttgccgctactttaagtcttagccttccccttaaattggaatccacaatcttgaataaaaaatcattttatactgcaaagaatggagcactctgtttcctgctttaattaatttaggctccagtactgtaaaagtgaagcaattattatgtttgaaattgtgtacctaactttagagaaaaattagctgctaaacaaattgcactccagaaggatcagaacaacacactaggttatttgctggtcttcctcttttatcaactttttatgggaaatgttggtaaagtacatattttagcatgcatatgacttatgatttttctttaccagggtaatttgcagc

SEQ ID NO: 2162 - DNA, 2980 bp, Brachypodium distachyon
  Intron number 7 from transcript Bradi1g54180.2 (locus Brad i1g54180) derived from phytozome v7.0 (chr-ID Bd1; pos 525 74789 to 52577768 reverse strand)
gggagtctgcaaggagatcaaggttacgcaagcaggtaacattggaaacgatgcattcgatttcctgcagaaatgtaccatagaaatatatcaagctttttctctccatttatcattgttgctcatgtatgattgtgccattgtggtgagcctggtaaacaattattttaccgggaatgaactaagagacttcaaagtatgtcaaggcagttttgtgcaagaattgccaaaaattaccgaatcgaaagctgacatatagcgaaatagtttgttggataggagataagtatggtaaccatatctttagtttacttctgttacatttgtttgttgttgttgcatggctactacaagcaaaaatgagtctagaagtgccaccaccactgtattcctctctctcctgaattctctcgtccatgctgagtgcatttgttcatttgactcttgtcgtcaagccatctctctctgacctctgtgatggatttttacccctaacgtgtgtgtactgtttggccccttggggacttgacttttccacctgacctatcaggctattccgtatgtgttacaaggcccgatgtcccaataatgtagtttgctgatatataattggtaattggtattttggtcaaactggtttctgactttctgttacttagaaaaatgagctgtctaagtaccaaatcaggcaattttcttatgggggcagtaacaccaaaaatactgggttttttagttcaacattaaaatgctcacccctatccttcccacatgttttgaaatgtttgttttactggatcatagtcaaaatttcccctcagggaaagacatcagttttgacatagccacataggccatacctttctttctataagttgaaatacttgagagtgagtatatgcagagtgggatagtacacattaatgttattttgaactggtactaattaagacggtccatgattgtgcacttagccccctagatttttttgggtttgcttaactacctaaacttctaacactcatcacatgttcccctaaggctgattccgagagcgttttttgacattccagtattagagttaaaggtgttatgttgatcaagaaaagttaaaggtatgaagaggacgtttgtgatatctgaagagagtaaagtggactccgtccttcagtgatagttgcatatttactatatttttttcctgttataatttggtttaggtagctaaatcttctctgtagttccattgtgcactcagtttttatttgcacggttctgttttcagtggcacacctgttgtacatggaggtaccctagctacctagctagtggctactacctaaaatcttctggatgctgtatatttattgtttattgtttattggagttcagatggagactgtcactgtggccaacagttataggagtaatcttcatatacttgataaaagaaatcagagcagtgtgctaattggaatggaaaaaatgaaggatgttttgaggcctgccaccttgactttttattttttgtttctgtataatgatctgatgctgaaatattacttaactgctaagttttctagcagacagcttgctaaatttggtgtaaatattcgagctattttattgattttatttccagttcatgtttacttccgacttgcctactttttctgtttgattgccatagctatagttgtattgctaaaatcttgcaacatatggtgtgattttttatagagaaaggacaaaaggtttgtgtctcgtttcattggtagagaagaatgatttataagccgaagacgaggccaaacaaccaaacacaaccacagcaagacaactccttgacgactactagagtctagatggactactggatgttataatagacgcaccaccaaaaacctaccatctgccttgattctttccatgcccgcaccaaggatgccgctgtccagccaagacctccgttcgctgggagagaatccagctctgcaaagaagggcagagttgggccatctttctggagctggattctctcccagctgggagatgatgatggcccaatagcgaccatgaactgccacttcataccacagacaaaagccgtccttgctgcacctagtcgtcgggtccccccaccatgtagggcagatctggcgtgacccgcacagtgaggaagagttgtccccaacaggctggaaatagcacgcaagaggctcctgccgcacagagatgcacacaaaccgcctccacagccatggaaggcatttgctagtttcttgtcaagaatatcatcacggttgacaaaacatgaccatgataatatttttgacacctgacacttattttccgagtctgccaacatagtgagcccatctaccagctagctaatagttgtcgtttagccaaccatgtcaacatagtttttggctttttgttgattgcacacatgtatgccttcactcatggggtcttaatgtaggaattatatacattttggaaagataccaccagaaaaaatagatgataaaattggaacatgtatgactcaaactcggaaaatcagcttcatatatggtaaggcactgaccatcttattggctacttttctttgaacgcccaaacacacaacactaacatgttatatgcacggtttgaacaaaaaggggctgcctactcaaatttccagaatccttagaattttaataaatttgaatttacaataggaatgcacgcactcgaactttctgccccactcaaattttcttctgcgctggtccctgggtatatgagtacatgtgttgttggaaactgtcgaagttggacatataatctattccacttgaatacttaacagttaccagtggtgccttagggctttcttgcattcacaaaaaaaaggtcacttttgtatttgacatgcttccttttctgttcatcagcaagagtgcgaggaattatcccggaaggtagctga

SEQ ID NO: 2163 - DNA, 3374 bp, Brachypodium distachyon
  Intron number 1 from transcript Bradi2g13670.1 (locus Brad i2g13670) derived from phytozome v7.0 (chr-ID Bd2; pos 121 65103 to 12168476 reverse strand)
cggacgccggtctccagctccaggttggttttgctagctcctcctccgtcataccctgcgcgttcctccgtatgtcttcagtcttcttccccgtgcctgcaaaaagtagccaaatagttccctgattttttttcgaaggctgctacttgctagtctcgggtaggccccacatgccatggcccgtgggccgtggagtacatcggcatctcctccaccgccgcataccaagttaccaacttgccccctcaaaaaaaaaaattaccaacttgctctctcaaaaaaaaaaaaccaagttaccaactgccacgcaaaggaacagcagaacgcggttgtaattctaggcgtgtcactgtagctcactttcctcttttcttctttgaaaggtccctgctttatattacaactgtggagaataatccccagggcagagttacaaactggaacagaaggaaaatgtaaaattacatccaagtcccttaagtccatcattgcgtggaatgtaggttagaagcatcagcaacaaagaataggagaatggccataagaacggaggtgtatgccttctccgaccggtgcagaacatagaaaaaatggccataatcaaagttgagcatagaaaaaaacttggctgctatgattaggagatgtaaaatctggcaaacttggagaacttgaacatggaattttattgggaatgaaaaaaagggaaaataatgaaacacagatctcagaatcctaatctccatcgatactacagctccggcagaaaccagagcaaaaacaggccatggataggagcatagatctatgtagagcttattagagatgctcttctctaaatcctcagacacaaaatcttcagtaccagacactccggcagtgaagagtggctcacaggagatagagggagacagggccgtctccaggaatttgaggccccggagcgaatgcaaaaatgaaatcttatttttgtaaaaagatcacataactaacacagctaaatatattttcaattaattattcaacctcaaaattttgatattttatacagtacaatattagaaatatatcatatatcaatcaatgttaaaggagtctagcgatgactgaatgattagaaaaatagtttaacaatggaccgatgaatttattgatcgatcgagtatggacttaccaattaggaacggaatagtggcggatgtggagggtaggtgccgcgaacagagtctcgccgagacgaccggatcgatcaatcggtcgattgcgttgcaaaacaacaaaattaatgatcgatggactggcctggagctggttaggtcggtcgaccatcacaatgcatcactgaactagtcaatgagtgttgcgggccttgagaagctacgcgtgcacggcccaacaaagtgcttaagcatgtaaatagatggattaattaacctacataagtgtgtgatttggaggccccattttttgggtggccctgagcaatcatgcacttcgctcaccctcgtcgacgggcctggagggagacgtcgatggctccaaatcgacgatgagcagaggaagagagccctaccaaaaactatacacgcacgcacctccctccccctagcactctagttggcgctccctccatagattctttggtcaagaattgttttcgattttttttattttgacttgattgaaattaagtggatgcaatgaaaaaagaaattgaattagactactatttcaatccactgatctattctatatagattcaaagctaatataatagaaagaaaagactctaaagtgtggtagaaaaaactacataccacactttaagattccaaccggatcctttcatttaagacttggatttttttatttaatccctttttcatttcttcagtgattaattggaattccaattaattagcgagagtgagaggagaagagcggttccattttcctttctcaaacaccgaacactgtaattattttaggcgtgtcgcgaacatgattctacttagctctaggtaaaacctagggtgtgcgcttcaggtttagctgataactcgttttggtttttctatttttttagtaattcggttaacgagaaatgtccacgattcagctaactgatgattggattaacctatttccacgagctaaactgttcaaaatcgaaaaaccgagagtactacactaagcaccgccgcatgacctatcaagggacggacggacctgttgcgttccatggggtaattgtccgtacaaggagaaagccctcactcgctgcatagatatgtcgcacttaatccatccatggatatgcctctgttcactgcaatttgcatcggttcatctatcaacgttgttattttaaaaaaaaggaactacccaacgttgttcccctaaaacaacaaatctatcagcactttcccctaaaaaaaaaatcaaatctatcagcgctgctgcagtgtgccgtcgaggagacgcactgcggcgggatcgacccaactgcatcgcgtccacgccctcgccggtcgcttgccgcctttccctccaccgttcaccgcacagccgtagcctctccccaatccggcgatccgccaatccccaccatgccgtgctgccgttggctcgttgaaacctgcaggatttcggcttgcaacccaatcctcagtttccttcacgaggtgacaaggtaaactctcctataagcaggtgtgcagaactatggtcttttcttttcatgattctttttcttagtctcatgaattgacttgtgtgatgtactgatttattaaattggatgattaggtttgttcttcaaaatggtcaacttctacttgcgtcttgagagtaaaatttttacagtatataaattcaagactgacgtattgtgcaagttcggatcacccgttagtactttcttgttgtcttttgcatataatttggtttgtatgatgttgccttgttggcttatgcatatcagaatatatataatatgggcccgtacatttttttcccctctcaagtttttttcctgagtcagcccgtgcacctacgccctatgtttgtgctattataggatactcctttttatttatcccttggtgtctttatatattaggcctggatcagacatgcttgactcagataatttactctatgctgattacatcaacattaatcatattcgttgtttcgcaaaataatactcagtaaaccttactcgtgtacatatttgacaatttttttatcaattttcattctgcttgtgcaattacagatactctctattaaatccagttatttaaaccctcaggtgaattatatatttcagctttgcaataatagtaacttctatttttcagcaggggccg

SEQ ID NO: 2164 - DNA, 12410 bp, Brachypodium distachyon
  Intron number 9 from transcript Bradi3g44340.3 (locus Brad i3g44340) derived from phytozome v7.0 (chr-ID Bd3; pos 461 41298 to 46153707 reverse strand)
ctgaaagaagtgtttgataggctgaaggtaaaagaaatcgacctccaagtgacggagaggttcagagatagggtggtggacgagggctacaaccctagctatggtgccaggccactgcgtcgtgctatcatgaggcttttggaagacagtttggcagagaagatgctagcaggtgaggtcaaggaaggtgattctgctatcgtcgatgttgattcagaaggcaaagttatagttctcaacagcggcagcggtgttccagaaccaatggcgcctgttttgagcacctaatcatgattctggactaccagttactctatttcgttcggtggtgttgttatcctcgatctttttcagcaccagcagtggaaatttcaggaagaccaatgaatataacttccacatagcctacagagacaccacgcctagatgtttagtttatttgctttagaaagaatcgtggaagcttgggttttgagacagcacgccttttgacggcactgtaatgtttgtaacgtgcttggcggcttggcgcccacctgctccctcacttgtggaaattagtagaaaaatcttcaataacgatggagacattgccgctggcaacttcaccacttacaaaatcggcggcatataccgtccaattgtttagtactaaaagattataaagaaaaattcacatgtgctaattggtattccaatagagaacctaaaattttagattagaagcatatcatgggaaatctgattgtttagatccattagtcaggccttaaacgcagcaacgaggagacaccacgcaggaacgctgatttcatcatccaagccgcggtggcactgctgtctcaagatttcagtccgttgcttcgaaagaagctcgatatctagagatcactaagatattctcaaatagttggcttggttatgtatttggctagcaaaactaggcgttaaatctcatttgttgttaatcgggttgagacttgtcacaattccgggagatgatcggcttgcacaacgaggccttacatctcacttgttaagcaagttgagccgtttgtctcgattccgggagatgatcgctggtgtgcatttggaagaattattggctatctaaaagaaactgtgagccatgtcattcactgtaccatgtatcgaaagataatcagatgttttattgtgattcaattggattttctatgaacaaattgccacgagcgggtatgcgtttattcatagtggtgacattgtttcatgaaagtcttgccagtagatcatcttaacgaggtcaacaacagaagcagaactcacaacatgagatacaaccacttataaagcaatggctttgtaaactcttgatggacttgcctagaaaaaaaaacagtaaacaatccctaaacatcacgagcacaaaccaaaacaacctatgaagcacaacctccggtagaacgagaaacaaatgccaaaaagccaacagagccgccgacctccaccccaccgtaaaaaaatccatgggcactgagaagctgacaggcagctcctcaggacgcatgcccagagaagagtccaacgagacggcgataggaggctcttgaaaacacatgcttcgaaaagagtccggtgtagccagcaaatccgacacacctagtgatgacaaagacagaatccccaaagatgcatgccccccgctagaccaagcacaaacacttcaaaagtgagaacaaccgatcaacaacgactctaaacagaacaaatgaaacccaaccaatcagaagaactcaccgacaaaggcctgcccataagcaaaaggcagaaaccgaaacagccaatggaaccgctgacgttgaccttgccgagagaaaaccaccatcatataaacggaagcatcaagtgtgcttaggcaaccacatgtaggaaggaaatgcaaaaaaaaaaaaacacgagcagaacaagcctccgaagacacgcccagacagccacgaccacaaccatgccgacagcagacgaatgcgccactggaggaatagctaattaaagagaagaaccaccttcacccgaggcacgcaacgggaaggcaccaaagaaggtaaagtgaaaccaagaaacaaacaatattgtgcagcaagaagcggcaacacgcacggagaacagaaagagggagaagaagaggccacacaaaaggagaaaaacaatcacctcgaagcaagtagggcggcagctaagtggtggacacaatagctcgaagacacatccacacaggaatcgacttcgaccacacaaggacaacactgagaccaacaagaaacacctagaaaacggtaagagaaaaaacccaccaaagaggcagcaatcacaacaacccgaaaacacaattaacaattggcagcaacaagcaacaaacaaggaaaacaatcagacaaagaagccaaaggggaaacaacaaccgtcgatcaccaccaacaacagccggtcacctaacaaccgcgtgagcaaagaaaaaaagaaagcactagggaacaagtcgccaaacggagtggtaaaaaaaaaccacaccataggaagagtgttattacatggacacaccgcagccactcaataacaaagcgtgggatgggcgaggctcaaagcaaggagaggacgtaaaatctaaacggtttattaaaagggctagaataacgcgcgaacgtgctcgcattaactcatccgcgcatacgcaccatgcatgaagccgctagaagcagaggcaaacatgccagcggagatgcccatgcgcgcatgcatgcatgcatgccgcttgcagcagtatctcagctgcccgtgggtgtgaacacgcatgtattattttgtcaaatgcaactttaaaatgttatatctctcaaaccgaacattcgatttaagatccgtcttcgtggttaattatgtttcgatgagatcttcaaaacaagatctcatattgatatgtttcgacaaaaaaaaaatcatattaaaagttgccaacctacggtatataaagttgacactctccaacatataaagttacaatatcgcgcgacggttgcgctataggtacaacacgtgacggtgccggtcaatccgcgtcagctcatcatatctcatacaaaccctatctcccttgctgcccgtgatacacacaaatcatcatccctaattaatataatttgcactctcaaatgaacacaataacagtgcacatatatttcggtaaaaaatcgaccacgcaccaccgcatcctgcgtctcctcaactctaaattaagataccatctccatttaaaatgatctcacttaaaccttatctacatgtctctcttactgcaggcaaattgccacccctaatgcaaacaaattgtcaccctctaatgaacaaaaattgccaccctaatgaacaaaaataaccacccctgatgcacataaattgtaatcctctaatgaacacaaattgccacccttaatgcacacaaattgacaccttaatgcacagaaattgccacccctagtgaatacaaattgccacccctagtgaacacaattgtgacccatagtacacacaaattgtcacaccctaatgaacacagattgccaccctctaatgaacacacataaccatgtacgtccatccatttcggttaaagtctagcacccatcattgcatcccacatttccttcactccaaattaagctaccacattcatttgaaacgacacacacaaatctatatttttgttttccccaatgcacataaattagcacccctaatacacacaaattgccagcctcatatgtacttaaattgccaccctaacgcacactcattgccatccttaatgcacactcgttggcacctccggtgaacacaaattgccacctctaatgcagacaaattgccacctctgatgaacatgatttgccatgcatgatacagataaattgccatctttgttgaacacaaactgccacaccctaatggacacatttagccattgtatatatgtccgtttcgatcaaaatctagcacccaccgctcgattccgtcatcgtaacactgaatcttgccggggctcctccctcatgcaagccttgcggcagagacatcaccgctgaatccacctctcgattacgatttgcggacaagcagcctgattcgtcccgaaacaaaataaagcagctagctacgacgctgacaaatcgattatgtccttgtgggcgaggagcgtttttgcccccgctactggcgggcaaaatgagcaagcagccacggcacgacatctaccgcgtgcggcaacgacaggtacggctcgtggcggcgatgggagaggtgtgcagaggcgggtgcggcgcaggccggtgccggctggggcggcacgtggtggcggggatggcgcacgggtgcgggcaggccacacgaggcggcgggcacggctcagtgcggcggcgcgaggaagcgggcatagcgcgcggcggtgagggcaccatggacggacacgacaacaacgacgaacaagaccacgagagagcaaacatgcttgtcattataatttctgtagaaatagaaagaaaaaaaaacaatgcatgcatgtggctagccacttatctaagcatcagcacatatcacaccatccgcgcagatgcagcaggagccagcgtgacagtaggaaaaaatgtatgcatgcatgcacctattcacctagcttaacaacagcacctagcgctagcacggcaggagccaacgcagcactagatgcgctcgagagtggagaaaccaacgtgcgaacgcgcatcgtcataattttcgctattaaaaagaactatttgcttgcaggatgccagttagacttaaatgtattttaatgattgttttctctgtgtttttttagttgtaacagttttctttcgtttttatttacaatgaatgtaaaaattgcgtgccgtggctgacgtgacgtagccggctcttcttatctcttgcttccccttgccctcctcctgtatgagctccatatcccttcttcctgaatcctcctcgccgagtcccctcccctctcctagggtggcgtagcgtagcatcaaccgtcgtcacccgccgccgccgccaacgggctcccctcgacgccgtgcgccggatccacttcgccttccgggtcccatcgacgccccgtccatatctggtacgccgccgtgcctaacctctgactttctacgtcctcctgttctccccttcctgcccagcccagtcagtgtagctgcgtctagtccggccgcagcgggagcgccagagaaaggggaatgggaagggagagcatacttcgcggggggggagctttccgtcggagtcgttgggggatggggagccccaaacccgagtttgggggatcctggaagggatttggggagtcggatggtgaagctgccggaccagtttttgttttgtttttgtttttgctcaaaacccttgaatacgactatcggcatcggatagggcagctcctggagttactcttatggagtatatcggctattagggttgcgagtgccactatcagtggattggcagcacctccttatctgtatatccatgggagaaactgtcatggttgacttctttatatgcaattcttctgccgctcccatatgggcttagttgagtgtggatttggatgactatggaactttctcgccgtacagggcgttgtttacttgctcttatcccataaagtgtctatcttagctccattcatgaccatttcggcatattgtgatgcttaccataatcagcaatacattttcaggtcttggtaaaagggttgcttggggcttcctttagacataccgacatggagggggctctggttcagtcagcaattgtccctacaatatataacagcggtgctcaggtccgtgcgcgtgcaagggcaacatcagtgagggcagcatcggtatgcagtatgcggacgcagaccatgaccctagggggttttcaaggactgcggagggcaaattttttggacacaagatctgtggttagacgtgactttggctctattgtagcacatcagcttgcacggccgaggggaaaggggtctcgaatggttgtgcgtgccatgtttgagcgctttacagagaaggcaatcaaggtgattatgctcgcccaagaggaggcaagacggctaggccacaattttgtcgggacagagcaaatcctgcttggccttatcggtgagggtaccggcattgcagctaaggttcttaagtcaatgggcattaatcttaaggatgctcgtgtagaagttgagaagatcattggacgaggcagtgggtttgtggctgttgagatcccattcacaccccgtgcaaaacgtgtattggaactgtcgcttgaagaagctcgtcagcttggtactgacctttttattacccatcaacttaagctcatgttatttgttatgctttatgtggacagtgcaagttatctatatttttccactgttcattcgtaaccatgtccatctcttgtattcctatcaccgtcccgtatattttctattgcttcttaccagaacatgattttctctttcgacatgaaatttctctcttcttttttaatgatatactttggcgatgtgatcagcgaatgactagctagaatcagatactagagtaaaaaggatatgcacttgaatctgtataagagaaatgatttttggtgcttcagatttatataaactcatattgttatgataagatgagatgtgcgcttgtctccaagtaagttttactgtagcggtttaagtatgctacgtaacctactattctactttactttgaatttgctatgtgatcaactttcctatatgtcatatccacgttgctgcattagattgtatatgaccacaagatgtgaaacttctaacagccaacaatagacgtccatttgctgttttatgtcctagttatccatgagaaggtcgagtgatagcttctaaccatggttcttcattgttcagggcataattacataggatctgaacacttactcttgggcctgcttcgtgaaggtgaaggtgtggctgcccgagtgctagaaagtctcggtgctgatccaaacaacattcgcacacaggcaatcctctgaccttggtctttcagttgaaatgtttcaaattgcactatgttggacatgatatatgacttgctatgcaggtcataaggatggttggtgaaagcacagaagctgttggtgctggtgttggtggtggaagcagtggtcaaaaaatgcctacacttgaggaatacggtactaatttgactaagttagctgaagaggtaaatttcattcgtcattgctgcacttggtttgctgcattatattagatgtgaatgtgttaatctattttgcagggtaaactagatccagttgttggcaggcaggaccaaattgagcgtgtcacccaaatattaggaaggcgaacaaagaataacccctgcctgatcggagagcctggtgttggcaagactgctatcgccgaggggcttgcacagcgtattaccaatggggatgttccagaaacaattgaaggaaaaaaggttagttcaaaattattgagttgtgtactgtttttgtttttattggtgtctgcataagcttgtcctttgtcggatttaaattatctgcgcaaaatcattgtgctccatgtctgataggtatccacacgataaactttgctactggatgaaacatgagaacatgcattccctatttcctatgatatttcagtgttgttccaagaaattgatttgttgttatttttgctacttaggttattacactcgatatggggctgcttgttgctggtaccaaatatcgcggagaatttgaagaaaggctgaagaagcttatggaggaaattaagcaaagtgatgatattattctcttcattgatgaagtgcacactttgattggagcaggtgcggctgagggtgcaattgatgcagccaacatcttgaaacctgctcttgctagaggtgaactgcaggtaagtggtagaaaaatgttgtcaaccttttatgtttaccttgctcccttcttttggttctgtatattagatttgaaaaaacaattgttccatgggagacttgaagttttatgcaaattgtattcaagttgactgggaacaatgatagatcacatcaatcgcatatctatatttaccttctctatgtgatttatgtatttatttcttcagtgtattggggccacaacgctggatgagtacagaaagcatattgagaaagatccagcactggagagaagatttcaaccagtcaaggttcctgaaccaactgttgatgaaaccatacaaattttgagaggcctccgtgagagatatgagcttcaccataagctgcgatacacagatgatgctcttactgctgctgcgaagttgtcgtatcagtatatcaggtttgttagcattagttagatctggttacttctgatgaatgcttaaagtgttttgcggttaaagtttgtcctgtcttgcaatactaacttgatttgaagttgcacatgtactgtttaacaacaatgattctcggcctgtttttgtaaatttaatttacatcaatgtgggcaagtaatccaatgttatagtggttccccatgtggtgccttttgcaatatgtaaagccaacatgttttattagtttgtccatagcataaagctactgaagattgtagaagagaagaaaactagaaagttcagtatagcgacattgtttatgataattgcaacaaaagatgttacttcagtaacctcctaatcagatatccacctactcattgaatttattatttttctgccattgaagtctgtgatcagctagtagaattgaatttttttttatgccgttgaagtgtctgatgtgatcagctgctagaattgtaaaacaatagtgatatcaataatcaacaacaaacagttcagactttacactgcagacttgcattttttcgagccttcatctcagtgccactaatatcgcctagttatttagctccccattagaatgaaatgaaagaaaatgttcacgtgcagggggtatggaggctgatattaattttggtccagcctagtgatattaatttttacaactgtagtttcgttgtcacaaacctagatgcgcaaattggtctttgggtctcactccgagtctagaacaaagataaataatgaacaagagctttgctgtacttacaaatattccatttttttttgttcagttagtaaaattttatattgttgaaatacagtgatcgtttcctacctgacaaagctatcgacttgattgatgaagctggatcacgtgtcaggcttaggcatgcccaggtataagcacacagcttactattcctgagttgacaaacagtgaagcttaccaatctaggatgaaattgtgttgcagctccctgatgaggcaaaagaattggacaaagaacttcgcaaggttaccaaggataagaacgaggcagtacgcggccaagattttgagaaggtatttgcacaaaatttgctctgggttaattttctttcttccaaaaatgcctgctatattgataatgtgtggcactacctctgttccagatagatgccaattttgattgtgtgcaggcaagatattgatcatgatcaatagtgtctatttgacatatttaatcttgtcactgtttgatgtcatgaccaaggttttcaatatcgcgatacatatcatagtagcgtatgattttacgatccaactgtatttgaaatgatacatattgtactccagatcttaatctggtaatggccccgggatcactctgtagcgtgaaatcggtagaattgcgacatggatcgactcacatcaatcccacacccagcacaacagcaacacgttagcaaaggcccggttgaggctgatacttgctgctggtccggcagccctggtatttaagtctcttgcaacctctctaattccgtgaggtgggactgaatgaggtatgtgcttgctagttatgacgttgcatgtgggctgcctatttgtaggctgtgagctgcaagatcaatggccatagggctctgcaggtctaattatttctttgaggatctgctaactaatctgggtattatttgtatattgatttatttgtctcacacgcttacattggctctattgcatgctagatcatgcacttatgtgtatgtcttaatcattatttttttggccagtgatgatactatactctatatttcttgctattctagataattgtattgaaaaaatcattctgagctattttctgttatatataaattaactatacttgaactgaaaaccacgtcttactatcgtgatgctatgatatgatcccacgattgagagactgctgccccaaaataagatagtacctggtatccggatgttgacagccttggtcatgatcaatagtgtatttttaactagtataaaaaattacttcctcttcccataaaataggtgcaattaactagcgcatgcatgcttacattttggtttccgtgtgtcatcgatacagcatgctgtgactgttggatgcctaatgagtagtagtagaagggcagcaagaccaagcattctgtacatgcatagcattgatgcggatattggttgccgatacaatctagtgtcgtagcgagtcactgtggctcagagtaaaagtgtcgctccattaaattggagccgcacctgaactccttgatattgccaacaaattttatctgacttataaaatgggaagagggggtatttaggtttgttaggtgcaactggtatcattaaatttgttctgaaaaacagtttcacaatacattttcttttactgcttttcagaaatatatctggcatttaaacatggcagtctccgagacacaacttttatgtttgctttcacatatgtatgtttgtaaaaagttagaaaaattacatattttggaactatttttatgacaaatgtaatgatatcgtttttacttaataaatcaaaatagtttgtttgttactttgttgtcaaaggtggagaagtttgactgcatgctttctacaagtcatgtttttgaaggtttttttaatagaggcagtaatttttatttacattttcatacaaaagttgagttgcatattggatacattgcaaagtactaacataatttattttggatggagtcagtactccctctgttccataaagattgatggctttgaactagagctagttcaaagccgtgccaatctttattgaatggagggagtactagttttatgtgcatggcgaaacttcttcccgattggtcagcctttgaactttgaagagtcttccctcaccagtattttccttttgatatgttcctgccatctattgttttgacaggctggggaactaagagacaaagagatggaactgaaggcacagattacggccatcattgacaaaagcaaggaaatggttaaggcagagacagagtctggtgaagttggtcctttggtcacagaggcagatattcagcacattgtgtcctcttggactggaatacctgtcgagaaggtctcctctgatgaatctgaccgtctcctgaagatggaggaaacactgcatcaacgtattatcggtcaggatgaggctgtcaaagctattagccgtgcaatccgccgagcccgtgttggcctgaagaatccaaacaggcctattgcaagtttcatattctctggaccaaccggtgttggtaagtcagaactggccaaagctttggcatcatactactttggctctgaggaagccatgatcagacttgatatgagtgagttcatggagagacatactgtctccaaactaattgggtcaccacctggatatgttggctataccgagggtggtcaattaactgaagcagttcgccgtcgcccttacacagtagttctctttgatgagattgaaaaggcacatccagatgtcttcaacatgatgcttcaaatactagaagatggaagattgacggacagcaaggggcggacagttgatttcaagaatacgctcttgatcatgacatcaaatgttggtagcagtgtcattgagaaggggggccgcaagattgggttcgaccttgactacgacgagaaggacaccagctacaacaggatcaagagcctggtgactgaggagctgaagcagtacttccggcctgagttcctgaatagattggatgagatgattgttttccgccagctgacaaagctggaggtgaaggaaattgcagacattatgctgaaagaagtgtttgataggctgaaggcaaaggaaattgaccttcaagtgaccgaaagatt

SEQ ID NO: 2165 - DNA, 1924 bp, Brachypodium distachyon
  Intron number 2 from transcript Bradi1g12170.1 (locus Brad i1g12170) derived from phytozome v7.0 (chr-ID Bd1; pos 908 3688 to 9085611)
ctgtggatcccataagaacttcccatgtaagatgttttagattcattgatctcattaaatgggggcatgcatgtttattggtaatcgggtggtagctcttctggttttagaggcattaccacaacaacagataataaatactagttggataaatcaatatgatattttgaaaggaaaaataaaagaaaaaactatagtgaaattccatttttcaaccctctaaaactgtttgacatgcaaccttgaataactaggcatctgctttaccaacttgatccaaactagtgtggcttgctgctgatttgtcttccatgtgaatgccaacttggcacttaatctgaattggctcccagcactctagcagtgaagtcactgaggtgtttttctataccaccctcacctgccagttgacttcaccccacctcccagtttcccatagtcactgagaacaacatccccatcttcccctttctcaccatttgaccccttctattgatttgtttggttatgcggcggagatgcatgtggcatccacatcagccggaaaccgtttatgaaaccatgaaccgtccgagagtggaaactgaaagctggactgttgcaaacggtttcatattgagggtcgtaaatcggactctggctagagttgagggttcaaaaatgaacatctttttcccattccaaaactgaaaatttagagaatataactttcctgaatttcattgaagtacagccaggtaccactcagtgaaagaattgccgtggttgaggtgggtgggtgggtgggtgtgggcgggggcagtccaccttagttgcaggttttcgttaacaaggaaacactcgtgcgcttggagtaagctaggcatatatattttagtttcatacatgatgacaaggaaaataatcgagacaagccttgtatttggatataagcagctgtcaactttgtaagatgtacttatcttgatgacaggtcttttttgtcaacatcaagtagaacacattcaggatgaactcatcttattctcgtcagctgttattgtgcaccggctaccagtagttatttgagagaattcaacatgtaagacgtggcaactataatctctgttcactttgggtttttgttaatgagttcagtagataaccattctcatttttgtggtaatcgtgagtagtttatagcaaagcacagctagtagttagtacctacgtcaagcttattccgcagaccaggttatccctagttagcattcccctgtaaagctgtacaacctatataacttttcaatggtgagttcttatgagatcttggatgagtttcagtacacaaactaaatagtggttccagacttccactagttggtacttggtatgcaccaaaggaattttttcctttcacttttgcaataattctggcaataggtacattccctagtttatcaatccccgtccgctcccaattttcaaccagatctcgcttatccctagagatcaactgctaagttcttgtatcttcaagaggcattgcgtgtaatggtacaaaaaacttcggtagcaacatgatataattttccacctacaactattcaactattgctgatggtccatttcttaaatcaaacaaatcaacgtagttagctgcagtactgtgcattgctgttactggctggaagaatgattaactgtgctactgctaactaccaatggttttaaaatctggctaccaactcttctctgctcgtggatcacatggttacacatatatctgtagggaatttatcagaaacaggaactgtggaatttcagcaactgtactccttaggatgagtagctgacaaagacccaggactgactttcactatctgttgacatggtgtcgaatccattactaagaaccttatgatccatttcttgcaggatcccc

SEQ ID NO: 2166 - DNA, 3057 bp, Brachypodium distachyon
  Intron number 2 from transcript Bradi3g28650.2 (locus Brad i3g28650) derived from phytozome v7.0 (chr-ID Bd3; pos 300 63620 to 30066676)
tgagaccctggtagctgtcaacaagaaagcataaggtttgtgaacttctaatgatcctttgaatctgagcttcctgtataatcaagagcagttgatgcttttgattttcttttactatcaggtactgtaggagtatctttgcagcaactgtaggggcaagtaaatgacaatattggcttggatgatgttttagctttgaaccagataacttggatgatgtttgattgacctggctttgatgcttttgcttggctgatgcttttagcttcagacctgagagtttgatttacctgtctgcatgtgcttatcttagacttcaagtgatccatcatccatgttggatttgtggggagtgctatctttttcattgtttaaactcttctctatttcatggacttcatagatggtcatcatgcctagctcatcgcctagatcctcacattgatcctccaacgctaacgaccacttcaggatctttttttcctagtccagtttaagatgtttctcatgtatttatctagtatagatgcactcacagagtcacagtgatgatgcaatttgtgaagtactgtgacctgcaagttatatgcatccatcaagttacagtgtattctaatgtgatcgacccttccttaattattttgccatgcatgagagttctgattatagactagaaagaatatgtttttttcttctttctagtaagactttgtcatgagtcctgacctgggccagttatatttatcccagatttatagcccccataagtgttccaaactcctccgagcttagcagcatgcgtggtccctacttcttgcaagtttggttgttgttagcagcccattttattgcccccttcttttcagcttttggacagcttctaggtcccaagaagccacaagctgaaaagaagtgaaaatttcttagaggctttaattacagatattgcagcttctgcaattcctcaatgtacaaagattgatcatagcagattgcaaacaagtgcagctataaaagcacattcagtacaaagcaaggtagaagcaaatgaattaagtcagataaatttaacttcagtaagcattctgaacattttttttaataagaacaactaacctagtgagcagagaaataagtcctaaatctgctcccttttgtaattagcacaaaactaaaacacaaaacacttgtttctttataaactagctagaagcttccacttgtcctcaaaacaactcagctatcagaaatccttcttaatagaaaatttgcttaatagaaagaaaaggcttgggttgcttaatagaaagaaaaagctttggttacttaatagaaaaagtttcagtttggcaaagtaaggtagagtggtagttctgcagattataacttcagttagttgcacgcttagacaactgaaaattcgaacactaagtacacaccggaacttattagatttcggcaagacagaatttacagcaacaagaagcgctaaaagcgaatatgattttacaaggaatagcataggctgccttcttttactagttactgcttgctgctattatttctaccacactgtggtttggttaactacagtcaagtccatctacatctcgattatatgttggttccgtaaaaacagttttttaccaaacgtctttgaacatattttagctgaaacatattctactgatgtatcccactggtaattaacaccgttaaaacctccatttcacagagtgtgactagtgctggagaatggttatttcattttacaaaccagcagaggggtactacaatctctaagcatttcaaagacaattccaggagcaaataattctcccacacacagcagaacccatcgggatatgaatcaaattgaacaatgcctggaataaaccaagaactcaccacaaatcccgaatgacgatgaagaccaagctgccggagctagtcgtagatggtagcctctacgtctatgaagaccaagctggtcatccttggacttggttattcagcaagagttgtagagttttggctagaggtgcaacatggtgaccctcagggtaccctttgacccttcttagttcaaacaaatgaactagtttttcaaaaagttgtgtcattttaaatttttagttcatttggttgaactaagaaaggtcaaagggtaccctgagggtcaaaaatttgcagctctagttttggcagtttaatgacaagttaatctaaagaaaaactaatctgaagaaaactgcaatggatgtgcagttttcttaggtttggtccacatgctgctccaaattttttatttggatgcacagaatactgtatccaaatattactatgcttaattacaccgattcttttaagaatgattattcggtgcaggtataatagcttctgcacctatagtatgagtcttcctagcactattcatgattttgcggtccaaataaatcatggttattggttagtttttagttgtagctttgtgtttgttcctctttttgatatttgattgatgcacactaccacaagctgtagtttggtagctttgtgtgtgtatttgttctcatggtcacagtattctgtctttgggaaattcagaaggtatttctgaaaattatgattcataccatggttagtggcactatggtagtcgatgcatacaatctgaagcatatatgcaactcgagtagatgcagacaccaagaattttgctttctggagttgcatgttgtaagcccgaagaattctgtcatacatgctcaatggacagcctctagtcatgatatatatggggatactacttcagtttagaatcagtagtactaggtttttttgggaaagagtgcaagttcttggctgctcttggtaaatccattgcacgatagatatgcttttgtcaagtcatatgatgttcttggctgcatgcattgagctgtacaaatcatgaagaattaaaatctatgatacctctcggaatattctgaatttattttctctttgctcccatttgcaggattgattatctttgctgcgttcagtccatctgcc

SEQ ID NO: 2167 - DNA, 8526 bp, Brachypodium distachyon
  Intron number 1 from transcript Bradi4g42750.1 (locus Brad i4g42750) derived from phytozome v7.0 (chr-ID Bd4; pos 466 54593 to 46663118 reverse strand)
tggattactgtatttccgaccgtaccgagagtaagtttgttctccactctgaatttttattattagtattaatttcctccgatccgatagtagcaatttgatgcttaatataaattctactgttgtaatgtaattacaattatctcgtttcgacactaatttttctttcgtagcccgtttggagccaatgatggtatcagagccaacagattgtcagccgaatcgagaaacgtgtatttttcacgctgcatatcatatgatgcagattttctcattgaaattggctaagatttcaattggcattagtccaatccaactgtatggatatttagcagttcgtgacattcgtgactctggacttaattatgtattcaatcgtagcagagatgaccccatcacaatagacgaggtaatcaaacttttattaatcatttcaaagtcaatttttagttgtagagaataccaaatttgttttctatataatattttagatctactttttcttcctacttcttttacttataaagtttggagtcggtggtcgtcaattcacttcttcctgacctttctcttgtcactcctgataagtagattgtacaaacccacccaatgaaaatgaccaaattgcataggatttgaacccaagactacttatgaaccctatgattataatgtagtgaactcaatagttgtcttttctggctccgcccctaaacccacgagttaaaactttaattcataagggcatccgcaaaggacggctcttaactgactcttatttgaaatttgcttatgtggaggaaagagaaatatgagagagaagaggattgactcttcgtgaagagttagactcttaaggaaagaatcgaataagagtcagctaagagtcgacctatttaccattgtgcatcactgcatttaatgctaacaaattatttatagcagtctaaagacacaacctattacatatgttattttatcgtcgactttagatgatgtggagagtcaatgccgactctaccattgcggatgccttaatgcttccttacatagtctttgttgttgcatttctcttcaatcttcatgagtttgggttcagagttcaaattcagcaaaacctatcatcatgcctacattggttcataagttgactatcatgttttcttcagttgtaaattttgtttttttgatgactccgtggcaaagcgcgggcacaaagctagtcttctcttaaatatgtgctatttacataaagaaagcaatgattgcagcataaaccttgcaacaaaatccaacaaaaaaataaatgagaaggaaactataataaataaactatattttggatctagttattacctagccctatttccaaactgggaacgtatcaggtgaaaacctctattcagggaaaacttgaaaactttcaatcatatccattagatcgtgcattttaagaaaaatgttgaaacttatagttacttaagtgcattttaagattaagaaacccccgtagagaaccccacctcgtggggtttttcataaaatgagtggttagaagttccaccctttcacttgagccttttatttgagttataatggttaagattggaagttttcactgaataaaagttttcaccctctaaattgtaaaatatctatgcaattatactttgtaggtaataatcaggtaatatagatttcacataaaatttgtatatctcaacattttcactaaaattgcagttaacgtatatatttcttagttttactaattaaatactttttgcagggttctctcatagaaatgactggtcctaagcgaggcatcggaatgagttgtgatgtcctaattgaatatgacatgaagatcaagaaaggaggaaaagaggaggaggatttataattgatcgatggggtatccgactatagcgcggtgcataacacatcatgcaaagcattcatgaatcgcatcgatggtgatggtggttcggttgacataacattggcacttattcgtagagcggtggaggccatgatagaagttgtcgtatcagaagtgtataatgagggattcgatttatgtctcagttcttttgtgagtgggataggaaaggagatccagctctttcatggtgttgttgacgagccatgtggcttaagaagatctgtggtcgctgttgcgttggatactttgatggagctgaagttcaaggtttgtcatggatgtggggagattgaacgctgcgctaacttcaaagctatcaagcatggatctgtcagtcaagacataaagtttgatcaggcgtctatcagtgtgaaggtcacttggtcgactttgttgtaaaagtctatctaattgcaattcatatataattcaaactcttgtatacccgtggtttatgtgactaagtattgctatcttttttttacactattatactgcagcaggaacaggtgcaggccatctgccaaatctgcagaacaagggcccaatgctcaactgctggtaaagccggtgggagattctagctatgtttatactagaaaataaggctctgcgcgggcgattctgcatttctgcgagttgcatttaaaagagaataatgataggatatacagtgtttatcaattccactggccttccttgcaagattttacagtttttatcaattccacggttgctgtgcatggatgagcgttcgcgtacgtgcgcgcgtcctgggcgcggtcaccgtttgtgcatgcttgcgtgtggctgcgtgcgtcaagggctcgacaaggcgtgtcgtgcgtgtcgtggtcggagagcgggctcgggatgttcgccggcgacgagagcgagacgccgagaccgtggcaattggcagacgcaaagggtgaaacacagaaacagcatggtgagctcgagcgcaaatacaatagccattgtcgtttccagagtatattttcctggcccacgcccatcccgaaatcccgagttttgctcaataggccgtttggcaggccgggattaaatgggctgagagcccaagatatccccagcgaaaccaacccgctcgtcttcgtgcaacggtaacgctaaccccaaaccctaattcgcgttttggtcgaggtctattgttccgacgagagaggcagcgcggaggcgccgtaccagcgagggaggcggcgcggtgggcagcgaggggagtgccgtcaggggcgccgcttgcgtgggactcacgaccacgtcgaggagatactgctggcctccaggggcgagtgccgccgccgtcctgatccttccatccctacgaccagttcctccggcaattcctgttcccggcgaatctagctttctgtactctgattcttcctccgttgcgacggtgctttattgggcagtgccacgaggccagagagttttactcaccgcggattcaatgtgtccgatcacgtggattttgagtttatggtcttgcagatttgttcatacggatttgatgagtttttgtcagtgtgtcatgatgctgttgttggtctgatcttttgtgactttggaatctttctttggcgttttcatgaagatcatgtggttcgatgacctgcaccactaggggatcatcctcggcccaagtacgttcaacgctcacggcttctcatctttttagatgggcgactcaaggggttttatgaaacctttaaaggtaatcaagttcgcgcagggtacgagtggcgatattattgttccagtctaattgtagtacttttgttgaagtccggagagtatttcgtgttgcaaagtttgatgccacggagaatatgttttcgagaaatttcattgtaattcttagtcataagggttactttgtagtttcttgtgtctatgaagcaccgtacctgtaatggttttcgagtttgaataaagttacaggagattccaaaaaaaacttactcgaatcttaatgattaatgagaaaattgacacgatgccactgaatcaaatctaacatccaaaataccgcgcaaataacaacccttgccaaaatacttcccgaaattaccctcctctgatctgaaacaagaatctcagtccctccacggctccaccctaaccacctcaactgcccacccgaatcctcgtccgccactgccgctcgcaggcaccccagatcgtccatgttccgatacatgccgcgcggctggaaagcagcaggcgtctcttctcgttcctcctctccacgaggactacgcccatctgaggaaattaagccacacaaagtttcatttgttaccaccattccatttcaaacagcccaagaatactactccctccgtcccatattaactgattttctattgcatgtatctagaagctttttaggcatagatacatccaaatttgagtcacttaatatgggacggagggagtattcaatagccaagcatattatcagcttgggaaggctagacacgcgggccacgagaaatgctgctgaaatttctgtattatgtgctgctgaaatattgatgtccaaattgtctgctgaaatgtgtccaaatggtgttgctgaaatagaagcaaataagtctgaatgttgaagaggtaagggtatatatgtccatgtttgtggatgttaagggttgttagtccatactccatagtggtattttgaaatgcaaaactgagttgtattggtattttggcaaggcttgttatttgagtggtactttgaaatcttaggtttcagacagtggtactacgtctattttctcatgattaatcatgtggtcgtgacggttgggatagatcacatgcaatgaaggcttgttgtgaacattgcgagagttttacatatagtgattaccagctttacttcttgatatgaaactgtccgcgaacgagtgtacgtttgggttttccaagaaaattaagcattaaggcagaaaatgcattggcaagatgcgaaccaccatctctcttctctttaatacttccacctccaatgagctgagtgcatgaagaaatgttatttggtttgattttcgtgtaatgagaaaaacaattttttaatctaaagtgttttaaaaagagacgagtacactcttttgtgaacaaattttaaacccaaacgtacccttatttgtgaacagagggagtatgcttgttagaggaacgattgaaaatccattggcactgattgtaactgcgatgggagttccaactgactaaaatgaccaagtattttgtcaaataactcgctatagattttttttgctggaaaaaagagcgttctattgaatcacataatagtttatttacattccgtgtttaacacggccaacaactcgacaggacccgatcccagccaaacagctgttcttgcatcactcctagcaacattggcgagagtatgactagcaaaattctgagacctagttatattttcgaacttgaacgcccttccttcttgcaccaacttcctgatctcttccactaagaacatgagaggggaatgatcctccttcttagagcttgccatcgccagcgccgtcgcacggtctagctgaatcaggactggttttgccgtccattgcagggcaactcgctgtagacttgacaaataattagaagatatcgtttattctaaatcagaaaaagctcccgatcaatcccgtatttacaatgtctacgtcttttactactccggtttcaacgagatatctgcatagagggaaatagataactttgttctaagtcaaacctgtaaattttaacaccaagcttatggaaatataaaaagttttttttgcgagatcacggggaggggggatccccacctgaatatattcccaaaaggaagcacgaggggcaatacaccttgccgtagcaagaacataagaaaacaaaaaaaccagcacatgattacaacacaacgccaatgaatccacaaaagatgctaagctatgaagcctatgttgtgctataatcaacgaacagagtatcacgagcaataggaggaggactgtcacagacagcaccagagagcgaggtgggcataaccagagcacgaaaactaagccagggaaaccgaagcatcatcatcaagaagtcgcaccgatgccatcgatccttggggaaatagacgacgtaggctcgtcgagcacgcatagatgtgtcacgcaaatcctccactggagggtggctttttcgagtgaagtagaagacgacaggatggtagcatgttctcaaagtgtgtgacgagtgaaagatatctcccaatgggggtggtttacacagtggaggagtgtagaagaaggacccatacgacgactataggatgacaacaaaggcagccaagcagaagtttatcggagatccggaggagctaaccggaaggtggatggatcttagatcgaccgttagcagcacacacacaccccctctgtcatggctatctccggtaggaggatgccgcctccatggctgccaactgcaaaccatcgatcctggagcatagcatcacagggtgtatatagactttcgagtccaagccacgacaccaaccgttaggcggtgacgccatcacagctgtcatctgcagatagtgattaccaaaggtcatttccaaagtttttgaaaaccccccacccaaaaagggggggcccggcaaaaaaagggggcccccggtttttttttaaatcaacattatccacggaaaaggcattttttttttgaggccatggggggcggttgaacgaggatggacggatgcaggtggaagagggcgggtggcagtggagctcctcccttgactgtccgaggatcagaccaccggagctggtcatggggttaggagcagctgggcgggggccggaggagcttgcgatgtggccggcgcaaacctgagggggggggggggggagggtgggacgacggatgccatggaggagggagacggacctgaaggcgggcgaccagcatcgtctcaaggtgacggaggcggttggcagcgggccggatttgggccgagaagcccgcggatgtgtgggtcaaatcttgggggccggggaagatgagcgatagcaaaaacatgagatgtggtcaccggagtccatggaggaggaggcgacgtctgttgccagaagcccgcaccataccaaggccccgcgggtctgggccttgaagcccgcagcggacacggggacgtgacagcgccgccgcggaggcggcatgcccactgcaagggcgcacggcagggcttcggatggcgcaggcttcaatctccagtagtggcgaacatggcggtcgtcagagaccggagcacggcgggatgggtgtcgaggaggcttcctcccacggatctggtccgacagtcaccggatccgaggaagaggccagcggatctggccgttccacacatcgacgacgaggagcagaaaacgagcttcgctggcagtgtaggagacgcacgactggcgaactcctcgccgccaccgtcgtcggcaagccccgggtttgccggcgcctgcctcaggcagcggtgaggaaggacaagggtagggagggtggcagcggcgggagctagggtttcacctcgcaattcgccctaaatataaaaagtttgatttagaaacatggacggaaacaaacaggcgctctggatccggcccctcgtcctcaccgcccgctcccagatccgcgacgagggatcgacagccctttgtgggctagtctaatccgattaaggcccaggcccttaacggccgcaattgctagtatgcccccgtatgtgttcttcgccgcagccgtctagggttcctctcccctgcttcccttgcagagcggccatcccttttgttctctcaccatattggaagaatccgattccccatcacaatcagatgcaatatataaaggtatagagaggaagcccgtagccgtgataaacgcacggaatcggcggcccggatctctctacggcatggcgagcagcagcaacggggagcggaagcgggccagaccggacgggcggcggcggcctagcgccgccacggacgagtacatcatgatcggccccaacgagcccttcgcaatcccaccaggcatgagtagggaggaggctattcgcttctttcaggaagcagagcaggccgctaagaaggtcatcgccctctacggcgacggccgtccggcggacggcataccgcgtgccagtcatctgcctaatagctgtcaccgcgatggttcgatatacactgtcaatttcggttggcatgtggattactgtatttccgaccgtaccgagagtaagtttacttcccactctgaaattcgtgtatatttcatttcaaatatgaaaaagttgtactaggcttatttcaaaaccgcgatacttactttggatcagagggagtattaattttatctcatccaatagtataactttaatatttaataccaattctattgcatagtatgatcacaattataactgtaattgtttcaatactatttttttttcttttatagcccagttggagcca

SEQ ID NO: 2168 - DNA, 1154 bp, Brachypodium distachyon
  Intron number 1 from transcript Bradi1g54360.1 (locus Brad i1g54360) derived from phytozome v7.0 (chr-ID Bd1; pos 527 48921 to 52750074 reverse strand)
agcggctcaacaagccggccgttaagagcatcgaggtgcttgcagtttttgaaatttattttgattgtcggctgttcgttttctttgtcatttggaaacgattgttttattcgtagttgctgtctaattttttggagattgattggagcaaatgatgaattgtttgctgtagaatagaatgtactgttctgggtgatgttcttgggattattggcttcgttgctctggtgtagtgttttagctgcatctggtaggatttgagcaagctttagcaagatgttctattctgcaaattcagaaaagcttgcttttcgctgcttcttttgggggctgttcctggtgatattctctactgatagttgctttagggatttttttttcaaaaaaaagtttcttttggatctagggttggcaaattcaagcaaagtggagcaggaaagataggctttgcatccatccaggctggttctcgcaaagtaggcttctccaattgagaaggggcaaaatctttcagttttttttgtgaacactctgctcccattttaaatttgaacagattttcagcgtcaaagaattacttaagttctacaatgtcttacgggacattccatctttctgcatcttccacttttttttttggtaattgcaaagttgaagattttgtgaacatcaatttccaagaataatattttctccacttctaactgagataatgcagtaacctttttgttgtcatgctcattaggcatgtacaatggttgataagactgtcttgtcttaggcatttcatgtcaattagaaaagacaacaaaacatgttgtacaatgaattatctcttagtgttctatcttagaattaatgtttagatgaataaaattaactaaataaatgctaagaaaagatgaaatctagtacaatggtaaatttgacttatttttaccttatcattcttgtgaagagatcatctcttaattaagagaaggcttgtgtcttttcttcatttctctcttttccatattagattttatcttatgtggcatcgctaagagaaggctagatatgtcaccccattatacatgctcttattggttatgctcttattggttatgtaccctgcagagcccagactgggacatcatcgactgcgtgcacat

SEQ ID NO: 2169 - DNA, 1804 bp, Brachypodium distachyon
  Intron number 5 from transcript Bradi5g13360.1 (locus Brad i5g13360) derived from phytozome v7.0 (chr-ID Bd5; pos 169 53324 to 16955127)
gctggacgattccaaggtcctaacttggttgtgctgtaaggtagcttgtgtcagttcttactttatcaagttttgcattatcctcctttgttgatctttatccttgttagaaaacgctacttctgcattgtgttttacaaacagttagggtgagaagtatgctaaactgcataaagagaacatgcagatttctctgataattctgatcacttaaatatctttgctgtttgccttgaacaaggagttaacaatgacatcccaagttcaaactacttcttcattatctaaaataatagtaaataattctcccacaccatttttgtagtttgatttgataagatatattatacaatagggcattagtctgtaagttcactatggttctgaacatgacaaatacggagtaaatcacaaatcatacagaccctactaaatgtccagtgtggaaaatttcttccgagcctgttttcctgcaatttttcttataggaaaacatgaaaacatctcgagttctgaaccagtcataagttcatataaatttgctcccgctgtcattgctgagaagttgactatgtaatgatcactacagtgactactgactatagtaaacagcagtcctacggcaggatcatatgtgtaggactgcatccttgccagttgtggtatatgagtaataaggtcgcttattatactgacgaaacatttctcttcaccaaaatatatgaagatgaaccattccttcaatagtcaatataatgcatcttgtcatgttctctagttgtatggaggtggcgctgaccaaaacaatacaagacaagaaaaacaaactatctactaacaacaaacctacaggctacatgcctaatttttagagatccaccagatgtcgctagttcactttattcttgaacctaccggcctaacaaaatagagttccacctgatgctgcttgttcacttaattcatgaatgagaacataaaggatcaatagtttatcatggtaagtgcctttccgttttgattgctcacaagttggttgtgtaatttctattatggtttgtgtttaagctcattttagcacacttgctttctgcataaaccacattcatgggtcaatcgaattccagattgtacttatttcacttctcctgtactatcgagaactaaatatctactctgttcaatctcatctgcaggtacacaacataaaagaggttatccccaagtttggtaaaaattatgctgcccaaggcgaaagagaattatgtatgcactgtgtctgtaacttctctttattttattgcccagtatactttgcaagtgcgttcatctcctaatcaaacagttgaacattgcttgataacttcaacaggtgatatacccatattatttgaacatggatcattggtgtgatctgtatgcaacaaacatgcttcaaaatttaaaactgatccttgcacttctttccacagaaaattggacctgtaaacttataagagctctatagtaggacttgaactaggcctggtgggaagggtatagcaaaagggtagatcaagttatataacttaactggtaccactggtaaataaataaataaataaataaataaatagctggtactgttaactgcttctgcagcagcttagattagcctggctttgtgctgatctactactttgatatgttccaaaatgaaatgaaattcttgactctcttcagattttagaacctagcttaagcatttcttgataaggttaatgcccttatggagctgtatcttttttttccactacagtgaagg

SEQ ID NO: 2170 - DNA, 6863 bp, Brachypodium distachyon
  Intron number 1 from transcript Bradi4g29820.1 (locus Brad i4g29820) derived from phytozome v7.0 (chr-ID Bd4; pos 354 67944 to 35474806 reverse strand)
cggctgccggcggcatcagcaggagttaagactacgtgagcaccttgcctctcctttgatgcgtgtcgcctagatattttatccattgattgcaattttgatccagatgtttttcgacctagtggcgagtgtcgggaagtttgatttgtgccatgcctagaactcgcgctacttgttcagcttcataacatttgcgttcttgtttggggactttgatgcggaacgtgagtcactaaattctcttgcgttctattcaagccggtatgcgtatgatattcatttttcctctaggattcgggtctagattttcaaagtttgagtacatttttgcgagagcaaaatttgagttggctaatttaagtactccctccgtgtggaacggagggagtaatggattttgcgcgttggctaatttagccatggttctatcacccactaaacatggaagctcatcttacaggagaagcaactgtagttaaatttaaatggaatgttaggtatatcagctttatatccatggttataattctgtcttcaatgttcaacatctataggagcaccgatacacaaatcaaattgtatgggaaaattatcatcttttatgatggttctgtgtagattattattgcatccttgagtgcatagcatggacaatcactggtctagtttataacacgtgtaacagttctaggaatcaaatgagctcacaaaccaaatcggatgcagccagatgatcctagatcactgcaatctgtcacattgtgcttgtcattcacttctactagatgttggggcgcgcctcctgggagtaaatcaggctatctgggtagagtttgggcgccttcatggatgttcttgcgaagctcgattcttggagggacaaattgattttcgtaattgctggaaaacttgtgactgtcgtggccgattttattgtttgaagagcccaaccttgtgtttattttgctctggtggggacagcggtgtaagtaccacacaaagctggatcaagcacactcgtagcttctatacagcacattaacaaacacaaataccaagccggctggatgttatagttgtattcacattactcaactgttaaaaaaacttagactgctaacgatgggaaagaacaaaaaactcttttctaacgtactcggacaaataaaatcccagaaaaatcgcagaaaacaggcttggtgtctgcagtgacttgtgtgttcttcatggaaaaatctttacagtactgaaattattcacatatgaagtattgaagtcaaagctcggagtgctgcctcataccgtagtaccaaaaacagggaaggtggaaaattagtcatctatacccatacaggaaaaggatgttaggatctcaactggactcaaaataggtattcctagatggtgtcagaaatatagacattgcaaggttaataaaataaccaaagttggaataatagcgttcaataaaatgctcggttgtggtagacaaaagctcaacgcttaccagatggtcagcatttgcttttttattcttttttttggcttaatccgaatgctgaatctgaattagaggttgcctttttattctctgctctcaatccgaatgcaaataggaggggtgtaattagaaattcagcattcaaccataaatttgtactccctccgtcccaaaataagtaatgtggatttgtataaaaacctatacaaatcaacgtcacttatttcgggacggagggagtactacttatgggtaaacaacaattaagaaagcgagatgacaaatacaccaaccacaagtccacaactcaatctctccatatgttattgtatcttcatcaatacaaaaaaagacaatgtattgccaacatgagagggtatatgcttcctctcagcattctctaatgctgctatacaatggccatcattgcactacatacaaattcctaatgaaatgatcttcaagaaagaatataactcgacaactttctaatctatcatgttgatgtacagaaaaaagaacactgcataaatgcacatggcaaaaaatattcttgcaattcaaatattttaactatctattcagtaaacaccatgtaatggtggacaattattaagcgtgcttttatcccaaccagtagctacaaatgaaagtatataactcatttgtataatcctaataacactttgatcccaaccactggctacaaatttcatttccatttgatgtcgcaaatatgcccttacttatatttatatctctgtaatggggtatatgaaaagaacatcaaacaatttctaccaagaagcaatgcattaaacacttggcttgcgcacgcacacccctagagagatggtactcaccaatgacaggctcagaaatagttttgccatgattgcagccttttggagaatccacactgaataaaggaccatgataagacccatcgtcgcacctccaccttcccactatgcacggcaccgtcggctcaactgtcccgtaccctcctccattgacctccttgatctgtacctaatgtgtgcagaccaggataagagcatccattcctttgatcaaagaaaaataattcgatatcccacaacatcaatccctggagacaagatacatacatcttgttgaaacaaaacgtgaaacaaaggaatggcatataaaaaataaatcagacatgcaaacaaatccgagaagtatttacgaaccgaccatgaatacagtctcaatactaaaacaagcaccagctcaactatgtctcccatatgaagctaccacattttgtgaaggtctgcaaatggaaacatggatcgacatggagataatgagaccaagagtatcattttgttggtacctcaaaagccagtttagtccagatacaaaatggcttggccaatgctgaatctaggacctacagactggttcttccacaagattccacttcaaaaacatagatggaaaggcacctaactcctaattaaggatggcttaagttggagcaatcccacccatggtggtggcaatctgcattatcaagttgtctttgtgttctttacaatgctctctccttccatttactcatgaaaaaaacacgggtactaacactgacttcatagaaacatttgcaggatatattatctcacactacccgtgcattggcctgcttttgtttgcgcatatactgacttccattttgaaactgcaaacttctgctttgaaaggtctgaatatttgggacaccagaattcaagtttgaggcacagaaatagatctagaaaagatctatcatgaattagtagaataaagaaaagaaagatccattacagcggaaaaaaatccaaatgcacttcatactaaataggcttcagacagaaccttgtaatccttagtaccaacttactttgtaggaaccatacaaaatctgacctaagtttgccaagaaaaaaagaagctaaaagagtgtaccagcaacctgtacacaagaagtaaagttcccaagcacgaaactcagccaggagcactcctctgtcaacttgttcaggtacatcagtggttttccccaacttagctgcatgtattcatgaatgaccattaaatggaatctgaacaacagctaactaatggaagagatgaaattggcttctttaatttgatgggtaacatagagattgttgcatcaggatactgttggttgtacctgggccaggtcaccatccccacacagctgagatcgttctctctcttccagacccctaagatgtcttctcccatgtccgggtgtaatcagtaacaacaattttgaagtaccaaaaacatatcaaataatggtattagctcaaacaatggtacatacttgtcatgcatctcaatgattttccagacaaaaacctaaaggcaaaaaaacacattagatgacaggtttagtaacagaagtttagtcaaatcgaggtagacacctgtttcaagagacacctgttctgttcctgcattccgaccatgtccttcttctctgcttgtacaattgattaatttttgtatatgtattcacagacaaataaatcaaacaacacgaaatcaaaccaatcaatgggggcacaacatggatcattaattggatagattcacagcaaaactttgataaaatgtcaatgtgcagaaacataaaaatgcatagacaaaatacctcttcatgctccagaattttaagctgctcttgtaactcatccgtgatgtccttgtccttgacctgaataaaacaaagaacaaattattagatgtcatgcccagagataaaagctggacggcaaatgaaagcactcccaagcgacctacagtgaataaagaactggttattgcgcatggagatggttgaagtacagtaagcaaatttcttcaccacacatgaatagaattcactaaacaaaatagaaaaattgagaataaggcacaccttcttctctgcttgtacaaatgattaatttgagtatatgtatacacagacaaataaatcaaacaacacgaatcgaaccaatcaatgggggcacaacatggatcattaattggatcgattcacagcaaaactttaatgaaatgtccatgtgcagaaacataaaaaatgcatagacgaaatacctctccattctccagacttttaagctgctcttgtaactcatccgtgatgtccttgacctgaataaaacaaagaacaaattattatatgctatgcccaagagataaaagcaggacgacaaatgaaagcgctcccaagagacctacagtgaataaagaactggttattgcgcatggagacggttgaaatacagtaagcaaatttcttcaccacacatgaatagaattcattaaacaaaatagacaaattgagaataatgcacacaacatagcagtagatgcagcaggcaagtttcctatagagatagacactgaactcaactctgtgtctctctgaagatgatttatttagaggaatctcttaagatgattaaatgaactgagctcaactctatacctctgtgaggagtttgaagtaaaccgagctcaactctatacctttctcaagacgaggtctttatttcttttctcgagtccaatccattcattctttgcggccgccttcattcaattgtcaaaaacgtcgaccaatttctcctacaatttttacaggtttaatcagttgctaaaaaaattgaatgcagaaagcaagtattaagcaaaatcaaagtgtacatgggtagagaagaaggagctcgatgggcgtagacattggacagtgcaggtgcaggacggtgtgcgaccggcgactccctccacgaaccatcgcctggccatccatccatccacggctgaaaaccgacagggtgtgagaggtggtcggaggttcaccaggctgagtggcggctgctccttgggcaggcgtcagcaattatcaaccgagttgtcaaatccacccccacggcctcggcattggtggttgctggtcaagcgagcgggcggatctcgtcggggaggaagaggaaggtgagttgcaggggcggcacggtcggtggcgggagcgacgacgggcgccatggagacgacctggcggcggcgcggcgcgggggaggcataggcgtgagcttcgtgggacgggcgcccgagcccccaccccacggtcaagaaaattacaagtttgccaccacgcacttcctccggcaaaatctcactctaaacgtgacacgcaaagtctatgacgtgtgggacccaaaatccgagctggccagaatcatcaagaggtctagaaggagcttgaagtctcaaacaaaacagaagcagaatggtgacgtggcctagcccagcgatctcccaggttgcattgcgttaatgggttagatgtgaaaaatacctcacccagtagtattttaatagtcatgctaattttgcactacatctacgcatttattgtgacaaccgattttaacatgattttgttgtggaagtattgtataaaaatagaatatggaaacgaaacgccccaattacaccacaataaattgtatacaattttatccaaatatgagttatacacgagacactaccctatatagacccatgatcgatctatgagataaaaaaactacaaaaacaagcacacagagacatctacatctccatggcatctcctctcaaccctgagctcatcagcatcaccaatccatagacacctttcacccagagttcatcaacatcaccaatccatatacacttttcactcagaattcatcgccatcaccaatactttaagggaaaaatatttccctgcaatttcaagtagcaagacatggaagatggtctggacgatgcagcggtggctcagctgcagtttctcatctctcgttgccgctccaggcctactcttctctaccagcccaacctccacttcttcacagactatctcctcaggttcctgacctctctcgatcgaatatttgcttatcctgttaccaccagagtcagaggaagagtcaaggaaaccctgtactcgcgattttgacaaagtagtagacccccaccctcttcccttgtgttctctatttaaatgtacttttctttgtttctttgtgtttgacatccttcttgcccctgtttgcagccttggagcgagggttccggtggtaatctttctcggtatctttattgcgtactgcttacatcctagtctcgatttggatgtagtctctgtggggttatcttgtttgtgtcttgatgttaggtggaattatgcaagttgttgaacaagaactgcacaaatttgttgaattttgatgaaatccagtttttgcagaaagcggaagaaggc

SEQ ID NO: 2171 - DNA, 2476 bp, Brachypodium distachyon
  Intron number 1 from transcript Bradi2g11980.1 (locus Brad i2g11980) derived from phytozome v7.0 (chr-ID Bd2; pos 103 09277 to 10311752 reverse strand)
gcagcaggtgttcttctggggcggtgagatcggaggtgatggacgtgcttgagtttagttcttcgatagtatttgttttagctttcatttttctcttcatagctctgatttgttggcgtcattagcgtgtgcaactgtcaaaatgaaatgaatcttagaatagtcttcgtgaactttatggattgagatttggttacgctgatacattccttgcttggaaaatgattagacgacttgaactctccgagttttgatttccaaaccatggtctttacgaaccagaggtagattctacttgcttggtgggtgcatgggggtattctatttctatgttgtattggttttagttctttgctggattaaatattacagcagattacttgattcaaaaagactttaattaacatgcatttggttagttgtacatttagtggtttggttgattattgggattgattaatgaacagcctgattggcttgtgttttttttttgtttggcctttgttttgcataatatgctaatgcagtcatatcctataagtgtaaagcaggatataagctatttgatggattgtaagaacggcgaatagggtaaaattagaggcagccagtagatcgttccttacagtgtttggcattatagttaatacttaatacctgggatcttaaccattagaactgtatgttaggggcgagttgtttttgtgacacatggttcttgtactcttaagcttgataatattctaagataaggtacaaatctatcaactatcgtgagaaggtactcatttttctaaaaacacttgttccttctatgctcttagcatcttcttttataggcatgatttttaaggtagcaagtaatttacttatgggactaacaaaccttaagatataactgcaataatttgccttacgtttgtctatagcagatatcttttagagttatgttttccataacacaagtgaaattaagctgaggtcgacactcctgtacttcaaatggagtgatcatattctcccctttcattttggtgtctgttgcgcattctaaaatatttttggcataatgctcggtagctggtattcatttattcactcatgtagtagtgattatacagcataacatacacgatcatggggactaaccgatgattcaatgtaataggcagggctcctgttccttaatgcagtgtcatagttgtttccagaaaaattacttgatgatttggtttagttgttgtactggattattttgtgctaaattaattgggttaacgtcagcattggtagcgcagtttgtaactcggaagtttcaatgccatagttggatcaagccagttttacaatgtatttagttgagattatcgctgaaaattcttggcatggtgtgctttctggaagcatgtttgcactttgtgggttattaacttctgctgacttctataattttaaattagaaagctggtcgttccaaactttgcagtagactttcaattactgagaatgctactccctctgatccatattacttgccgcagctttatttagatacgcatgtatctacacaatgaaacgtgtctggatactgcgtatctagaaaaaattgcgacaagtaatatggatcggaggtagtagttgttttgctatttctttgacatgctggatttagaatgtaaatttagtctagtataaggccttttcaagatcactgaaacagtgtgactgagtatctatagagaaatataaggcttcaccttacagttctcttgttgggtcaattattgttaatggaactagcaaattggaccttggtcattattggctgtcaatccacttgcatgtgaatttcgttgggacatgtaaaaccgttttgaagaaatgatgtagttgcacttaatatcatttcaccatgtaaataaaagctgagctacctgtaagcccaattcggaatacaggaattttgtcactcttgcatgaattgaatttttgtctgcgagactcctgcatttcaaacgtgtcctgaatatttttgaccctgctagcgtgatatgtaataccatagctaagccgcagcatttggcattgatatgtttatattaggatttgaccttctgttgaccatgcagaaggttttggaatttttcagtcgtcctctgggcaaatagtagatgaactgactggaaatcattagtcgctgttatataactatcttgaattttcaccatgtcttggaagatcagtctatttgtgcgcgccgtagataaactgactggaaatcatattaagggctaaaatgggtaatgtcatgatgaaatgcgatgttgatcctggattcatggtgcttgtcttagtgtcgcttgcaaccacctgtgttggaaatgctatattgcattcataccatgctatatttggccatttctgttcttctaaatgctgtacccttttgtattacattgcagattgcatcgctgat

SEQ ID NO: 2172 - DNA, 1462 bp, Brachypodium distachyon
  Intron number 5 from transcript Bradi3g48720.1 (locus Brad i3g48720) derived from phytozome v7.0 (chr-ID Bd3; pos 500 94408 to 50095869 reverse strand)
gagtcgatacttttaattatacggtggtagttacggtacgtgatgcttattctggatccattcccttcttatttctttatggtatttagtcctgtgttatgttaagtagtacttcctccgtcccataatatgaggcacacacgcatccttagattgtcaatttagctaacttaatataaattaaataattatatcattagaaagttttttcgataacgaatctaatggtgtactttttgttaaaaaacatgcatatttaattagtcaaattgaagatctaggtatgcgtgcgtgcctcatattatgggacggagggagtataatctagagtcctctgtacagaaaatgtgtctttcagtagtcacctccattgtgcatgttcatttcctctcaattgttgtaagcaaactgatcatacgggaaaagattaatcatgcatctacacaggtttactatatgtcacgagtacaacgtaatctattgttatacagcagaaaaaagagagacaagaatgtccgtttgtcatatagcttaacatctctgtgttttttctgtacagtgcatacatgattattatttttcgtgaattttgagattcttctgaagtaaacaagtatacaaactcatgaatgggtgcatatggacctatgttcatatcagacttttccactatgctactacctccattcctaaatataagatgttctagctttgtcctaagtcaaacttttgaaagtttgaccaagtttacaggaaaatttactactatctacaatatctaagaagtatactattacgacatatatcatcatggatttagtaaaactaatttagagtgtagatgttggtagattgtttttataaacttgttcgaactttaggaagtttgacttaggacaaagctagaacatcttatatttgggaacggaaggagtagtaaagaagcatatatgtcaaatatgcctgattgagaatagttaatgcaggttctaccataaaaggcaacatactgtttcatagatgcatcttgtacatatatggagttttctaaatactttctgagttttctgtcagttatcactaaaattgtatgatatgaacgtgatgcatagttcggtttgtaacagttctcttaattgatgctccctccgcaaaaaaataaaatatggtggattttgtttcgttaggacaagcctttgaccaacaaatacttcattaaatttaatttatggggcataaaattgatgtcgttagatttgtattcaaaagtacttgattatgattttgtaccacacaaatcacacactaatgatgtaaatgttggtcaaaggccttccttaacgatttggaagagtatttgtttgacctaaactagttttacctgagcaaactgcacactaatgtttcctttttcacttgtttttcagttcttcattgtattgtcgtgcataattgctgttgg

SEQ ID NO: 2173 - DNA, 147 bp, Brachypodium distachyon
  Intron number 3 from transcript Bradi3g11400.1 (locus Brad i3g11400) derived from phytozome v7.0 (chr-ID Bd3; pos 984 8800 to 9848946 reverse strand)
gctacctgtttaaaatatcctttttatatggttaaatctacacagacaatttgcataattattaaactattcttttgaagagtaactatatgtttccttaatgatatgccacttgcagagacatcacagattacgtagagttgctat

SEQ ID NO: 2174 - DNA, 6155 bp, Brachypodium distachyon
  Intron number 8 from transcript Bradi1g66760.4 (locus Brad i1g66760) derived from phytozome v7.0 (chr-ID Bd1; pos 655 49087 to 65555241 reverse strand)
cttgcatcaggtaattatcataccgatcatcttacagttcttttcttcatttggtgacagcagaggactttactttctgctatgacatgatatgtgtaggaccttttaactgtagtgctcaattgtactttatagagtaacttgacacattgttagtgaacttcttgcaagcatgctagtaaatcaagaatgtttgatgagtgtttcatatgcaccgcaacatggaacaggggcttgacccttcattctaaaaaaaaacccgcgtttgatgctagtgtattttgcacaatgtgtgcatgatgatattgaagtaacacatggaagtttttaatcttgtttcttgtatgcatatcctatgcaaatattttactttgaatgttccacacttcgactttgtcagacgctcgtccttttgtacacagtttggcactaagctgaatttctgatgatgtgcatgctgccacaaataaagtagtgattatcataacatggatgtgattcttactaattactcagaataggaaaccccttagcattttttaagcaatttcaatttgaaaggccaattgccacattaatgacgattatagtgtaatgcgtttgttatgtttcctcccatatagagctttgattaaacctgggcataccctgggccaggacaggtattggccgggcttcacaaagtgtgacagcaaaaccccaagcccgggcccgaccttttgggataaacaatgagttcttatacctatttttcgaaaagacaacatttttattcataccgagcttttttcgggcttcaggcaggaaactggagcccgagcccagctcaggacgccatgctttgggccgtgccacccatgcctaggtctagctttgatatagcaggatgttcggaacaactaactaaagctcctctgagaagactcgcccatcagataaacatccaacacctgaagcgcacagatttccaatcacatctaaggctagaacatgcaaactattttaaaagtttaggtgattggtaatcgaaagaacggtatagtttcctggataaaacttttgagctgattgggccaaactacaaaactaattgcttatatgcagaaacttgcatgcacaatgacaaaatttgtgaatttaaaagatgtgttctaatcaataactaaggcacgacacgttgggattgagaataaaatcattgttccgcatgaccacacgcacacatgcacaaaagaatttaatgataataattgaaaaaatttctagctttattcttggccaggatgtcatttcctatactaatacccacatctggtatattctattctaaattaattatcaaaataaatgaaccatcttatggggatgtaaagcttcagtgtccacgcacaaggaattttaaatgtcaacaaaacggatcaagactttaaatgatacatacagattttgaaataacaacgaggtatatcataactttgcaaggaggtaaggaaatattcctacaatacatgcacaaagggtcaacaaaagcaaacgcactaatgcagacgatatcatcaggaactgtccaatacatatatcacaccatggcgcctgcatagtgcgaactgcattttctccaattcagaacccttcggttttctataatcccttcaatcttcttgcaagatacattcatgcagagggcgtacatagtcttgaaccattttattagattccaattcgggaaaacactcagcgtggtaaaagcgcttactactacccttccattgaaagacggttaggaccaataagaaatgaaaaaacaaattgaaaactgaaagacatctttcatgatcaccaactacgtaggcgaagacttattcaattacattgtaaatgaaatcaaatatcatctacagtacacattcccaacaacaaaacatcactgtttttctgtctcattattctcagttacataataatattaagaaataagtaaatcgagtaacacttctactagaaacagcatctcagggaatgccgaatgcaaccacaagtttatcttagacacctcttgttggcttgatgatttgtataaagacatgtccgagggtcccacgtgtccacaaacgcattggtgctgcttgtactcgtaattcttgcgtagaaactttggtaatttctatacaactcaaacattacgaaatgttggatgcagatacataacatataaagtcaatcataaaactgaactaggaaggagtagcaccagttgctctttcctcagcttaagagttatgcatttggaatgtgtagcggtatctttggttgggtagaactacctctgacaaacaccatcgcaactgcagtatatcatgttattattgtacccatgatgtcctgttgttgagatggtgtctgttgaaggttgttccacccaacagaagatgtgacacatattctaaatgcataactcttgagccaagtgaaaagcaaatcgtgctccttacgtggtttcgttttattcttgctttcgtatgtgtgttattcacatcaaactttgaatatgtatataactagcctagtctctatgtaacaattgtgagtacaagtagcatcaatgctttgttcgtgaatacctggaccctcagacgtgtcaatgtacaaaccatcaacgtagcaaaaggtgtctatgagaaacttgtggttgtacttagtatttgctctgattcattatcttctctttgtgatggaactgtcacttgatttagtcatttcttaatcatattatgtaattgagaataatgagaagagaaaaggcagtaaaattttggtattgggaaagtgtaatgtaggagccaaggccttgactgacaaatggtagtttatttcatatacgatctaaattattaaataactttgcatatgcagctggtaataaaaaaaggagacatacgttcatgcagagggcataaaaagtcttcaaccatttaattgcaagacaataaattcatgcagagggcatacaccatcttgaaccattttattaaattccaatttaggaagacagtcactgtggtagaagtgcttaccctcatattaaaagatgagaaatacctaaaactggaagaagaaaaattgagaacggaaagacatctttcaacataaccaactacatatgcgaaagttatttaatattttaggtcataaatgaaatgaagtaccatttgttcttatctgcacccttgactcctatagtacacattcccaacaacaaaacatcactgtttttctctcattattctcagttacataataacatcaagaaataagtaaatcgagtaacacttccactagaaacagaggacaatgcatctcagggaatgccgaatgtaaccacaagtttattacaggcacctcttgttggcttgatgatttgtataaagacatgtctgaggatcccacatgtccacaaacaaagcattggtgctgcttgtactcgtaattcttgcgtagaaactccggtactttctatacaactccaacgttacgaaatgttagatgcagatacaaaacatataaaatcaataataataccgaactaggaaggattagcaccagttgctcttccctcagctcaagagttatgcatttggaatatgtagtggtatctttggttgggtagaaccaccactgacaaacagcatcgcaactgaagtatatcatgttaaaattgtatccatgatgttttgttgttgtgatggtgtgtgttgaaggttgttccactcaacagaagatctgatacatattctaagtgcataactcttaagctaagtgaagagcaacccgtgctccttacctggtttcgttttattcttgctttcgtatgtgcggtattcacatcaaacttcgaatatgtttgaattgtatagaactagcctagtctctatgtaaaaattgtgagtagaagtagcatcaatgctttgttcgtgaatacttagaccctcagacttgttaatgtagaaaccatcagcctaagaaaaggtgtctatgggaaacttgtggttgtacttagtatttcctcatattcattatcttctctttgtgatggaactattatttgattttattaattctcttatctaattgagaataatgagtagataagaagcagtaaaattttggtattggagatgtgtaatgtaggagtaaagggcttgactgacaaacgatctagaatattaaatatccttccggatatgtagttggtaattaggaaaggagatatacattcatgcagagggcatacaaagtcttcaaccatttaattgcaaagaaccatcaagctaacaaacagtgtgtataaaaaacttgtagctgtactaagcatttcctgagatgcattatttatttgggatggaactgttacttgatttagtcatttcttaattcccttatgaattgagaataatgagagaacaagccgtaaattttttgttttggaaatgtgtactctaggagtcaagggcttgactgacagatgatatttgattttatctactgtctgaaatattatataactttacacatatgtagtttgtaatcaggaaatttgtcttttaattttcaaaattctttacatttctaatttgtccttcccgtctttcaatgtacgtaagggtggttgtaagcgcttttaacacgccgagtgtcttctcgaatgggaccttaataaaatggttgaagactttgtacggcctcgcattaatgtatgtcttgttagaaaaatgaacaaaggaaaatatcaagggaacatgcaaaaccaaaagggagtgaaatggagaaaatgtactggatgtatgcaggtgttattgatttatgtattggacggttcctggtgatattttccgcattactgtctccctttggtgaccctttgttcatgtattgtaggaatatttcctctatctccatgcaatggtatgctatgcctcgttgttatttcaaaatatgatgtattacttaaagtctagatctttttgttgacgtttatttgttgtgcatggaccctttactcattttctcttttgctttagaatacaagatgtgggtatgagattaggacataacacccaggccaagaattgtaagtaacaaagtctaactgtaaacaacaaatgcataagtttcctttttggcattgctgatcagaaatctgatttctaggatgcaactagttttttttttcagtgtttaatgtttatcttttaattctttgcgcatgtgtgcgtgtgtcatatggaatattgcttttgttttcaatcccaacgttgtgggtgccttagttattgagtataagatgtcttttaaattctcaaatttaagaagtaattattcttatagttttgcccaatccctcctggaaactagaagtgtatgtactcgtctgttaatgaatttcctgggaaaataaaaagattaatagtcgagtatatacactttccccaaaatggaataggaaaaccccttaatgttcaggcgagctggcatgctgcacaacataagccatgatttctttggtgattttcagccaaggcgcatgccaactccctgggtatacaaaattttggttgataacaagagctttgctgagtgttcatgcaatgcaaggtaaattaattatgcaatcaggttactcgcaaagatatatacacaatggtaaatggccatctagaaccgtgatggcaactcttagtatggatgaaatatgacatgaacaaaatgctctattctgaataaatgagttatccattaagagttatgagatggacgaggaaaccactaattatatattttgccactatatttttatccaatctatctatctacttcaccatatgcgatcctttttttgactgaaaagggattacacaagggggggacactccgcgtcagagtaatcagaaacaacgtgtgaggtgaaactaaggagtaataccaataggtgtgaacttcgtacgaaccatcgtgaccactttattgcggtccgcagattcttgcaagtatgagcatagcttgtcttaaaggaaggttgatgcaaactgctaggtttagtgttgtatcatgagggaggccacgagatttactcgatctccatcttgttttgcagtttc

SEQ ID NO: 2175 - DNA, 820 bp, Brachypodium distachyon
  Intron number 4 from transcript Bradi1g63240.2 (locus Brad i1g63240) derived from phytozome v7.0 (chr-ID Bd1; pos 624 33697 to 62434516)
aggtatgtgttgattcaattgtatcattgcagtttcagaatataacagcaattgtcgaatgaataaactcatatggtgcttttcccccttttatatatatgatgcacatatatagacttgtcatgttatcactaaacaacaaaatggcaattcagctattctgtccttttccaccttctatataatactccctccgtctcatattaagtgactcaaatttgcccaaatatggatgtatctatgcctaaaaagcatctagatacatgtaatagaaagtctcttaatatgagacgaagggagtactagttaaacaccagtatgttgctatggatcaacacatcagattaccctaacactcctaaccactcttgtgctccattcatgcctttggtttcatctcaacacttttttgacctttgtctcactaattttggagttgtttctgaggagcaacacttggtagattttagtcctggattaagagtcagtggaagaataaaaaatctattggcatatccatgcatcacacatgttctgtaaaagaaaataaaactaaatgtaaagtgggaggggtggagatggatggaccctgccattaataaaaaaattatacgagtaaagattatgttgcacataaacatatattagaatatggaaatagtaccatccatatcttatcaagtcatggagttgcttgatgaacctcttgggaaaaccagtaatcactctatgctggttacgttgttaacttatttgatttgtttatttattttgtcttgaatcagctgtacttcaacgcaaccgatccattgagtgagct

SEQ ID NO: 2176 - DNA, 949 bp, Brachypodium distachyon
  Intron number 8 from transcript Bradi2g32530.1 (locus Brad i2g32530) derived from phytozome v7.0 (chr-ID Bd2; pos 324 62959 to 32463907)
aggagggtgatcttgcgacctcacctgcagataaggttcgtgcagtgaggtgcagcacgtgttgcacaattgttaatggctgggttaccatctataagtttctttttacatgactagcccagtttctaaacaccggcaaatttagaaatcagaatttattgctttttactggtagtagctaggattagttttttgctgagttgtgcctatcttgctcaagttttcttcttatccttgcacataaacatgttatctaaagttcccttccaatgttgaaaaagtatgttactacaactcggcacctggttttctagtgcaaagtggtagtagagaaaccactgcatatgggagagtgcaagcaatagggaggttgaatggcatacttgagctgttagacaacatacagaacggaaaagggctgaagcattgggaaggacgaccatttacatctagaaaacttcgcaaatccctttcattttctgtgaacactagaaaaccagggaactagataaagtgaaggaatatgtgaagtgttttctgtatatacgatcagctatttagcctagaatgcggtactgaactgagtgaacttttaattggttggtgtatttactgattctggagaaagtggatcactcaaaactgatgggattcagttgtcaatagcatgcaaaatgttttggccctcttctgcttagctgctgagaatgacactggctaacaagttgtttaatcctattccatttttagagctcttggttgcagtagttaaaaaccaataattttactaatatttaaataacagatctgcaagacttgttactcgtagattgtagatgtccatcactatgctattctgctaaattgactttgaatgttctttccatcttctctgctttcgtcatcttgcttatgatagaaggaaaatgttatatcattgcaggaggag

SEQ ID NO: 2177 - DNA, 1234 bp, Brachypodium distachyon
  Intron number 1 from transcript Bradi3g19950.1 (locus Brad i3g19950) derived from phytozome v7.0 (chr-ID Bd3; pos 189 92966 to 18994199 reverse strand)
aaggttagtagaatcatttaattgtgtagtctttatgaagatttttttgattgtttaaattttgatagaaactcaggaggaatagttctttggtatatctggctatctttgcatgtgttgttgactttagtttcctgtcctgattctcttccttagtttgaagtctttgaatgctttgtaaagttctttgttatttgagggaataatgttgtatctgttgtattatgttgttgtccttttaaacattgcgaatttgcgtcttgatatttgtagtgaccattctgtaatagtgcagtgaagcagatgctgtggctttgtcatttttggcatgatcggctcggcgttttagtggtctactacagacataattaaatgttcattgattcatcaacacctaaagctacccttgaattcacaaatgtctgcacccattacaaatcccttgagtcgctacagtggcatatgtgttttttgctattattttagacctttgcctttgtattgtgtgcctattatgcatttgatgttcttttttatactattagttatgaacttcgtattctgcaagtactgcgagcatgttgctgtcatgatatggtcgctggacgattagctgtagcatcatttcgctgctaaacttctgcagttactttgaaaggctggtcctctaatgcttgtaacttctttagactaatttgccaattgttgcaatctgtactctgtgctctgtggcatgtccagataaacatttacggcttagtagcaatatggttccgttttgcatcttagggtttactcttcaatgttctcttctgaataccagtttcttcctttttattggaataacaacttatgttcactgtgactgtcaaaattttacagctccttcagcaaattctgctcaccatcatggccccacagttgctcgcagtattgtacttgaggctgttaatttggatcaggggggtgaattctctagccttgctcaggtgatcctacatgtttgatatgttctgatcaatttctgttcaaacaactgttgtgcttgacatagctgggttttgttcatattcttgaatatttttttggcagattctccaaagcctgtttagcgcagcttcggtaatccagaattcttaaattacttgcttagatggaaacttcaagaacttgtttaaaatgtactgttctaatgctagggtggaccagcaccttctgataccagaccttcaga

SEQ ID NO: 2178 - DNA, 13981 bp, Brachypodium distachyon
  Intron number 2 from transcript Bradi3g22560.2 (locus Brad i3g22560) derived from phytozome v7.0 (chr-ID Bd3; pos 217 36733 to 21750713 reverse strand)
agaaaacttgacggtacatcattgcgcgaaacgtagttattgacttaaattgtatttggtctggagttttctttgttacatccaattatcttcaatcttcgcgtcaatccatacaggatttttgaaacgtaaaagaatgttaacgtcaatccatacaggatttttgaaactactgcagcctttgaactcggtgaaaaccatcttaacgatgcatactgtgaaaactcacttaaaaaattctcaaaatactcatacgttagaagaatgatgttttatatatgtgtaaaatttcaactccaaactcaatttcatttggtagcaacgaaaaaacaaattctgcatgaacatctttcagtttttgacactattcattgtaattttctttttttaattccttttgaacttaaaattttgcaggtttgtataacgtttttgaaattttaaaacatgatttttatgaagtttacacggtttgcaccgaacgagagttttcaccggatacttcgcccaacataaatctgcttacggagtaagcatagttagctttcaacagccgtgcggtaaaaatgccgaggaagcatgcgcctttgctgatgaagaggagaaagacaaaagctaagctcaaaaaacggaaaaacaagacaagctcaagctggcgagataataccaatgccaataaacgccaatctctgtattacagatccaacagatttaggccaaaccaggcatgctcatcacaagaccaaaattggagcaagtatgggtacatatccgttcacattagatgtggaactttattgttcggtcctaaaaagcttcaactagagctcattccggatgttaaaccacacacggataatgcgggagaaccccttttcacaaaaactctcatgcaacaatactactagtgtggctgaaagttcaaacactaattagtagggctcgaccggtgcgcggaacttggcacctgcatagacagcagcagcacccagctcttcctcgatcctgagaagctgttccaattgaaaaataaataagcctgattagtacaaataggccaaatttgcttaactggaataaaccaagcacaaacatgagataaaggccaagcatcaaattgataacgataaacaaaaagaaaaaaaagcatgggcatcaaatcttttaatatgtttcccagttaaatactttaggagctacttgcctggttgtacttggcaagacgctctgagcgacagggcgcccctgtcttgatttggccctgtttcagataaagaaacactggtcatcaggacttgtccatggaggtggattacaagtagccggtcatttaaattgttcacactgtaatgtgcagggtacaaaatcataccgtagatagaccaacagcaaggtcagcaatgaatgtgtcctcggtctcaccactgcagaaataaaatgtaaataagcacacaattggtaccgagagaacactagggagaataacattagagtaacaaggcaagatctcccatgcatgtaccttctgtggctggtcatcacaccccagccagcatgttttgacatcttcacagcctcaatactctcagtgacagatccaatttggttaacctatacacgaaaataatcagaaataagaatgcattttacagactattagactgaaagaatggataaaaccatctgcttcaaccaaattgtaccttgagcagaagagcattgcatgacttctcctggattgccttggcaactctctgtaaaacataaagaagcaaataattaaagtgaccaaataaaagggaaacaacaccattgccatactcaagaaaacaaataactcacggtagggttggtcactagaaggtcatcaccaacaatctgcactggctctccaatttcttcagtcatcttagcatagtgcacccagtcatcctggtcaaagggatcctcaatcgacacaatggggtattcactgacaaatgacttgtagacattcttcaggctatccccagatatcttctgtgagccatcgttgttctaaacagcaaggtcaggcaattttagaaatactcctgaaaaggataagaacaaagtgtacacaaaataaacattgggactacctcttccttgaagttgaggtcataggttttgtccttgtcattgtagaactctgaagcagcaacatccatcccaatgacaacctagcatttcacgtagcaacaaagtccatcagataaaaaaaattaaacttcgtagacaggccaacagattaattcttgcagacaaaccttgccggtgtatccagccttttcaattgcagtcttcaagagctcaaggccctccttgttctcctacaatttcagaaaacacagacaattcaaatcacacccccgaattcaattgataatctcacatcgcagggtagttctatacattaaaacatagcagtcggtagcttctcaagacactgggacatgataaagaaaggaaatttgatctcacatggtcacaccatttaagacaagggggaatacctgaatgttgggagcaaaaccaccttcatcgccaacattggtggcatcctggccgtacttcttcttgataacagactgttataaaattgatatttgagttagatttagtttttatagggcataacaaataggttaaagatcaagatgaaagatttaccttcaagttatgatacacttcaacacccatcttcatagcctccttgaatgaggtagctccagtaggaagaatcatgaactcctgcaaatataaagattgcgtataaataacatgttgccaaacacaacaacatacctgtggaaaccatagttcagagcattgcctgcatagcaagcttgtttccggcatgggatccaccgttaatgacgttgaatgcaggaacaggcagaaccaagtgcttgttaccagcaagattggcaatgtgctgcagtttagaatataaccatgttaaggagagtcgaaagcagaatacataaagaacgttcacataggaaattgacacgatgcacacctggtacagcggaatcttcttcacggaagctccggctttgcaaacagctagtgacacagccaggattgcattagcaccaagctaaatgtacaaaataagaagtcaagctgttagagtggaatctgcagctgaaaatgaccactataaataaaggcaaaaatatcatcatagataatgtataccttctgcttgcaccaaccccactcgtttttggttccatcaagctgctggaccataaagttgtcaagctcagcttgtgtggtagggtcctgtagatgaaaagagggtgtcaaatgaatttatgtattcatatctcatatgacaatagaatgggggtgaaaagacaaacaaaccttgccaatcaaagctggtgcaataatagagttcacattgttaacagcctggaaaaacagcaaaaacatgtaaatataacaaagactaaatagtgcaagcaataataatcactgtaaaacatcaaacaagaaacttctgatcctacatgaccaagaaacttgttgtaaaaatacaacaaaatatgagggccggttatgcctatagcatgcgaaacaagagcatagaccataaacacacacagtttgtcatatccagatcatgcataatattaacgcttcctttttatacagaactaataccatagatttaaaaggcatagaagaaaaatatatgctactgccaattaagccccatctggttcataagattgggaagatcacaatcactcagtcgaggtaagaacatgaaaggtgcaaaccttggaaacacccttgcccaagtagtcagacccaccgtccctcaactccaaagcctcatacacacctattaaaacggggaggggtcatccaattagcttgtaatatggggatacgataaagcttgcaaaactgcatcaatgaagataaaaataacccaccagttgatgcaccgctgggaacagctgccctagcaaaggttccatctgagcagcacacatcgacctgagccaaacatcatgaaatcagcttaccttattatacagtttcgtcacattatgcaataacaagtaacagaaggacagctgaaaaatcaaactatatatcatcgaaatgtcatcccatcccatctgcaagcctgcaactacctacataaatcagcttatcaaatttcaaactaccagtaacaacgaccccaaacctaaactatgtgctatctcgtgttcttgttccattatcttctacggagtagtaatggaaccatatcttcggttcatatgcggaaaatacgataccaaaacatatggacagaattaactgagataccaaaacatatggacagaattaactgagataccagaccatatggcgagatttaactgagatttggtcatgaagacggagaagccaataaacatgctgaatttttttttaccaatggatgatagtaagcaaaaactactgtaggcgccacagtatcgaacaaaccaaaccagataaacgctaatccgataaattatcccaagtttttggcagaggcacgaagaatctacaccataccgggtcaacaaaagcacatccgaaagctattacatcaaactgtcaaaaccctacattccgctcccaaaatttccccgcaaatgatctaccatttcgattcagagaaaacgctacgcccgaccagatcggaccgtacaagagagagatcgtgagagaaaacgcgacgcccgaccagatcgaatcagatcggacgtgctaccgtgggtggacactatttcgattgagagaaaatgctacgccccgaccagatcgaatcagatcgggccgtactggagagagatggtgggttgagttggcctccggccgccgtacctcaacggtggggttcccacggctgtcgaagatctgacgcgccttcacggactggatcgtcgccgccatgataaagcttggagaagaagcctatgtcaaatcgagcggaggaggaaggaggagagaggatttgctattcgcggaggaggcgagaaggctttagggcaggccgcccagttttatagcggaaagaatgggtggaagtaccctgtaactattacgctcacacgggatgattgagcaaggggatactgcaagtaactgcatgtggggtcttctagcatgtactttccgagccccacatggaaatgacccgatgcgtagactcctgggtgtgaacgagcgggctatggcggatgggtcctcacagccgtcggattttgaaaagaagtgaggagcgcacggtttgtgatggcgaaggcctcggttttgcatcaagccactgtgggccaaaaaaaaaaaaaaaactggacggtgcccccgacgcccctaggaatatacgccggtttggtgcttctttgggttgaacgtgaacgttagagaccgaactcaccgaagtgttcatggtccgtttggtttgtgccaggtttaacgttggtaaagatttgacttgtcaattatctcgtctagctttttttttcctgactttgccaaatatttaacaagaatatgcaagagtgatgtatgactcatattgaattttgccaatgatccagacaagatccaattgagcataccctgtcagctttttagcatggctggttgggggcaccatcaaacagccatgtcacttctcttttctcctttcaccaacctctttgcaagactggtttccgattgcttgttttaggcctgcttatgatattcttcctaggagaacttttcatatcttcttttgacattttccttaacaagtcactacatcgattgaattaataattctgcagccttttgctctttagattttcagggataagaaatacactcattgaggaataagaaaactatggtcacttgatggtagaatgtagaatcatgggtgctaattagataatttatttaattctgcgatttcatttgctatgctattggttattcgcaatagatatggaaacccgtttaatggcatctgttccagtcacatgtatgccacttctgcatcatatgaaaatgaactttttggttgccaaatcataggtattcttagttatgtttgatgttgcatcactaacaatatgcacttccatgtggattgtagaaagacaaatgatttgtcactgcttcaatatacacgttaatcaagtagaatgcatgttgtttagtaggaaactctgcagcttgttgtagctttgtcgtgtattgagttccttaaagccttgctcgatgatatttttacatcgagattggggtgtctagctaaccagtgtataccttcttttagtactgtgcgatgaggtgttgcatttttatattggagcactacgcgagaatgtgcctcacatgaacctagccaatccacaaggtgaagacaccaacacaagttggtgatacttgatgaaattgtctttatggtgggattttcattatcagattggtgataatgttgtttatatagtgcctcatttttttatgataatgcagtactagacagagagttcagatatgcagaatccttactcgtccagcttgtttggttaacttttatgctatgagatgtgataaaataggttcacacagtttttatacagaccatcatactaggctttccgatttgcgtaatcatgcattcatctcacacatgggatgacaacatccacagaacctttatttgacgatattattgaacaaaatcgatggctcgaacaactgaccactactatagaatcacttatttctgacgtttcggaaaacctctatgctgacacaaaacagacgcgtctgcaatcaagtgtcagtaatgcctcggaaacttctgacgcgtacagacacgtcacacataggaaatacttcctgacacatcgtccaccgacacgtatcaggagtggtcttctttgagcctcagtggagtatttttgctgacagttttgggcctaaagaagcgtcagaaattgttatctttgacacttccctaagtaagaactcgtcagtgatgtttcttacgtgagtaaaaaacaagttacagctgacgtcttttttccgtcgacatcagattcaagcattaaattgttagtataaaaatcgcagggaaacattgagccaatcatgcaagatttgctacatttttaaacaagatcgaccacattacattgcagacaagatctgctacatttcacataagatcgatcacattacattgcatttgcatacaatatctactacatttcaaatgaagtcaaccacattacattgcagttgcatacaagatctgctacattttatacaaggtacacacatcaaagcgttgtcgacatgatcaagcagcgccctgatatgtcggcaacatcatccatgagctgcgcaacgccacgcccaagaaggcaaggtgtgcggccggggataacaagaggagcaggcgttttgggtcggaggaaagaggaaggtgcttatgggggaggaggtagtcaggcaatgaataagaacacggaggggatttaagaaacgtaatcacgatcacccggatacctcgcggacatttctcgacgccgtttcgccgccggagcctcgctgacggtgaacggtggaatccttggctgaggaagcggagaaagctgaggcgaaggcagctgaggaggttgaggttgaggctgaggcggaggcgaagagcctgcatgaagccccctcggaggcgccggcgcagccaacgctggcagattggacgaacgcggtcgctcctgaatctcccacccattgagacggtagtacgcatctattatcttgcgaaccatggtggagttgttcctggttgacttgcactgcatctggccgcttttatagccgaggcgaggcagtccatggactggaaggggaggtgacgaaccggataaagaggagcaccagcgtcttcccgatgcttcgccatggctatgcatgcacctataccgagctcgctctgaagtctgaacacgctacctttttgacctgcgtccgtgacttatatagattccatacatatctctgacgcatcctatataggatgtgtcaaaaggttatggagcttcaaaaacttgtaccactgactcttgtcggatgaaaatgcgtcggctgtctagcaacctatatactccctccgttcttaaagaatggcatattagttttcattaagacaagcttttgaccacaaattactatattaaagtgtggtttatatgtcatgaaaccacaagtatcatgaagtatttttgataaagaatctaacgatattaattttatgtcatataaaacacattttgatatagtaatttgtgatcaaagccttgtcttaatgagagctaatatgccattctttaaggaacggagggagtatatccacggtccacagtgcgtactcaaaaggaaaaaaccctctctcgcgaaatctcttcttgaagatgatcctgagtatgatcttgagtacctcctgtccattgaggaaggtaggatggtggaggtaactcaagtgtcgaagctgcaagccatgcatgctagaggaagaaaagaaggtgaacaacagattgtccgctgatatgctcaaactagagtttgaacttgctgcccaggacggggtgatagaagatctcgaaacggagataaaagaagcgaagaaactgattgaaaacctcaaagttcagctacaagagcagaccagcttatgtgtggcatgtgttagcattacagcgatattagctgctgttttttatgtgttttattagctgtacgtcgcttttatttgaattaattagcaactacgcttcatgcatgtaaaaaatgagttccaacaattctctgacatgctctagaacaagaagtcagtgagcatcaaaaagtatactgacgtctcggcacaacaacctgtcagaaacttcctcgtaaacaaagttgatgcttccatcttcctctgacgtttacaagacatgtaagcgtcagtatagaaactacgcgtcagaagtgaaatatcttcctaccgtggcctccggatgctagacgcatcagatgtaagtgtctgtgcggacgcattttagttttgcgtcggtgggaagcttgcaggagtaacggattctgtaatagttgacccaaataggcaaactgtcgagttcaccaaccttcttcaagattttgcagcctcaaatcgagaggatgcgtgatcctacatcgtgaattgaaaatagaagagggagtacatggagcagctattattctgaatatatatgatatgtcagtgctagtagccgcagcaggccgtgctgttgtttttgtccaagcggagtagatggatgtgagtttcagaaaagaactcgccagaaaaaaaaagagtgagacataccgccgcacctgaccatccggaatgcaatgcatcctttacgacttagtaacatcagtcacggtttcaccgctgttcgtccccgtttccggcgacccattccctctatggccctaccactgggcatggcactacccataggacaatgattcccagacagactgcgatgctgcagcagacgaaggggtgatagatctggatcaggataatgatcatgatgtgaggcgacggcaatccgggaagggagaggaagctagtactgtcacggcataggaccagttcttttcggcttcctagactggtttctccgagaagttgccctcgcccagctttttagagaagccgtgaccaaaatttgattaggctactaaaataatttggactaaactgctttgcaagtatagcaaaatgccaaaatctgaaagccaggttagtgcagaagccggtcctagagtcgaaaagaacgcagccataacggaggcggcggcgaggggggtgtcaagacgatccagctagcggcggagaggagggggagctgccgtgtggtgcagtcagaggttaaccccggcgggattcagttcgcttctcttctcatgcggcggagggggtagcagcgcgagaacgggctcgatgtggtcgatgctcttggcttgggtggtttattcaagcaaaatgacgaatgggagtactgaaaccgcttcccagtggtgtatagtctctacaaatcggccttggaatcgtgaaattcaattctagtgggggcacgcaaggagcttcatcctctggaaccgaattcctgttgcatgattccgtgggcaattcatggcgcaaccaaatagggtaagggtaattgttcctgttcttttggcttttctaactactgtcaagctctgcggccgctcgagagaattagtcaatgctgctgctgctgcgtggtactagtattattgatccaaccaatgcacatcataaaagcacacataggaagtagaatttttaatatgcctcccctcctgcaaccgtccctgctgttgctttctcctcttgtgcttctgtgtcccaccttttttttttgtcatttttgaatctggtcaaatgacatgtttgttctccagctttcaactggaatgttctccacaagagataactacgaggggatgtacccaggatgtacctatcgttgctggaatattcgttagatcaattttcattcttatggaatatgcaggcttcattctttggtcttggcgaccagtagcacataaaagccatgatttggttcccagtgtgcattcaagctcttgcaggcttgcatgacatggcggagggcattgtggtctcgctgatcctcaagctcggggatgccttgtcgagcaaggttttcgagcttgtgggatcattgttcaggctggagggatatgctctggagtgcctattctgcgagatatggcaggtgaagggcgaactagaaagcattcaggctttcttgcgtgctgctgagagcttcagggatactgatgagaccaccgctgcatttgtgaggcaaatcaggatcctttgttttcacattgaagatgtcatcgatgaattcacttatgagttggggaaagatggtggaggtatgcttctcctcaaggctctcaggaggatgagacaaatcaagatatggcaccggttggcagcccgtctccgagatatcaaggtactcctaaaaaatgctgcggagagaaggggaagatacgatctgaagggtattcccaatggacacaaagagagtgggaagaaatggatcaaactggagttgtctaagatacagttccttcgaaaaggaggatgatcctgtggggattaaggagcaacaagatttcttaatgacatgggtcgaagatgaggagccacgaaactcgattgccagtgtgtggggcatgggtggcataggcaagacaacactagctaatcatgtttacagtgttgtcaaggatggctttcacacttgtgcttggatcacagtagcacaaagctctgaagctgatgacctgttgaggaaaatagttcaggagttccacaagaatgatcggacgaaggaatttccaaaggatgttgatttaacagattttagaagcctagtgaaggcaattcgctgttacctcgaggacaaaaggtacattctcgttctggatgatgtgtgggatatgaatgtgtggtttgatatcaaatatgcttttcttgatggaaatgggcggatactgttcacatcaaggatttatcaggtagctctactggcgccagaatcaaacataatcaatttgcagccactcgaagagcttgatgcactggatctcttaccaacaaccctgtcatggatatgaatgtaatcctaaaggttagtttggaagacttaccacatagtattcgaagttgtttcctatattgttccatgttcccagagaaatatgtgatgcaaaggaaatctctagtacggctttgggttgcagaagggtttgctgaggagagtgaacataagacactggaggaggtagccgaggattatctgactgaactgattcaccgttgtctattgctggtattcaagagaaatgactctggttgtgtttatgaagttcaaatgcatgatatcgttcgcgttttagctcgttccaaggcacgtgaagaaaacttttgccgtgtctttaaccccttgagaacttatgccatcagagaatcacggcgtatatcaaccgaagcaggggatattcaactgcttacgcagaatgctcttcatctccgttcattgcttgtctttcagagttcctttagtttcgtttcactccgatcattgttaatgaccaataagctgttatctgttttgaacctacaagatagttcaattgagaagctaccggcagaggtgtttgagttgtttaacctgcggtttcttggcctgaggcgaactaaaatctcaaatcttccatgatccattgaaagtttgaagaatttgcttgtcttggatgcttggaaatgcaaaatcatgaagctaccaccacaaattacgaagcttcataagctgacacatcttattgtaacttccaaaccaggcctcccaactttgcagtttgttccatctgttggtgtgccagctccattcggtatatgttctttgaccagcctgcagacactactacaggtggaagcgagtgcagaaatgatccgtctcataggtgctcttgtggagttgagaacattacgtatcagcaaagtgcaaggtctccactgtgaagatctgttcagggctatcggcagtatggttcatcttactcgtctaggaatccaggcagaagataaccaggaaatgctgtggcttggaaaatttgagccacctcccttacttgagaagcttttcttactaggggcactatccaaggaatcctcgcctgatttcttttcgtcacggagtaaactgaagaatctcaaatttctgaggcttgttggctcaagacttgataaagacacattttcatgtctcaagggtttggagcatctagtaaaacttcagctctatgatgcatatgctggtgactcgatgtacttccctgcggcatcatttccgaagctcagggtactgaaaatacggggtggagagtatctcagtgaattggagtagaaagaggcgccatggggagcctaattgatcttaagctcctgctctgcccacagctaaagatgttgcctcatggcattgagtatgtgagtactctcgaagaactgactttggatacagcacaagaactagtcgacagggtccgacagaagaaagaaagtaagatttctcatgtccagcgagttatggtcgagcttcagaattgcgactaatataaatgtataatttcctactgcaaggtagtaaggcatcacttgaacatttacccctttatgtaccataattctgtgtactccgaaatttcctctattcatcggagcataatgattgtttagcagtctaggattgtgtaataattggataattgaactttcctatatttttctcagtctaccagtagcacttaattgtgcctgagctctcctgttgtctagcagtttaggattgaatgagtgttttgcaagggaaagcaattcactgtaacaagaaccaaatctttcgggggaaggatctactacgacttgtacgcagctaatcccattgtccaacgacgaaacatttctcggagaacttggaagagagtcgaacgagagagtgaatatttgtttttacagggccacattaatgatgattttccccatgtgagaatggactgtttaacccttcaaccaaagaactaagttatactaatctccctcattgatgtgcaatgaaagtcataaatttatctactgggggtgtacgcagctctgagtatcttttaaacaagaaaagaaaatttaggggtgcatatcctcacacgtgacaatttttaattgccaaaattctatttgtcaatttttttgtaggtgatttatatgagttcgcccaaaaaataaatcactgaagttttagaaaaacct

SEQ ID NO: 2179 - DNA, 3133 bp, Brachypodium distachyon
  Intron number 6 from transcript Bradi1g09750.1 (locus Brad i1g09750) derived from phytozome v7.0 (chr-ID Bd1; pos 698 8423 to 6991555 reverse strand)
aaaggaaaaggaggcgtggccaggtaatcaacaatgtctcctcatatttcttccatactcctataaacaaatcagttggtggtgatgatgtgtttgctcagttttttttttatctagcgtccatctgctaccagtagttgacattgagatatgattgctcagtacccaccaccaacttaaatctgttttgcaaatgcaccatgatctaccataaatttgtggacccaccgagcagcacctcaatttaataaaacaactaatcttgttaacagtcattagcaacatatgggtttcttgctagtgtttaatatattttcttctggagtaaaatgcacccgtggtcctaactgtacatctagatcctaattttaattaagttgttcacgcgaggtccaaaacacgtccgagagcctttgactgtccaacgtggcttgctgaccaaggacacgccggtgaaggggtcttcggagggagaattcccggcgttcgtagttggccaagttgcagttaggcccttacaaaagccatacccctcgctctctcatcctcttcaatcgtgcactctctcctctgccgccattcgtcgaggttgcacgccagctcgtcttcgggaatacgaagggggaagaaggggattaggtattaggtttctttccgactgccagctgccgtgccggcggcaggctctgttcgtcggcacgacacctctttcgtcatggcttccaattgccatcgaggaagaagagaagaggggaacctctccaataatattaggaccactggtgcattttactcttctgctaatgcggttcccaatggtcagagcctgatccgaaagattgtattattatatttgggttagatataacatgtaaatgtaaaactgcttctagctttgaagtgtttatgaccgaagtactcaacaattcagtgggcatctatctggtttgtacagttgtggagcaggctttacttgatagttaccatatcggcctagtatgatggattgacagcttataaggtttaagctgaaaaggccaaatagtgattacaagttctcacaagttggaggttaattgcacagcttttggggcttatctaggaaggagtgaccttctggagtattgggcatttatgctttgaaccatgaactggcttataagatggaaaaatattagctgtaatcaattactatatgagatggccaagaagcagtccatcgattctcgcctaacgacttgttgaagaccaacccactcaacaatgtccataaatgaggagcatgaactaaccatttgtgtcaactctactaattctatttatctgacaatgcagaattagccttcttgcaactggacactatatgcacccttttatggaccaacgggacatgagattctagagcacaaaatataaatgacaactttgaacactccagtggcagtacccgaaaactgtaaaagggaatatatctgaaacagaaataaacagagtatactatttagcccgtgggcccatggcatgcatggtatgatcttgacaagatctgctcagtgggccctggttggcactccccttctcctttctccttctgtttcttccttctgttcttggttggtttgcatgttggttccaattgagtctggattttcttccaaagaatccagattctattgctattgtccatcatatcactaaataactttttatgattctgttaagagggttgagacagctctaatttataaaagagaatgctactcttttggatttcggcccacgaactgcccacgattcctgcatgtggagctcttgctttgctccttttgactggaataaaccgagatcatcttctcgtgatccttgagccttgcagcactttattccaagttcattttggttcagcacaggggcagcttgggggcagccgtgtccacatgctcttgcttgatttgctgcacttttggtcttttgaagaagataaattgagagctacaaagcaccgatacagcggggccagcagggtccacatgctgacacggtgggatacagggatacgtgtatccccatttttctgatttaaaacaaatcgggagacggcagggatactgggcagatatgtctgggatacaggcagggagaaagatgagaacggcggctgccggcgaggaagaaattcctggcgggaggatgaggaggacagctgccagcgaggaagaaaggggactgtggccgctggcgaggtagaagatccggtcggggaggaagacgtggatgatggcctccgattagcaagaatatctgggcggctgtgtggttgtggctgtcatctcgtctctatgcagctggcgactggtggcagagcatgtgactggtggcaggagcaaagtgtggcagaggatgaaacaggaagctgactaggtctagggttttctgaagatgggccttaagtggaggcttggctaggcttttagtacctatcggattgctcaaagtcattcataatggaactgaggcaacatatatgcagtactctcatctcttctataaaaccacttagatgttgtgtatttttctaaatacttatatactctgccgtatctttgtatgcctgttttggaatgctgttttcatgagtcgatgtatccatatccccttgctcgtgcaacacagatttgagacggcctagcacttctttcctcttatacaaaggatttaattgcggcatttttcctaaaataaaaccctggcatggtcagatagttaaccggcatagtgtttgtcaaccagtacaatatatttcatttgtttatgcaatgtttttgcaaaggactaaaggagcatacttggtgtacctctaaagcctgatggaaaaaagatataaagaatacacattactgtaattattgcatataagcgccaccaccagtgaataattagttgtttttacagttcagaagatattatcaatttagtgtagcctgaaaaactacgtggaagtactttcgtcttatctctctttagtgatagcctatgcttctcttctagtgctggctttacacaccacaaactcactctctcactctctctctctccaggttactgttcaggcattagacgaaaagcttggaag

SEQ ID NO: 2180 - DNA, 1641 bp, Brachypodium distachyon
  Intron number 1 from transcript Bradi3g45030.2 (locus Brad i3g45030) derived from phytozome v7.0 (chr-ID Bd3; pos 469 65220 to 46966860 reverse strand)
acaaccctgacggctcctgccactatcacccctccgtaagctccctcctcccgcccctaatacccgcactcgcaaatttttgcatcgtttcgcatctttaagcagagtggatcatggaggacacctttcgtctccgagtttgtcggcgccgccggacagttgtaaccccagttctccggtctggcgttagtaacttgcaatagcaaggagtcaaaggctataggtgctctacgaagaccgtgaaggcacgatttggataactgctgtgtctaagatattgaaatccgccgaatcttaccgtagttgtgtactcttggagacaatctgtgtaactctttaagagacgatttgggtaatgatgttagtattaagttgttgacatatcaatatccgttccatgggtgatggtagattggtggcatctacctggtaatcgcattactcagtcagaaaggctgttgatgccatcggtaaaagaggctagaagtaaatgcaatcacaccttttggaatttttttctttgggttgctgtataacctggaattttcctgttgaggaggcatcgtgtgaggtgctgatctttatttgttttatagatggatcacaataaaaacaagggaggcaagggacctttgctttgtttggtacacatcttgcattaatgttttttacaaaactggtccgctaaggaaaaagagtaaattccacaaagctacaagtttaatgtataaactatcactaaactcaaatttaacaattaatttcatagaactatagaatgtgataacacgtatgaaaaaattgcagatttaggattttgtgagcatcagaaagctgtacttctgcaatgcaagcgttccctgaatctgtagttctttgttgtctgtctttaaatgtagctttcttatacagttggtctataaataattgagcatgtagttgtgagaaattgttctttaaatatatagtattgttatagtttttgtatcaaagctgtagcttcagaaaatttactctaggaaaatagctatttgcaacactttttcgctgctgcagtgttctgttgtaaataattctaattattctgcaatgttttgataccaatgaagaagtaactgccagacaaggaagagcatatataccttttgtcttttcaaaaacacaaactgcccaacaacaagcactattttttacgcaatgctaaatttgattctgatatttaagtaccagttgaactattgtaattaatccttttttttactactgtatgttaacaaggtgcttaaggaatatccgtcatagatctgagattaaatagttaaagcttggaataagtaagatatgaaccaatcatgacatgggattaacttaacatgcatttttgcctttatgactggacaaacttgatttcttttttttatttggttttcatcaagtgcttcagacaacatatctgcacccatgcctacttgcaattacagatttacaacactaatttcctatttgtcaaaaaaaatgtgttttgacacctctccccattgtttgatttgttgcagggtgtaagttcttctgctgtactcgagggattgtatctgtttttgagaaagccacagattttctgacaattcttttttttagcct

SEQ ID NO: 2181 - DNA, 2984 bp, Brachypodium distachyon
  Intron number 2 from transcript Bradi1g19150.1 (locus Brad i1g19150) derived from phytozome v7.0 (chr-ID Bd1; pos 153 41626 to 15344609 reverse strand)
cactggtatttctccaaattttaatcatacccaaatttattcttcttaattttacttctggaaatattttcattctcatggtattctttctatgcccgtgacgctgccaattctagatcttacatagagccaacacatcaatctgcattcctgttcggatccttccaaccaattatagatgcagcaccataggaacatgtgaaaagacctcgatgtcgcctagagggggggtgaataggcgttttaaaacttctacggatttggctctatatatcctaaatgtggaattaaactagtcggatattttcaagcacaaatcctaaatatgataggctcaattgtagtgcaccaacaacttaagctataacaagatgagcacttaataaacaagaagctagcacaatatataagatagcacaaagcacatataagataatatatgacttcaagcacgatggctatcacaaattaaagcacaagtgaatgagctcggtttaggaatacccgaggcacgcggagacgatgatttatcccgatgttcacttcctaggaagctaatcaccgttggagaggtgcgggcaccacaagaggtaacctgaatagctgtgaaagggcacacccaactccttgagcctcccacaccaaagtaggagctcaatcactaagatggctagctttttcctccactccggagatggcaagctccacaaccacttcacaaagcaccacaaaggagaaccttaggcctcttcacaatctccacaaagaggtcatcgcggcaacaaccactaagctgtctaggaggagaacctccaagagtaacaagctcacaggctctcactcgaactaatcaaggtggagagctcaaaccaatgcatcaaatgcaaaggaagaacacaagaaatgctcaaatccctctctcccaaatctcaaccaaatcaacaaatggaatggagaaattggagaggaggaacaaaggaggagatcaacaaatgatccctccaaatagatctacaaactccctttaatttgatgggggatttggggcttgggggaggtggagaaagctcaaaggaatggggattttttgagtctaggagcttaccttcccgttggggaagaagccccttatataggggttctcccgaatctgcccgttggggtcagattccatagcccagaggttccggacgaaatccggaccaaaaaatcgaacaagaaaaacgctactagactcacccggaggtttgcccggaagttccggcctacaaaaagctgcataaccactcacacgaaaacggcaataacttttgcatacgaactccgatttcgatgaacttggacttgttttgaagataacaacgagctctatgaactcacacagatatccaacaaagatcaaccaaaagagatgatgcaaaatatgcaaaggtttgagcactctacgcacgacgagttcaagctaccgcccgaaagcccctcttgatagaatggctatcgaacctataaaccagtcactcacaatactccttgagaccggtaaaactaggaaaacctagctagaatatacctttgccttgagcaatccactttaggttgatataggcgtcaatgctcgtctcatgttggaatccttcgcttgatcacggtcacttggtgaagatactcaatttgctcccccatactccaatgtgggagaccttcactttaagctcatcttcacatgtacattatcaccaaatggatggcaagcttcaagcatgtatcttctcgggatgcttatattgagcttgtcctttgtcaatcttgatgaccgtctccatatgggctatataagattgtttcttcaaagctcgcccatatgtatcacctaaccctcaaccaaaaataacatagacataatatgggttagtccattagtgcaatatacaattgcttaccatatgattcatgtatataatcctcggagtgcttttcttgatcttgctcttctcaaccttgatgaaacatcaccacttgatctcatctctcatgggctatatgaaatcttcctttttgatccaaacccatgagtttcagctaacccacatatagatataccaaatacatagtttatgggttagttcacaaagcgcaattgataaatgcttaccacaccgctagatctcatgtggtacataattacgcttgtgagttgaccaacttgaatccaatatttgcacttattcttggtcaaccttcatctttgctttactccatctttatgatatcatgaatatcactttagtcctctaatatcactttagtcctcttcatcttctaacacaaaatcttgagacaccaaatggattcttcactcgattacttgctccatgacttggttaaccatgactcaactcatgagctcaacataaccttatcatgaaaccatatgttgaatccttatcttgagaatcattctctcaagatattaatccttcacgggaacttcactttcttcttcttgacaatatttgatatactagcattccttcatataaagctcaatgcaaacacttatccaaatggattgtcatcggataccaaaaccacacattcaattgtcaactctcattatatatctttatcttcatgacatttatcattgaattaaccaagtggtcttcattcattgcctatgaaacattccttcaaatatatctcaattaaaacattagtccataggaattgtcattaattaccaaaaccacacatggagcaacatgcactttcaacatggatatgtaaccatgaaccagcaaaggagagcattcattatgcaagcactgagttaccatggatttttttttaaatgtcattagatgtacaccttactgcatttttatactcttgcattactattaacttactttctaacaccactgacatatgtttatattacggttataggtgaattgctcaggttgcaaagaaaccatagagca

SEQ ID NO: 2182 - DNA, 1365 bp, Brachypodium distachyon
  Intron number 2 from transcript Bradi1g35920.1 (locus Brad i1g35920) derived from phytozome v7.0 (chr-ID Bd1; pos 315 42112 to 31543476)
caccaaatttttcaggttctaatccaacttaaaatgaactcccaagtggtaacatctattattatgcaatttgctgttattgttcgttcaatttttctatgttgctaaaaaatgttattgatgctaacgaatgggtcaagcaaagttgtgctacaggttcctcatctaatccaagcttaagaatattcaatggagtaaaattggttcagccgttgtgtataccattgtgaaaatttgaagaatgtgacaagagttataaagatatgtaacttactttcagaggaataatcaccatggcagaggtttacctgcagaaatcaagatcagaagattgaacatgttaatgaggactgcaattgaatgcccaccgtgaaattgtgccatttagatcactgatagcatccaatatttgttacgaatgtgataacatcaaggagctcttttgactacagagtaacaatgtcatatgttgagcttgaaattccgcatgcgaagatatttttatttccatatcttccataattttaattgaatagtagtatttaccaagataaataagctgtttgtagggtttgtttttaagttacaaagtgtgtagaggtaatgaggtattacttgattgcaaattaaagataggaacgtgttgtgctcttgtcctgttcatggaagtagaatagctcaagacaacatataaagagagaatttaaaatagcttcatgctaaagtacaaagtaataattgtagaatgttatttgttaatttcactatgagttaataaactatcatgtggttatcattctaagaaattcattttggtgtatgacttttgttgtttaccactttagccttcacttttttactatatggtggtagtagaccaatagtctaattcttcgctttttatgcttcagatcccaatttttaatgttctatatgtctaccccatacaaactgaccttttttagcaataacattgactggtatatatgatgaagcgtttaggttattcccataaaaaagatactatgtgtacacatcaaaagctgtttctactcgcatggtgaatctaagtgccttttctacactatttgttgatgttcaatagcatttatatcaaacagtactccggataggtgtagtataatgtgcttctgtcagtcattggatatctcagtcaattccttatctataataatgttacatcatgcaaccaaatgtatggtgatttctttcgttggtattagctgcatttgttgaatcatcagctgtgtggtagttttgggattgttgtgtaaatttgatttgcttatatgataatctctttgtgcagcactgctggttgtccctttggttcgggttgccatt

SEQ ID NO: 2183 - DNA, 13424 bp, Brachypodium distachyon
  Intron number 7 from transcript Bradi1g14980.3 (locus Brad i1g14980) derived from phytozome v7.0 (chr-ID Bd1; pos 119 69254 to 11982677 reverse strand)
ctctgaatcttcaggtgagtgatctctgataacaatggcacatgaccctctattatatactggagtagttgatgccgtgtggtgctaaatcttgatgccttgcaggtccatccatacacattcagaaacgagaactcgtacttgcacttcgacttccatcaagacccttatgctgaatatgagtattggctcagcgagatcggtgtcgacggtctgttcaccgatttcactggtagcttgcacaagtaccaggagtggacaacaccataccagaagcaggaaaagaaggatcatggacactaagcttaggtcgccaataccgtatttgttcagagttgtttcattgttgtcataaccaagaatactaccattctatgcaagtgttgccaataaatcacggaagtgctaatggtagagcttcataaattcacgtgtgttgttgttgctaccaaaatttcatcatacatgagttttaaaaatatttacctgttctaaaaaatactccctctgattctaaattcttgactaatttgtccaaatatggatgtatctatttttaaaaagcgtctagatacatgtaatatttcgacaacagtttagaatcggagtgagtacttcgctccataataagcgtcgttgacttagtatagtgagtataaaattatttatatatatatatatagccgccatgacgacccatggctgcccttcgcggccctccggcccgcgagcccactcgagcccccctcccccgcctgcgccaaggctttcgatgaagatcacatcggcgcgtaccttcggtccgtggagccagcgccggacgcccggactacaagcgggcgatgacgtccgtgccagctgcgaaacgggacgccgccccagcgcgccggactcgtgcagtggccggcggtggctcgcctctctcgcggcgacattcggcttccagttcggcaagtcctgtctcacggtctaatcgatttgtccgaaagcctgtgtaacaggctaacaggccagttctaaatttttagcgtatgatgtactttctgaaatctgaaatgcagcacgtgttgccttttttctggttggtctccatttgtcaaattacatatgctttgtagatagggaccccttgtcaggctaagctggacatccagttccgctttgaaggaaacaccctaaatcttataccctgacctaccgactctgcttggcgagcaggcccatttgtcagattcgacacaaattgataaatgaggtacataataaaagagagtgagcacttagggtgtcaaatgttcaaaaaatattcaatgaggggctttgtgtaaattttatgcacacttaggtacgcagtaaaatttactcgaaattctttttaagaagaccgtgattgggtctgctgctgtttatttcagaaagactggggctgtgtttggttttgagccaaaatctgatagtttgttgtatgtttgttgttgccaaaaacatggttgtatgcactagttcttgtaatcggtgtcggtctcgtggtacatggtacatggagtctcaagattggaataaacgagattatgagaatccaactacatacacaagaattatagttctctgcggtaacctccaagacattgtgactgttacaaaatttcgttggaattatggtaaaatttctgaagtttcgaatattaagataatttttttaattacaagtcaaatatttccatccgacatcaattcgatcccatcctaaaatgacccgggttgcccattgtattatttctctgactacacggctccccgactgaagcaaccgacatcgttgtggcagccatatgtgcctttaatagcgtcgccgaagatgaagcgacatcacctacacagtctacaggtgttcatgcttgagctcgtcgagagctgaacactctttgctgaaattttctttgaattcgaccaaacttttgccaaatttcaaatggttttgctttttcttggacaacaaaaaaatacttatgtctaaattgacaccgatggccactaaatttagtcattgatatttatgcgaatataaaaataaaaaaacttcattaggtgactataaaagttaacctagaaataatcactcttcttgccgatattccgaaatttttctccatgactacatctaccacatgtctccacacgcgcattttgccgaggctgaaggttctacttccgcccgctccacagcccgaccccgccgccccgtctccggccggttatcgtgcgctacgccgctaccttcaatcgcgatgaggagctctcggtaccgcgtgcaacgccgccgcctcctgcctcccctctgatacccgtaccgcgtgccaacgccaacgttcccctcctcgtaccgccgtaggatcctcgactccaaagccacggcctcccacgcgctctacacctctcggctccccgcccgctctcggcaccctgcccacaccaggatcagcgctatcactactaccagaggtaaaatctcagcacggaatcccgtttattatggaccagtagatgcaagcggaaaccctgcgtctgtttcagaactgtacctgcattcacggctttctctcgtgtatcgtgtcaatttacttgagtgcgctgaagctgtttgtagatatgcctgttagcagagttcgtgtgcttattctctcctctacagtgttccgtcgtgctatgactttggggaatcagactctttatgatattgtagatgtagtgcataaatgggctctcatacatcattgtttcaccctgtaactagttagcatgtgtgcgtcaaagcatgtacagtgtactgattgaatcatgcggaatctagggccaagatacctttataattaaatgatattgtgtggattggttgttctagaagaacttgttctgctattacaattaagtctatttcttgctatcataattcatcctgcatgatttctggcaaattttacaaattgcgtataactggaaaatttggaagtaggagcatgtagttctcagaattaagaccaatttccattctcattttttttctattagattactatgtttgagtgcaagatgtgttttgtacacttaattaatgcacctaagttgcttgtggtaatgtctattactctgttacaagacattcatcagttgcttaatgtcctgcttaagttagttactgcatgacttcatttgaatcgatcatacttgtaacctaccaagtaccaatttctcaggagttcacatggtctttctgcttggtgaatcactggtggagataacatgtcaagaaatccaataatatgcttgtacttattgttagcaacatgtgcatgggaagtagtaatggaaaaataattatttgttatgtacaacaacacaagaaattttatgtgttggcaaaattaactccccagtcctagccattgacgccctgcagctttcctgtgttccactgtactgatttgatttccggccacatttaacaatacgagctacattgcataagagataccagctcctacagctttccagtgtctcaatacatattcgttggcttcagctaattcttttcatttataacttgtttgacttttatcggctgcttctcatgtgcaacataagctgctatttagcctctcttgatgtaaagagagagcactctttccaaaaaaataaaaaagtgaagagagagcgcagacaatgaaaccctaatcctggtcctcccaagcccttgatacagacctatcggagatggcgccgtcgccgctggagaagctcaagagcatatggaacttgcaggtcatggatgagtagcagtgggccctcaactatgtatgcatgcacccatctccgctccctatcactgttttgctattcttcttcttcgtgctttctggtgtgtgattgcgctggtaataattgtaatttctatctttcgcgtgtttcatgctgaacgccgctctcaattgcttccttggtcggaggacaatgagatccccttaatttttatgtagggttcgatcggattgagcgggcgattgacctggtgcgcctgtacgtagggggtctagatgcttttgtgttatcctaatatttgtcacagtgctgatggttagtcttttttttttttgaaacagtgggcgcccccaccgatttctattagagaaaccgcccccaagttttacaccgaaaggagaacaaaaaagaaaggacaaaacaagaacaaaataacatagaagtcactaggaaagctaccaccgtctcccaggtcatacgcagacgaccctggcaagacttaaaatcttcagcagaacaacacccatacagccgaccagaactgggaagtggaaacaataaagcaaaagggagaagaacacatcagcactggaggcatcagttcgcaggtgcccatccatatcttctggagagagcttctgttaccaccgtcttcagcatgttcaccccagcttcaagttttcttcagttttgttctttctgcaaaatgatccaggaagtcaaaagatgacagatctggaagataatacttgctggatcatcagggtattgtttcttgaagcaggcagcattcctaactttccaaatggtccacaccacggctgatccccccaccaggaccagcgcctgttggtccacaggaaaggaggccacccaatcacccaggaaatcaccagccccatctggtggtctgaccaactggaaggcaaatatcatcacctgccaaatactggaatagcaagtgatctacagtttcattctgggcactgaagtgacactgaacatttccagtccagcctcttcgcagcaagttatctttggtcaggatactatttctgatcatgagccagataaagatcctgacctttaggggaatcttgatctgccagaggtttttgtactgaaagatggctgtagctctcaattgcagatacatagatctgacagagaacacaccagtctgaccaatgttccacctaaccgaatcaggttcagagctcagagaaactccttcaacaatagttctaagctgctcccattgttcagcagtttccccccatagactccttctcagtctaatacaggaaatgccttctagcaccgtctttctgagaaagatatctttggagaaagaaatatggaaaagccttgggaatctggaagcaagaggcctatcttcaaaccatctgtccttccagaacaacgttttctctccattaccaacactactacaaaacggtctatatgtcacggcacatcagtaacgggtccggcgcgaccgttactgatgaacagagcggggtctgcccgtccccgcccagccatacatcagcatcatacctcgcgagagacatcagtggcggtcgattaagagacgaccgttactgatgaaccacgcatcagtaacggtcgccctaacgcgaccgccactgatgtgtggtacatatcagtaacggtcgctctcggcccgaccgttactgatgtgtaacgggccgtgttaaagcgaccgttactgatgtaccccctattattagtaacggtcgcccaagtcccgaccgccactgatgagggtcgcggtttaaatacgcagaacagagccgcagctggtcgtgctgtgcgtcgtaacggatcagctgcggcccttcttccccggtgacggcgaagccatgcccaaatcggccggcggcgagtcccgcaggtacccctcctccctctcccttcctcctctctcccccccgcgcgcgccggcagcccccatctccatggccggcgagctccgatcttcgagcccgaagcttccctctcccttgcgagctctctctccctcccgatctatctcaccagcctccaatttctctttgaagttccccaatttcaaatttttgagctccggccgccggccaaaatgcggcctcctcgtcgtcgcccggagcttccctctcccttgcgagctctctctccctcccgatctttctcgccggcctccaatttttctccgaatgtctctaatttgaaatttttagttagccccggttaattaacaccttaatccccttgtcaatgattaggctaattattttgctttgtgttttcttgtgtattgtgttgtagatcgaaggaccgttcttggatgtacgccacggaaagaatcaatgctcgatggataaccgaatggacggtcttttttggagtcgcgaaaggtgatatggaatgaaaaggacttgtgatgatgtgttgtccatgtcgcaaatgtggaaacacatgcatgatgaagcctgaagatgttcagatgcacgtgctagcatcgggttttgtggaaggttattcacgctggacttgtcacggggagggtgcggttgatgtcggtagcggtagtgaagatgatgatgtcctgtggtatgatctggcgaatgattccgaggaagaaacaagggtcgatgaggaggctaatgtggaaggtgaaggagctccacgtggcaggattgccgaaatgctagatgacccgtacctacgggaccagctggaggaccccgaagatgggttagagtctgttcagttcaaaaaattgttgcaggacgcacacacacccttgtatgatggagctggcgaagaaaacaacgtgctcgaagtaacgctcgaacttttgaggctgaaggcagcatcatgctggtcagacaagggcttcacggacttgttgagttaccttgcttcggtttttccacagccaaacaagttgcccaagagcacatacgaggcgaagaagattacatgcccgcttggattagattgcgtgaaacatcattcatgtccaaacgactgcatggtatacattagagagtacgagaaccatgagagctgccacatatgtggtgcatcgagatacaagaagaaaaacgatagagctggcgaagacgatggggaagaagtgatgaagggcaggccggcaaagactgtttggtatcttacggcaggtggccgagttgagcgttggatgcagaacgttaaggacgcgaggtatctcgtctatcacgatccggcgtaggctggattcggtcctgacgggcactaccatgtggaggaagctggggtcccaagacaccctgccgatgggactcagtggagaaactttgacacggcatttctagatttcggggcagagcccagaaacctgaggctcggtctcagcactgacgggataaatcttttcggaaacatcaacaacaagcacagcacatggccagtgatcttgtttgtctacaaccttcctccatggttaatcatgaagagaaagtacatccacgtgtgcatgctcatacagggtccaaagtagccggaagctgacctaaatgtgtatctgcagctagtgaaggatgagctgaagcagctttggaaccctggcagagtggtttgggacgcaaacaggagtacttcacgatgagagcagcgcttctgacctgcgtgcatgactaccccgcgaatggaaatacttcatgccaggtgacacatggctacaaggcatgtacaaagtgcggggaaaacacgacatcggagaagttgcccgcttcatccaaaattgtttacatgggccaccgaaagtggttggatgctaaagacccttggagggatgacaaggaaaggttcaatgggaaaacggagcacgggacagcgccgaaggagaagtctggtatgcaaatcctcaaaattgtgaacgatcttgaagttgtccccgaaaagattgctgcgaagaaatataaggaacctgaatgcgtcgtgtggaaaaggaggtccgtattctgggacctggagtactgggcacatttagaatgccgccacagcatagatgtcatgcacgtggagaaaaatgtatgcgacagcgtgctggggttgttgatgaacattccagagaagacgaaagatggacccaatgcacggaaggacctggaactcatgtctatcagaaaagagttgtggggcaaagatcaagtgtcggcagccgacaagaatggtttcgtgacagtgaccacgcggtgtcgttttgcatgttacaacctgtacaaagacgagttgcataggatgtgccagtgcctgcagggcattaaagtcacatcgaactactcgtcgagcatcaagcatctagttgacatgaagagtcacaagctatctggcatgaagtctcacgacaaccatgtcatactcactcagttacttccagccgcaatcagaggtatcatggagccgcacgtaagggagacaatcatgaagctttctgacttctttgacagcatctcgcagaagtcaatcaccgttagacgatgccagatactgcaggatagtatgatacagattctgtgcgaactcgagatgttcttccctccatcattcttcgatatcatggtccatctaatgatccacatatgcgatgagatcttgtccctagggccctcgttcctgcataacatgtatggctctgaacgatacagcagagttctgaagcgctacgtttgtaacagatcgcgtccggaaggtagcatcatggaaggctttagggcagaagagtgcatcgagttctgcacggattggttggccgatcaaaaatgcaacaagtgcaaggatttaactagaatctggagatgagtttaacccaaaatcccctgaaaactattagatttgtgcttctgagcaccactggattgcctcctaggaggttttaattatttcagatccactaggagtgcagcatatggacattgggatagtgcgaaccaaaccaagagagctgcatttgaacaattatgagaaatagagagatgaaatacagggaaaagggaaatagattgcaactgataagagtgtggcacagatggtttgagaaattggagcgaagggatgcgttggatgtgtaaaggagatattgttggcacgccagatcgagcaatgttgtccactatgatggactgggagtgccggcggctaggcttttgtgttgtgcttgagagaatgggggagtggcatgcatgaagtgggcaggcagctcttgtgtattgggcaaaaggctgcagcccaagtgtgcttaggccttgttgtttccatgtatattggccctctagattttttggagtaaatttattttactttttgtcgaggggagatccgagatttagggtccatgtctaagacatcaagaaaacgttgggcatgctatcttcaagtctgaaatacctcaactacataaccaaactactgacataaacgaaaacggaggccggagatgtattgtccgtgccaaagagcataaaaagattgttgtgcatgtgagttgcttgatgttgtccaaggccacactgcgagacatcagtaatgttaatgtgttactaagttcttattattgcgttggtgtggcttctgtgagctgtgatggaaatactgagaatcctgaaactttttctcaaagaatgacagaatcctgtaacttaccagactgttactactgtgttgtgctagagtttgtttttagaacatacaggatacatcattttattttagatatagtgtattaggctattagctacctagagctgaaaggctctctttgtcttatttaatatcagtggtcaaaattgaccatcctgaggattgtgctgtatgtgtctgtgtgaaaagctcaaatgtggcactttgaaagttccaaatattatgacgagttaatttaaaaatatgtgttatccttgttggaagttgagtgttcatttttggtatagaacctttgaactaaagtttgcgctatagaagaccggaaccaaacgttatttagtaggtaatgggggcatcaaaggttagtttacatggtgcaatccaataaatgatgattctatttttgtctgtagaaatcttctcatgtttcatgaaaatttgatgttttaatatgttaattacagtattgtttgttgcttctgatatacagaaagtggtgaaggctgcgggactgtttgctggatccatctttgtgatgcggaactttggtgaacagatggccattttaggctgcgtgtagttgagaagggtagtggtttccttacattttcctttgtctgccttgttatcaggcttttggaatgttacccagatttaaagcatttctggttatggctatgggacagttcttttcctataactgttgagcacttgcttgtatttgataaattcagactgttgttagaattttctattcatcgacatggtacacgccttacaagcttccgattgtgtcaaattgttggtctctacttataatttctgtctggaactcgtggccaacgagttgaggtttgggattgcagtgctgataaataaatactcctatatattttctgagtgcacataggcaatctgtcatgtcaactcacgaaacgagctcgggcatgcgttcagaatgttaatttatgactagatatgcaaccaccgaactttatctgcacatttcagaagctagtatttacaaatattattaagatgacgtgtagataaaacatatgttgactgagttcagacttcacagtatctttcaagtgcacagtgtccatcaggcagggagcgtttcagcatcaaacaggatggggtcacccagcggtcctatcctacgactacgatacagccggagttaaatcagcgttgtccattgaccgctgaaaattttgactaacttgtcagtgtattttgtgttggtccagcgaaattgcaactcccatcaacttcattccctcttcaggcataaagaaagaaaccacgcggtggagtctcaaagagaagtctatggagaaataaaaataaagctgggggtgtccaaggaatattccaaggcaggccaggcaagctgctgcttttaaaagctcatcgccagttcacgagcaagaagggaggggaagggaggaccgaaggaggcacctagcagaatcgccatggcttctctctgtaagcacgaatatatacctctctctctttgaagccttattcacctcattttctttgcacttcgcatcatctccctctcctcggcagcattagttcggttataatcatatgagatactcagtatccgaattagcagctgacttgtagttccttttctgtaagttagcgctgatgtactcttgcccacgtaagctttacttgatacttatccttttgaagctgcaaagttgaatttcggaagaattagcttgtccatgtattgctactaggctgagaatgcaaagttcctctttctgttcaactgaatcagaaactcatgtagttcgatctgtcttgaatagttacagttactgacggccgagtgccatctttgacagggcgcatctctgtcatcatccttgtacttcttggaggatccaatgccaatccagctgcccctcctcgcctggatgtaaaccacaagaggccactacagacattcagacctttgaacattgcccacaggggttccagtggcgaaatacccgaagagaccactgctgcctatttggtacctacaatttattccttgattactaacaccgaaattttctcaagtaatttatagataaattgatatcgtccattccaattaattaaataaagtgataccaccatcgtatctgtagatggatagattaatgacacatgaaactcaactttactagtattgacctcattagtttacattgtccaagaagactccattccaactaaataaatgaagtgatatccccatagtatctgaatacatttaatgactccattccaactacattagtttacattgtccaggaagactataatcttttttatggtaacactgtcacatgcccaaccataataaaaggaattatatgttaaagtggtatcttggagatcatgtccagattattacttgtatgttacacttgtactgttagagattctttgaagactgaaatccaatatcttaatccaaacctgaatatgtgcattggttcttgcagagggctattgaggaaggtgcagacttcatagagactgatatacttgcatcaaaggacgggcatctgatatgttttcatgatgtaaccttggatgccacgactaatatcgcagaacacacagagttagctggcaggaagagaacctatgaagtcgaaggagcaaatatgactggatggtttgtcggtatgcaaaactgtgaccacctctttctgttactattcctaattttgtggctgtgaatgtacttttgactttggagttctattggcttccagttgattttactttaagtgaattgaaatcgctgtgggtgaaccaacgggcaaaattcagagatcaacagtacaatggtaatactttgtcttctctgtttcttgcattcttagttttattgcattacactgccttaaatactccttatcttcatatcagttgtcaaatgaaatcaggttactctcagtcgcatgtaattcagatgtcttgatctttataaattgccctaataataatgttcttaaacctttttccattgcaactgctgataatgttgtcctactgtattgcagggaagtacaagattattacatttgatgaatatatcttgattgcactctttgctaatagggtggtgggcatatacccagagatcaagaatcctattttcattaaccagcatgtaggtgacttgaacctgatcaactcctgagaacagtttgtttactcaaaagaatggaaactttaatgtcgacataattctatattaattccaaaatatgattattgaataatgatgtaggtcaagtggtcaggtggcaagaaatttgaggataagtttgtcgagacgcttctcaagtatggctaccaaggcgaatacatgtctgaacattggctcaagcaaccactgttcatccaatcttttgctccagcttcgctcatttacatctcaaacatgacaaactccccaaaacttttactaatagacgacaccacggttcgaactcaagataccaaccaggtaaaatcagagtattactgtttttgaccaagttcatcacccaaaacaacttgtttacaaaaaaactttccaacaagcagtcctacaaggagataacatcgaatggttatctctcgttcataaggaagtatgtaattgggatcggaccatggaaggatacaattgtccccgcaaaggataaccacttaggcccgccaactgatctagtcgcacgagcgcatgctctgaatcttcaggtgagtgatctttgataacaacggcatatgtacctctattacatactggatgccaagtaattggtcttaaatggtagtagcatgctaaatcgtgatgccttgcaggtccatccatacacattcagaaacgagaacttatt

SEQ ID NO: 2184 - DNA, 758 bp, Brachypodium distachyon
  Intron number 4 from transcript Bradi4g24170.2 (locus Brad i4g24170) derived from phytozome v7.0 (chr-ID Bd4; pos 292 75637 to 29276394)
agaaggtaaggctgtgtagtcttctgtagtcttctgttgtttttttatatagcatggtgatcgtgcaaagaggtttagtttgtctatgttgactaagtaagcctaatagactcattttaaaagtacaatccagactctacaattgtcttcttgggttgatttaggataatgaaatgtgacactgattattgctttatttttgtgtgatgcaaatggtattaacttgaagtcatggttctaattgcgctagatgtttatcagtgttaatatttaaattatcacagtttcatcggttataggtatgcaatgacatgtatgactaactgaagtcattatgagctaagatatgtttcagattattgagcctttaaattcaaaagatacttgagctgttcttagtagctattttgagaattgtttcattctgttgaagttttcctcccaagagattttgttccacattcatgcttgaatttgcttttcacgtaaagaacttagctttaaatggttcttatgcaaacttaatttgttcttgagttcttagtaattgtgttaacattcattttgtgatattcaagctgccctccatgattttgatttgttccctactcctgcttgaatttgcttggcatgttaagatttacttaatacacaatggtttttatgcaacttaggtacactgagattttgttgtatgctcatgtgattcctttagtttgacttttggtcattggtctcaacacaatgaaattttgcag

SEQ ID NO: 2185 - DNA, 3176 bp, Brachypodium distachyon
  Intron number 1 from transcript Bradi2g33910.1 (locus Brad i2g33910) derived from phytozome v7.0 (chr-ID Bd2; pos 339 78795 to 33981970)
cgccgcgcatccctcggcggccgatctcgtcactggtgagtagttctctgctcggttcgggagtgatatgtgatgctttccgtttgaaatctgatacaatgttgaggagttggactgttggagccttcatggaattggggtgaataggaattccttgtttgctcaaatgggctagccattgctctgaggaagtcaaatcttgtttgggtacaagtgtacaacctttctgcctgctctaaaccggccagactggcagaatgctaatccctgttttgaaatggtcttgtcaaatcagtaggttctgtgttcatctctacgagagtgtgagttacacgcgtaagatggatttccagtaaaactgtactatgtgtttttggatcataaaattattcgtcatttgaaccacgccaatgcttgagctcttgggctttgtttgttcagtgtcgttaaatattaatcatccaacattgactgctatgcttcttccagaattaagttttacatgtttttcatttcctgtgtaatcatggttgtgaaatttcccaattgagttggcatgcactaagcgcttgcggcaccagaaagaacatttttcttagtttcaatgtgaggatgttgtgaatcatgtagtattgattgaatgaactgattggtgcttcggtaccttcacttacgggctggtgtaggatttaagtggagagaaaactgcatctagcttgatacgatgagcgcatagaaccaattagtcactctcataaatgttctactccctccaatccatattaattgtcgaaatattacatgtttctatacgcgttttaggcatagatacatctaagtttgggcaaatttgagacaattaatatggatcggagggagtattatagttctgatttgtggtattgattataaatgcgtagtacatcctttttgtcttacaaaagatgctatttttaaattgattgatcatatgatgttatttgcatgtttttgtgtggtcacatctcttaggagcatttcaaaatttgaaggttgtagaagtagcatactagcatgccattggtcatttgaaaagcaaagcacaaaagtcaagtttgtgcacacatacatatatacccactacccactcttctacatgcacacacatctgttatataattaaaacaataggaaaacaagccacaacgttcatccgcacaggctaaattatctggactgttaatgacaaataaatacactttgtttgttgggtgacagggagtagtccaagtttaggcgctaagatgcagtttgtgtgggtgtagtaaacggcagaactggcttaagaaaagaggcggaacaaatgctctgttcctatcagagcatgctacgcactggggagtggggatatgtattaccatcgataatgtcacagatgatgtcatcaagacattgagttcactattgctatctcacttcatatattcttcaactggatcttgaacatggcgatctgtatctctctcttgagcatggtaaactataacttcacaaattagaaatttgatgaatttcactcatgtagtcttctgcagtttttcaaaaatcagtatatagaataaatctgcccaacaatggtggtgaactggtgatgatatattataactgttaaggctatgcaaaattgcaagttggaatctgtgaatgtcatggtggatcctaattactccctccgatccataataagtgtcttggtcatgcaaagccacaattccatctagaatacgctatgaatatcacaaccttgcagtgacggttgaagcttgcgacgctaaaaaaagtgagatgtgagaggacaaaaaagcctttacatgtgacgctaaaagacctcactctgcatcttttcaagcccacgatctggaaaatagcctgtcggttcaaaatgagtcaaacagcgacaattgcataagaagctttcgagttgaaaaccaacaatgagcgaattcttatgcggactacttgtgttattaggtgggtagaacaaaccatctaatgaaataaaaagcactgtatgaagtccacaaataactaaatttaaaatatttcatgcgaaaacttagcaattggatttataaacaaaatttaacctaaattagaaatgtacaaagtcaatctgacttcaatcccttattcagtatgtagcggtggataactggcgccaagataacctgcttcaacagtgtgaaaagaggtcaacatgagtagaatagggatggactgaggcataaatgacttcttgtatgttcactagcaagagtttgctatggttggaggtgacatagaaagggtagattggaaagaataaatcttataaggagtgcgtacatataatacatgacattgggcaagacgaatcggcagactaatgtgtacaagcgagagtgtatcatgtgaagggagcaaaatgatggtgtgggtgcaggtgcagcaattaaggttggaagcacttcatcaaagtgttataagatgtttcagttttgtagaacattatgagcatgatgaaagtaacaaacaatgtttaccactttcttatgaatatatactgatagatatattgtttttaattggccaagcgataatggctattagattaagatgaccatgtgcgaaagcatctacatgctactatagtggcagtttcaactaattaccaacttgcacatgtgtaaatatactaactgcacagtatattttgaccacaagcttgtctatctactacctccgtttaggtttataagcccatgtgtatccctagatcatcaatttgactaaccaaacataagttatatgacaaagaaaagtatatcactataaagtgctttcaaatacgaatctaatgggtttttttttttgtgtaacatacttagttgatcaaattgatgatctaggaatacatgtgggtcttataaacctaaatggaagtagtataattttaaatgcgcacctaagatctatgatgtgttaaatatggaaacacataattgtaagaacactatgaaatctagccgtgcaaatgcacggatcagccagctagtttctgttaaagtatattttactttttatcattcaatttgtttatgttatacctgatgatttcacaatcttgaataatatatggcattgttcatacagataga

SEQ ID NO: 2186 - DNA, 1383 bp, Brachypodium distachyon
  Intron number 2 from transcript Bradi4g28870.2 (locus Brad i4g28870) derived from phytozome v7.0 (chr-ID Bd4; pos 342 63474 to 34264856 reverse strand)
ccggtttctacagcagggccagctcaaggtgcgcaatgcattgttatgttgcctatcagtattcttaactggttactattttcccctctgtgcatgacaatcaaagagattttaacacgagacattgtcttcgctcggagcaatgagaaacagagacattttacaaaagaaaaacttgctcttttgatgctgaggttttacacacgcccaagcgtgtacagcaagattttcagccttccccttccccatgttggtcgcaattatgaccaggagtcagaactagcaactttttttactaaagagagcaaaagcagtaagtaagtagtagctgtgactggaaccaaaatcaagttagcttaggtgccatatcattattcagtagaacaagatctgtcactttcaggccagtaaatgtcagatctagggtaactgcagagcagtgatagctccaggaggaaataaatgtaaaggtctgcttgagtgctgacatcctagcaatgctgctatagtgccattcctattcctcactctctgcatttgcaggttgctgaaatgtgcagcaagaacaacgaatgcagtttctaagtatttatctgcctcggactacagccactactactacaacagtttcacaaaataaaacactagtctaagcagcaagaatagctaaggaagattctgcacaaatcactattcttaagtagctactaattaggattctcagattacagacactttatttctagagcagtccagaaataaaatacaagtctaaacaccttaaatatatatcctaagaggactaaaattacccatccaaagagggaattgtaagaaaaaactatcttctgcattgccatacccaacactgcgttgactgcattaggacatttattttggttgacaatttggcattggtcctagttttatttattacagtgctgttgtaaaatgggtaatgctttaaacttaagtacttgagtacgaatgaggactagtgggtaatttaatagtagcataaataaaaacaagcagatactgcatttagtttgcatttaagtgttcagatttggtagtgcaaagaagtaactgacctgacagaaacacgtgctttgttctctcaacataattaaaaccatataaaagaatagctcatgttccatgctggaatcacacagcttcatacttgggcctatcaataattctttgaagctatagcaactatgttagttaagcaaagctgccaaaaaccaaaccccagtacttttcagagcaacttgaagtttgaatcaagaattggctcaccagatatataactgataagcatgctagatattcctgctaacataccttgtgtttcttggaccaacagcttcgtccagg

SEQ ID NO: 2187 - DNA, 2242 bp, Brachypodium distachyon
  Intron number 3 from transcript Bradi2g47460.2 (locus Brad i2g47460) derived from phytozome v7.0 (chr-ID Bd2; pos 478 11282 to 47813523)
aaattattgtagcaccaaataggtaaatacgcaaggagcaacttgttttgattttattaatcttgcccctgttgaatatgtgcatattggcaaccagatgctcccacgagaagtttcgacgggatttgccgttgtgaatttgattattgccttccagaagttctttgacttctgctggctattcatgtctgtcttatttgaaaacctaatgcacaacagaacaaatcaagaataaaacagatatctatcttgaaggtgttcaataatatagttctcttcagtggtaccttgtcctcagcaggctagagtacacagaacatgtaaatggtgtgcattggcacttcaatccaggtggcattgttgatcgagaaaattatatgcaaataaagtaccgtgcttatagtaatagttgtcaaaatagaactgctcataaatatcgataacagttaaactgatggttcaactcttgtaggagaagattatgaaagtaaacactaaacaaaatatattatatagtaaaagtacatgactggctaaccaggaaaaatatgagttagaaattctcaccaaaaagaaacatctagcctttaatctggtgggtccacactaacagaagacgaccgttagatctttataaccacatatcccagattataatcaatagaatcacaaacgataggtggtgtgttctcgataagctgtctattctcatgaacttcccagggttcatattaaggcttgagatggatggtttgtagtctccgcaacgtgaaccttcgccacatctgtcgtccatgttgctcctggagatggtgaaagcttggcatgaattagtggatgccatgctgtcacacgcacgatgatgagagcctgcttaattcgtcaggccgtcccgctgcaaataccctgttgctgatgtcccctgccctttggtgtagtgatctgtacaaccttcttttgattcaattcaccttagctacatatctgaattactggtttcatgatgttctaattttctgtagcttgctaggaatcctaattagtcccgctattgttcttcccttagccgattcagaggtttgatcataatggattagcacttaatctatgactttttactgtgcaaactgctgtattagagctacgggatacaaaactctaatcaggatggggccgattcagaggtttgatcataacggattagcacttaatcgatgaatttttactgtgcaaactgctgtattagagctacgagatacaaaactctaatcaggatgggttagcaaaaagaagcaattgtttgtgcatcataccctgtcaagaattgggacgttctccatgtagttagccgtcgtggcatcaccgcttgcggtgatcttcccgtggctgcggctagtgtgagctttgtctccaacaaggttgctcggtggtattttgtgaaatctgtgagcttttgtctccaataagttatgttataattaattaaactggtatttatatgagttaccaacatgtcttttggtcattagtgtataaacattatctgtttgtttgctgtgaaatactagtagtaaactaatggtttgtattgtaatctgcacctctagttctgagtggtgcacttgaatagatgcagtagtaacgttgtcaggatgtttgatgctagtatgcttttgaacctgctgcacacagttgtctggttacttgaacttacattagggatattagtaacacgtcacacgtgtgttgctcatacaaataataagttaataacatgtctatgctgacttgcatttttatcaccaaagtacaactcctgcgtccataactatttacggtagtaatggtaaattgttaatgttgtagaattatatactccctccattccacaatacaacttgtatagatttgtgcacttggaccaacgcagatctcgtttcctgtgactgaccactcatattgggttaataataaatggatgtgagtagttattgaccgggtgcgggtaccaagagaaaaatgaggtgtattgtggaacaaatgagaaaaatctatatacgttgtattgtggagtggaaggagaatgttactttgtccattcagatactaccagaattgttaatggtaaatttcatgatttgttgaggaaacagaaaatgtgtcatgtccttttactttcttgagcaaccttgttattagatctgatcaatttaacttgtctgcagttgactcttcgcggtga

SEQ ID NO: 2188 - DNA, 4439 bp, Brachypodium distachyon
  Intron number 4 from transcript Bradi2g08900.1 (locus Brad i2g08900) derived from phytozome v7.0 (chr-ID Bd2; pos 721 3062 to 7217500)
cttgacattgtagctctggaaaagggtacgtgctgaaaatacattctactacgttggctgaatacttcctcactatactgggatagctcggttcaagtttgattaaatgttctattacatattccaaattacaatagccaaggagcacctagttaagtgctaggccaagcattaatgcagcatgcattgacacctctccttcatgtattggttggttccacattgggaaccaaaattacacacaaattagtgtagatgtaactagctttgcctattcccaaagcaaatgggcttacaaactgaaattggatttttgagatgtgcctaataagctgaaaaggagggagtacttattttgtcattctgataccgcctgtgattttgtgatgcctatctgtaacacaacaacctttgttcaggctagtacaatgcccgtgcattgcaacggaacaacaaatcaattatatataaacactgataaaaaaatcagtatagttcacaaatgattatattgcttgtggcttatagttcaaatgattataatgcccgtgcatttgcttcctatatatggtgattaccgcacataatgcacataaatattcaaactaatttcaaatttctatcaaaggatctacacttttgatttgatcatcatacatgatacgccagtttccataccctgaggagagccttcccagtttccatcacaaaacctgtatcagtatttccaattccagttgcaaattgaccaattgctccagcattgcctgtgtgatctataaagcaattggtgccggttaatactttacaataaaacctcaagccgcttctagtacttgcaatcagtgcaataccttgcctggtgggaagtgatcttctcgggcaagctcaatgtggcaaagaactctgtagtctgggactctgggtttccctacaaaccccccaaaaatgtaaccctctctccagaaacttaggacctttttggatttgctatgacagttcacagaaccacatcatgcaaaagaacaatatttttttttcataaatcctgcaggtattcaaatgaattcctttcaaacctgtcctgctataaagggggcttatccctgaatcctaaatcagattctatgtcattcattttaaacaaagaagtcatactttaacacgatattctccaggtgcatatatatagtacatagtaccaacaataactattggaaccgtgaggtgaaaaataataatcaggaatcctgtaattcatgtagacctctaaatcaatttttgaggtgaaaaggaaacctcaatgcaggagcaagtcagatgaaatcttgatgcaactgtcacaatcatcaataaatctgaaactaaaccaatgaatatgtaagaccatgacatcgaagaagctaaaatcccaattgtagatggatcttgagaaactccaaaatgcaagactaccagtcatccgcccgtttgtttatgatgagtatgtgcaacgaaaatgggatcaaaagatcaatcatatttcaacatgggaaacaactacggggagaaattaccggaatcaataaacttgccacgacactacaaaaatgaagatgagttacatacagactacaaaagtgtggcaggaaaaataatagaaatatcttaaggaaaggtacatattatacaagtttatttattgctaaaatggtacataagtgtaaagcaggaaagataatatatatataggcatatatatatatatatatatataggcatatatatatatatataggcatatatgtatatctgacacctccataaataatattgactgaacaacccaaagactcaggctaactgaatttaaaacagatatgtatttgataggatcaagtggctaacacatcaccaaccaatcaaccatggcatcggtttccataacaaaatttcagaacttggtctagcaagaaaacaatagaataataataatagataaaggtatactccatatctatagcatcaattatctctaggagaagaaaggatttggattttggagtatagataattccagaactgttttcttatcagtcaaatgtcgagcagcccaaacttgctgttagaaactgatgaaagctcttccttatgaccattcaaaaccattaagcaagaaaaccattggattaacctgaattaatcaggaaacaattctcttgtgagatggacaggaataaagaaatccatggcacaaccattggttgcttacagatcagctgatatcttaattaatcgagtgaattccattttttaccccctctttcaatttttttcacacaatctaccccatttaagggaattttcaaaattataccccatttaaccaaacctttgccactgattgccccttttattattttttccccaaatctgaaattttctgagggatggggcccacttatcaggttgacgtggcgtgccacgctggactttggagtcgaaccggaccggggcaggctctggttcggttctgttcaggctccggttgggccacgatttgggcccgacggcatccagcaaatcaggcgttcgcgcaccaggtcgctcatctctctccctcgctcgtctctctctctctctctctctctctctctcgctgtcgatcaggttaggtctagggttaggcggtggctgcctggcgtgggaggaaggcacggacgaagtcgctggggagcaagagcccgctcgcggatggcgcggatgaagtcgccggccaaacatctgcccccttccctcttcctttccctgtgctcgagcgatttgtggattccattggtgatttggggattttttaggattttggggtttccagtgcttaaatcgtgctcttgcagtgttcaatttgtgctgaatgtactcttgatttagggctttgtgaaacaccggcaattcttctgtgggtgagaaaagcgtcctggggttatccctgtggctggctgctgccagaaagaaccgaggaggaaaaggtgtatgagatttcgagggaactgcaaatgctgaagaaagaattgctgcagtaggctccgtgtttgtggttgtctatgtcttgaagaaaacaatatgctgaatgctgctgtatagctccagatgccgtgttttgttttgtttttgtgtataggcttgtgttgccagactggaccggaccggtctgtttgacccccaaagtccagcatggcatgccatgtcagcctgtaaagtgggccccgcccatcagaaaacgtcagatttgagaaaaaatattaaaatatcagaaaagtccagcgcgagaaggtatacgaacctgctgccggtcttgcaactgtctttgcccccaaggccggcgctgcggaataccttggatccaaactggcagacaatctgagggggtgaatcggttctgcagcacaccgccggcggagacgatgagggggaggcgcagcaggtgtagtgggggggggggggatgaggaggtgcggcggccggagcaaggtatgagaggggcgccggcgacatgaagagggggagaagtggaggcgcagcggttggagagcatgagatggccgtttttgttttttcttgtgatgcgtggattcggagggatgggaggggtcccacagcagttggaggaagtgagggccggcggggctgtgggaggagcagcggcagcagctccgattgcagtggcaggtagatcagcggcagcggcggcgagtggatctcgtgagtaggcagagggcgaaggaagagacgttcggtctcggtgggaatgatctgagacgttgatagaatttagatccgacggtgagggatgggtaaactgtgtgtttatagtagtagagaacttggggagaatggcaactgtcaatagcttacctaacacaggctttgtccttgatgaagttttaataatcagcactgcccgccgaattctatatgcctatgcgcactgctggtgtgctgttcttgatgactgatttggcaaaatgtcttagctagactatagtattctgttcattgatagaaaattctggtttcaactaccactcctgtatcagcaatcttgactccagtacttctgtgccgcacaaactattgtcctttattactactgtttgttcccttcctggatagttgatagaggacattgctgcattttcttccctcttgcagtcgtagacatgcttaagaaagttggtacatcacctcgacaatatgggatggataacgtcattccgctacatataatcaactttagtagcaatcttttatgtttgcatctacatgctccattgaacttgtgaagaatcgttttcaattaaattagcaagcgtctttttttttgccatgatagcacaagttcattaaagttttaagttacctcaaatactttgttgcctattcaattttcacaggtgctg

SEQ ID NO: 2189 - DNA, 895 bp, Brachypodium distachyon
  Intron number 14 from transcript Bradi2g58700.1 (locus Bra di2g58700) derived from phytozome v7.0 (chr-ID Bd2; pos 56 516509 to 56517403 reverse strand)
cgtaccttcatcgtgacacacaattatttcagaaggtaacgtaaaatattttactgttgaattcttcttgtattagtacctgctcactatcctgctgtcctaatttttatccctggagattttctccagtgcatctaggtcatttattgttgatttgttttagacattctgtataaactacgaagaataccatgaccaaggatcttctgtttcatcagtcgttttgaattatgatgaccaggattttgcttcctctcttgtgttgccgtaataaattaagaagccaaaaatgccatccatggtacaattcagcattttggaactggtgctcacatgcaagaggcaaaaatgccatccatgatataatgcagcgttttggaactggtgctcacatgcactgactatatctgctgagcatgcatcatagcgtgggcaagggggcagcggtgttgtccaatgctctgacatgtatatactgaccacatgatgctgaaactcaatggcagcagatagccagtgaatgtgggcatctcttccatcaagacttggtgtgcttgttacataaagaatatatttccagcttatagcaaaaaagatttattactccctccggccggatttacttatcgaaacattacatgtatctagaccctttttaaacatagatacattcatatttgagcaaatttaagagaagtaatatgggtcggagggagtacatttgtttagaatccatttggtcaggtccaatgactggatacctttgcttgcaattatgcagtttcacatggagcctgttgatggcaaatattgttgggtgttgtttacttaatggcccatttggtatgtttacttttcaggtttgcagagtgctaaaagtgtaccacgtctcatc

SEQ ID NO: 2190 - DNA, 1085 bp, Brachypodium distachyon
  Intron number 7 from transcript Bradi3g16190.1 (locus Brad i3g16190) derived from phytozome v7.0 (chr-ID Bd3; pos 143 38257 to 14339341 reverse strand)
ttacgtctccaataaggttttctttagaacactacctgtttatatcttgttttttttcttcttattattatccttctcattttgattcggtttgttggtagctgaagcaatggaattctgcatgtcagaacgacaatgatagctgagctcctctgatagtgctcctctagtctaaaagacatctgatgtatagcgtgtagtgtagattggagcttgtgctccctccatgagcctgaatgccaaggaacttatcatctgctgctgtttgttgtgttctgtatcttctttggcctatgtgtgctttgctcaggtccctggggaaagttctggttccactgttctccctgattctcagtttgtgtaccaaattgccatagcaaaactccactaaaaatatgtgtgtgtttatcaaaaaattttatgatcgttcaaagttagatgaaatttgacatagacagccacgaacgtacagacatttagaaacaaaagagaatactcggaaagaagggagtaatattaccttcgttccttaaattagatgtatatattgttttctttgaccaagatttagtatattaatatatatttttgaaataaaattgatgtaattggaaagtattatgatttatatcacatagtaattcacacattgatggagtaatttttggtcaaacgctcggtcaaaggaaacaatatatgacttaatttaaggaaccgagggagtactgctcaaggtatccatctttataatacattctttgaatttgaatttgagtcgacgagacgactggtttattcagaaatttcaagctcctcgaaaagacgaaagttcaatcaatttcacgctacccagaccgaaagttcattgcacgagtgatgatctttaaaaataaaataaatgaatacgctttgattggaagtgtgaatgccacgcgcctctgcaatctactccacatcactgagtctgagaggccacaagctcgtctcagccacagcatctccatccatccaaatggcatggcaaccaccatctcaatcttcctcttccgccacaccatcaccagccatccccccaccccaacgcc

SEQ ID NO: 2191 - DNA, 935 bp, Brachypodium distachyon
  Intron number 3 from transcript Bradi3g36620.3 (locus Brad i3g36620) derived from phytozome v7.0 (chr-ID Bd3; pos 390 06854 to 39007788)
gcttcaatcggcatcacagttttcgcagatctcaggtgagtatgcaattgtgatgtagtttcaacacatgtaattactttcatgagttcagtaaatgtagttttaacatatgtagttacttccatgagttcggtagatgtagttttaatgttaagagttactttcctgattgttttagatgtaattgtgacgttcaaagttacatctacttgtgaacttggacaaagtaaattttagtagatgtgtggaattacttttcaagctactaggattggttgtacttttttctacgtgattcattggatttagttttgtagtcagtagaggtaattatgtgtgcacacgatgtaattctcttactcatatgtactccctccgtttcgtaaaggttggcacggctttgaactagctctagttcaaagttgtgtcaagctttatgaaatggagagagtaactttttagttagtctgtttttttcttctgtgctttaacttttgaagcatggctagtgatatcgaactaccatgctctgcttgtggttataagtgaactgcctgaaatctaatgtgcattttcttgctccttgcttattacatgtactgtatatatatgcttttcggtggatgtagttcttgtaattgttagaagtaaatttttggttaagttcaagtttgggtcatgtccagttattgttagcatttgaagtgtagaaaagtaccaagcacgacagctaagtgtttttcatacataaaagcttctttgaaacacatcagattctgaattttacatcctgatactctagattatgttctaaaatgatcgtaaattaagttttgttactctatccgcagaacctatatctcagtgttactaattttggggagatgatttgtttgccaggtttcaagtcaggtgggtgcacaaagctggacaag

SEQ ID NO: 2192 - DNA, 2349 bp, Brachypodium distachyon
  Intron number 1 from transcript Bradi2g55810.1 (locus Brad i2g55810) derived from phytozome v7.0 (chr-ID Bd2; pos 542 90485 to 54292833 reverse strand)
ccaggcgcgcgacctcccctccgacccgtacccaggtgacgacaggggagcgatttggtttgttgttttcgctttgaaaagtttatccagaattccagatcgcctgcctgctgcattcacatcagattgggttaaatttagctgtctttcgcaattccgttatgtgttagagaactttagtttcgagggctgacgcttatgtactgtagggctcttcgtttagctgttagatttagaatatctggtgacgggtagaaaccgcacaaattctaggtatccttatgcagagtcttaggttcccggatcacgggtcatgggaattttgtaatttagtgtttgtagcggagaatttgttggatgcataacctggttcgttttctgatatttactcctctgcaatgcacttcccttaatactccgtaggaggcaattatgtcctgctatatgtctggagctagtcatgagaaacttcgacccaaattagtagtgttgaggattgtttagtgaattattctggagaattcactcaatcctttattataccagctcactggggtgtaattaattggtccattctagcatctctttgtgggttttctttgaaaaactgcctttaagatacggtggtaggcttggctgaaactgtggatcctcaacttcatcagatctctgtgttgcaaccttttttgacacaatccatcgatttccatgagaaaacagccacagcatccttacagaacagagtcttaaacgaaatcgaatacgaaacacacaaaggtctggagcaaacacactgcccagagagtttaaaaagcaggcttggccaattacagaccaaatggagcctgtaaaacggctaaacagatctccagagcaaaataaaagagcaaatcttcatcatccagcaatccttctgctaacaggaacccagccatatcctctcgcatatgctttgagcaccaccgtcttgatcatagctacaaccgctgcaagtttcttcgccttgtttctttctgcaatagagcacaggaagtgatattgttatacatgctaaagatcagagtcgatgggtcacttccagataacagccgcagctccgccaagcatgacctttcgatgctctggcacaaaattagagtaccaagctcccaacacatcagcaatgtcagtggtagtctattgatgccctgagcacacatcaccacctgccaaacaaatttggacacattgcatttgaacaaaagatgttccactgtttctttttcagcacagaagtggcattgatcattaccaatccagcctcttcgcagcagattatcttttgtcagaatactacttcttaaggtcaaccagagaaagatcttaatcttcaaaaaataaaagaatctttaatttccaaaggaacttgtaacccactaggctgccagttttcagctgcaagtataaagatctaacagagaactgccctttctgtctaataccacttcacagtgtctggttctgcagtcaattcccaattgtttaccatctcacataattcttgccattgatcagctgtctcatcatgcaaaaaaatatatattctaaactggatactgctcaaaagtccgtctttgatctgcttcacaatcacatgtttagtgaaagtggtgttgtacagcctgtgaaattttatagccaatggactttggtctatccaggtatcttcccagaattgtgtcttagctccatctcccactatcccagaagagaattattggaagatatgattaagccccatcagactctgccagaagtgtgaccctccaggctctaatgttgcaacttaatcacataatattcagttataaaaattgcctttgctatgtgttgatagttttgagaaatactactccctctgacccatattaacatattaattgtcgaaatattacatgtatctagacactttttaaacatagatacattcatatttgggcaaatttgagacaagtaatatgggttggagggagtatttaggttttcccatttcatattcgtatcacctatcaagcacaatgccttcttctacccgaattgctttttgtttcatagttcctgctgtccttgtttgtctctttgcctcactacttatagactattgtagttaagttgttatactcgtcgtcacatatcttattcttaagttagtcgatgaaagttgaatcatttgaatgctatttgcctggttgtttacagatctaatgaaatgttaaaacatatgatgtggcttgttaaacatcatatcttgatcgaaatagttgccattttgcagattctccacttagttctactgcatcacctcagtta

SEQ ID NO: 2193 - DNA, 1698 bp, Brachypodium distachyon
  Intron number 1 from transcript Bradi4g13380.1 (locus Brad i4g13380) derived from phytozome v7.0 (chr-ID Bd4; pos 136 61773 to 13663470)
gagaagcgtgaggttattgggcattgtccatgtcaaagcagtgacatctactttgtaccatgcgtgctttctccttggcttccaacaacccggatcccttcggcaggtagtcacttgctcgttcatttgcttcagtttacttgaggttgggtgcatacttctgcagtgaatgaattgtcaccatgttcaggatttgtttatcagtgtccctcccattccttttgggttaaaaacggtccaagttctcacccaaaccatgttattgtcccaaagagataactaagattggaagaatgcttggactagaaaagtaagcaaagatccctatgttgtgctaccctgtccataatatcaggacagaccaggtgctgaatcagttctctctgaccaggcagtcaaccagtttatataaattgtatggttccatgcctttaaagatcaattccttgagctttatgacatcagattaaccctatttgcaatgaacaatctattttggttgataattttgccaactatgtgctaacttaaccctatttgcaatgaacaatctattttggttgataatttggccaacttgcgctagctttgcatttataatgcaggaatagttggatagatcaatcccctttatgttgacaattctaacaatttctacaactagattcccgaataacttttctctgtagaactagataattaatagcaattgtgctatcagccaatgagtattaaagtttccgaagaggtattgtgtaaattgtgattgtttattagttcggtatatgaggaatatagtaagactgtttgtagaaagctgtaaaaaaaagtacaataagacttgaatacttcagaaataagtgtgtgggagagttgatacaagtataaaatttatatactgtttatagaaagtgaaaagacacagagccatatttactccggagtacattaattgtttcggctaatactatgttaagagcatatcatgtgttttttttaatattcttgcaaattctatctttttatatatgctcttaacattagtaggatgtagcaatgctatctttttatatagaaaatggaagcttgtcgtcccaaacttattgcatatagcaatgctatctttttatatagaaaatggaagcttgtcgtcccaaacttattgcatatagcaatgctatctagatgcttatagccaaaattattactatatagcaatgctatctagagctcagttgtacgtagtcctactggtgatcccctttctcttcttgggttaaaaacggtccaagttctcacctaaactatgtttttgcccagagaggtaaccaagatgatatggaagaatggttggactagacaagtaaccaaagatccctatgttgtgcttgtccgtctataatattaggacagagcaagtgctgaaccagttctttctgaccaggcagtcaaccagtttatattaatgtatggttccaggccctttagcttagccaactatgtgcaagctttgtatttataatgcaggaatagttggatagatcaatcccctttatgttgacaattcgaccaatttctacaactagattccctgataactttttctgtagaactagataattaatagcaattgtgatgtcagccggtgagtattaaaggttccgaagaggtattgtgtgattgtttattgttaggtgt

SEQ ID NO: 2194 - DNA, 1933 bp, Brachypodium distachyon
  Intron number 2 from transcript Bradi3g06290.1 (locus Brad i3g06290) derived from phytozome v7.0 (chr-ID Bd3; pos 455 0372 to 4552304 reverse strand)
gtgtctactggggccagctttgggacggatcacaggtgcagtccctctctttacaaataataaatgcaagaatgctgcaacttgcattttgttatgtacacacttgtttgttgtatcttatgttccttgttattattggtacaaagaggagagtgcagtggagggcctgctgtagttgattttattttaactgatttagtttcgccttctaatttatttatggtttctagtggcctttgaaatttaaaatggttgtaagtatcgaagactgcgaatagactttgagaatgaaggcaagccaaacttgacctacactctgaacgtgtgaagaacaaacattcttgtctgggtggagaactgactttttctcaccttcaactattgatttgttttttatgcattcactttaccctaggtaagctggtggagaggtttttttgctcccatttggtaaaatagcagtttttagggataggtaaccgatctgagtaagctggtggagatgctcttaggatcataattttgaggtgggaacacatttgagttacagaaaattagaaagcacatatagcatggatagatacatccacgctatcttgacaaaagagacaactagtcaacttctatacttttgttccaagtattggcctgtaataggagcgaaaatgcaaacaacattttgatagatccatactaatatacaaaaggggtgacttgggaaggacttgataagtaaaaaattaaagaattctttatgaaaggtcacgtgttagttttaccttagataaaatgccccatcatgtgtcagtgtcactgacaggtggttccagacccgatatgttggtgacacatgccatggcattttatcaaaggccaaactaagcatggcgtttttttaagaaatctcaaccatgtttattatgtcagtgctactcactagtttgtggcgcagtggcataagtgcataaccagaaactgctagaagcctattactgtacttggcagcttgtgttttctacaaacatatgaccatattaaagggagttttggtattgtgaaattattttactgaatcgtatggttccattgccagattgaagtcaactaaactcttatcacacttcagattatattagtaagttgggtcgttccattgccagattgaagtcctttcagcaattgatcttgtctagatctagcagcttggaagctccttgctagacatatcaagggtatttcctattctagttttctcaaaccccaccaaaactcatgttattttgtattagaagaggaatgccaagggtaaacctacaaactcaaaagaacagaatcctaatctagccaaaccctaaaagctaacaacaaacagaaaggagaaagaccaaaaccttcgtggtgacatgggtggtatttccttcattttatgactacgccacatatgggatcctgtattcctggcatacggacatgtgcagcaaactctctatttaacattttcttgcaagtgtttggtagtctaagtcgaaacatattacctatattgaattttatcttcacaagttatttagaaataacagtgcatttagcccaagttagtctcctttacagacagattttacttatttttggatgttgtaaccagtgactagtctgctcaagaatttttttgtgtgggatttgatccatcttctccttatcagctagctttttggtacgagtcatcgacattactatgattgtttcatttcactagaagttttaagctgtttcatttcactagaagtgtcatgtagtgactgtcagagtatgcgccttatgtatattccatgtataatcaataaattgcatttcaattcaacatagttagcacctcaactgttcattccatgtaacagattgctgtgaaaaggcttaagagttggagcaacaa

SEQ ID NO: 2195 - DNA, 3000 bp, Brachypodium distachyon
  Intron number 1 from transcript Bradi3g44320.1 (locus Brad i3g44320) derived from phytozome v7.0 (chr-ID Bd3; pos 461 19160 to 46122159 reverse strand)
cagtcctgcggggccgccgcggtctcttccgtccggtgaggtcctagtctctccgtgttatcttccgcctttggtgaatcggtctttatgacttttattaggtgcgacttgagctgtgagagggataaattctagtgatttgaagatctgttgaactgaaaggatcaatcctgctaagtttgccttaagtgttgaccaaatttaggtttagttggcctaggaattatctgattgaaagaacagataattgtaatgttccaatgctaggtaggcgtggaactcaagttgataattatttggaagcctgatgctgattgcagaagagccaaacaggaagttatgctctctaggttgtctgaatgggaggagcctgattcttgaggtgctcttgatgcttttgtagttataatcagggtccttgtttgtctcaagtctcaacgtagggttgcagggttgccttggttgggaagaggaattgccgctgtgttgtttgttcgctcaaacgcttgatgtgtggggcgcatgagagttggtacacgtcataaacttgagttggagaaaaggttcatatgatgtgggctgtctaatgacttcaacgtttaaaggactgaagtgattttcattctattgcttgaatggacacattagttgtagtggttcgcccgaggtttcccaggttgccctcaaggaaatgctcttgcaccaattgatatcctctaatcgtacaaggtccaaggggcactcaggatcatccctcttccctctaccagaagatattccatatgcaccaggaggtcagacacaaccactgttgctgcaatcatcaaccctgtgtgtcaacttgtgccattcctgtcactctatcagtagagcacataaatactttctgaacatggaaagtcaaaagcgtggaatttgaagttggttgctataaacctacttaagtgctctacattggtttactttgtggtttttacctacacgaactaatacacatcatgagtaccattagcgaaggtgctgcagggataggctatatataataaccgagcatgtatggatactgggtacactgtcacttggaagttcctatagcaatcatctgtgctctagtgtctagcaagatctaaccacctacttcttctcagctgcatggcctcttctgtgcatgagctggtcctttgctttgctttgctttgctctatcctctgtggcctctgccctctatcgacaggctcaataacaatatgttattatgttatatgttttcttttgaggcattctaatgagaaagatgagggttttatcatctacatcaccatatacgtaatcttggtggtcataagagattgctccttaattttctgctaacaaagatgacattccaatgatatttactttcaaagtggaattaactatcagatattcttaaactcataatgttcattagaaggaaataatttttttattgtttttgcgaagtttgttggatagcagggaataagagagaactctgatggcttgtgctactgtgagggacacgagagatttttattctctcaatgcacaatttgatggaaatatatgccattcatataatcaggtgttattcaaataggaatatatgacagtctggtacttgtcaccatcatagatttttggttatttgtgataacaattaaatacacatccaatcaataacctcatgcttttacctatggttaaggctgtcaacatagcttgaagtcacatctgcttagttggtgcttgatcacggttgtggatccaaatttgtaaccaagcttgtgataaaataggatcaaatatgtatttttgttacagttttccaaatggaagacccagaatggaaccaagcaacagttttaatatcaacttgtagcttctcattttgaattctagtcaagcacattgtcatagttactaaggctttaaaattcataccatgtctgttttcatgttttatctgttattgagtccttcaagaccagcttgagcctacataagcattatccaagctgatcccaagctcagtgttgagcttgaattagtttgttgagctgcccaatgatccccaaaaataacattagcatctagacgcataccatggcatctagttttactattcgttgtatctgagacacttgacgtgttttaggaatgccagaggcagatacgttcattagacgtgattctgaatctaacatttctttgttatgcaaagtctttctgagtaatagattagcttggcagcgtctggtatttattttattaaagttctgtgtgggagttatctcaatggtttaacacctgctttggaatgctagcagtgcatattctgttttggaaagtctggcttgagtgttccttgctgttaatacctggtattactttatactccctccgttccataattcttgtcgaaatattacatgtatctagacactttttagaaatatatacattcatttttgggcaaatttgagacaagaattttggaacggagggagtagtttttttttgctgataaacacgtgtacttttcttattgtacttatcctgctaatgaaacaaattgatgcttcctggctaatgggggacccgttattaatactaaacttagggccttcatgctttttcttttttaagttgcatgtaattcttgcgcttggcatttcaatttcgtaggatgtgtttcagtaggtagacatgggatcaatttgtacagaagtgctaccccaggatatagatatccaggcctgcgtaaatccgtatacagaagttctacccagatatagatatccaagcccatcgtaaatctgtatagagaagtgctgccaaggatataaatatccagacgggcctgacatgggatcaatttgtgaagtcatatagtccaatggaaaagaaaaccatggatgctaagcctatttattacattgaacaggtcgaagccaagtcttgcatcagttgtggcttgca

SEQ ID NO: 2196 - DNA, 3277 bp, Brachypodium distachyon
  Intron number 1 from transcript Bradi4g29950.1 (locus Brad i4g29950) derived from phytozome v7.0 (chr-ID Bd4; pos 356 45643 to 35648919)
ggtgagccacgccaacgattattatgcccgaatagcttcgaccccctcatgctcatgccctaatgcgtgcgcctttagctgcctttggggatgcttaatgggttgattgttcgaggcggagggctagggtttgttgttggtgactgagtggtatattggtgatgtgagcttttgtatttgtgttttggagtttgaattatttgctcgatttgtctaatggttgctgcaattgtgcaattccgtggatcactagttcgaaaatgaactgttgtcttgtctgatttgtctatgaatgagaattgagtagtgaacacacttgattcacatatagtgcagtggccaaatgggaatgcttaacggtgtaactagtgaggatttgttgctcttagtctagtggattgctcaattggtgcatgtattgctgctattgctcaactccatgggttaattatgcaacgctaatgtaccttctacgaaaacaaagttgatgctccttaattatgcaacactaatgtaccttcgacgaaaacaaagttgatgctccttacctgtagccaatacccagtagagctgtatgaacttctaaaaatggcttcatgtgttcatggcctagtataaacatataatttaggctcgtcttacttagattcattccaattcccttctcatagcttgtggggttaatgtaaaagaaagccaaagttaactgaaatatgaggcatgctgggagtgcaggaatttataacaaatcattaactcccacattcagtattcatacaaaactcctgcattccaaacggaatggaatggttcagacacttttgcacaactgatttattcttctataaaatgtatatatagatgggaatgccagctggctccatgacccttttgcaaaatttcaagctactttatgtgctcaaacagctaaattatcactgttggggtcagtcttagtggaggtgtttgttttattatgcatggtttctttatatagtttcgtccaaaaggagctaccattgcagttcctttatatatgcctgtgaggtcagcatttctatcaaaattgagtttcttaattggtagcacccatttctggtaaacttgtgttttgtgattcattatattctggaggtgatttttgtcttaatttgataaatccgaacggagggattggactgcctcaaacctacgagacgcaattgaaacaacctaaatttgttaaattgagaaatcagatagacatacaagtttgtatttatgttatatgccagctaaaatgtacataactccctttagcacttctattagcataaggaaaagttcacattagtcccttgaagtatcattttttatgttcccttgaagtactgtgtttttccgcttaatgtcttgaatgcttttttgatacacttaactggttaaccctgtgtgttatgtaccagttcagttaacacctgaacccgttcttgcttattagtttctatcgcgtggatgttattactgctacatggctcaccatattaatcggttttaccattgcactttgaagcacacatgtattctaatgccatcatgccaccaagggtgttaattggagccaacaaaagttcacgttgttaaggagccaagcaccacacttcatgggagtaaagtgattttttcctggaatacttacagtcaaggcctctttgatttgcaggaccttgagaacgtaggaataggaacaggaatatgataggaatgcatgtgtgaagcaaaggattgaaaaacacatgaattttgtagatttggtgtttgattcgcagaaataggaaaaaaaaaaggaatcctaataaacacggtcaaattaaagttaaaccaaaagcaaaagtaaagttgcaatgttattgtgccactaaataccattgccttgttctttgtgcaaagggattaaaaaagagatgtccaagtggattgtagtaatcctgtgtttttttgtgtgaaactgagatcaaaggaaaatttcttgtgtttttcatatgctccattcctttgaatcaaacggatgaatagcacccaaaggaatttcctattcctatggttatcctatgaatcaaagaggcgctgaatgctgtgtttgtgtaaatgaggtgtccgaaatggttgaattgaaactcttgtttctaaactgattgactcgaccagaactgtctggagacactagacatatatattgtcggttttatgtacacagagcaagtgcagtgccttctaaagctatcactaccagagttgtctttgctgcctgttagcattgctcaacatggtctataaccctctaaagctaccagagtaactcattttgttgaccatcttctagtaacaagcccatatcatacaagtatatgacagtacatgttgcaatggtcttgatatgggtaagacacccatttgttctgtacattgcctataatgtgcaagtacagtggttcgggaggcatataggaaggttcagcaagctgcaacttgtaaatatttcatagcaggaatctcacatttgactgcttgagatgcacataaacccatacagatgattggcagagtgtttattatactccctccgtcctaaaataagtgacgtggatttgcacaagaatctatacaaatccacgtcacttatttcgggacggagggagtacgaagaacatattttatgtgtcagatgtatctggacttgcagcaataacatctttcttttccccttgagcatcgcatactagtatgatagaatcatatctgtatcatgcagcagtcatgtgcatgtataagagagtgcctattaaaaaggttggtcatgagatgccaacataataacgtccttactctacctgtctttatgtcagttcttaatgagttatctactgaccttaagtccttaacgaaatgttgaattttatggtaaggatcaaccaaagccagtattttcaaatagtgtctgtccctttttagaaaatctagtgtaattgagcaataatgcttaggacaattgtaaagatcactcagttgaaaaatattatccagtgtcactaacatgtaccccgcatgccatcattacactggatggtattcttcgaatttatacttacttgcaatggtactgcgctaatttccccactaccagttcacttccagcgagtaccctaccttcgttttgatgccataggagcttgctgaactttatgtttggtttattccttaaggtacaccgagataagagtggttctagctgagaagg

SEQ ID NO: 2197 - DNA, 2538 bp, Brachypodium distachyon
  Intron number 1 from transcript Bradi5g19310.1 (locus Brad i5g19310) derived from phytozome v7.0 (chr-ID Bd5; pos 223 35886 to 22338423 reverse strand)
ccaacgtcgccttgacgagagagcaaggtaccaacgtacacccaggatcttgaatttatctatctattatatactacaagcaatatgaggggtaccgagaaaagtcaccacgttgatccacatcatcaaaattatttaaaaaaaaccgaatcagatgaggttgattgcgaatgaccacgcgcatcacggccaggccgcgcctggagtcctcgcggatgaccagcggagtccaacccagcccaacacatgcatggtatgttaggccgttagctttgacctttgatttaaaaaaagtgcaacacgtcagtaaaaaacatgtgacgtggtggcctctcaaagaaaaacgaatccaggtccaaaaatattactaactccgtctcatattaaatgactcactctctccgtcccatattaactgacaaaatattacgtgttattatgtgacaaaatattacgtgtctctagacgctttctaggtatacatacgttcatattttaggcaaattttagtcacttaatacgaaacggataaagtataaaaaatgggtgaaaccgagtccgggacgacatgtattaaagaaaaccattaaattctaagaagggatgaagaccatctagaactaatatgatgcgttttttctttgagccggaaaatgatttccattactgaatgggccgagcaagatcgtcggacaccaagtcatgtacgaaggcatgagcaatatgatgtggttagtgttaagtcaatattaaatgagacataatattggtccagggcctaggtcatatatgttgcagttagttttatacgatcaacatttacgacctcttaggtctattttccgttgtttcttcaataattgtgggaacattactcaggaaatatctttatatatctataatatttcgactcgcatagatatatacatatgtattgttggattatttcaaaagcccaacaattaaatgataagcacgcgtgtgtcatttatttgtgctattagaccagtatggaaacaaaatttgcatcccagaccacaagcatgttgattgttagaaacgcaaaattagtggaccacactacacatatatagttatacactcaagtagagaggacatatattaaacaaaaccatcaaattctatgaggggattaagaccacctgcagttagtgttaagtcaatattaaatgagacaccaaattggtctagggcctaggtcatatatgttgcggttagtgttagctctgttagacgatcaacatttacgacctctcaagtttatttctcgttgttttttcaataatcatggggatattaagtagtaaacttagctccacccgtcatattatttatcattgtagggatgagttattagtgggtcccacataatcgatcgggaaacatctttgtacatttataatatttgactcacagagatatatatatttatagttgtattaattcaaaagccaacgaataaatgatatgcatatgtgtcatttgtatgtgctataacacaagcatggttgattgttagaaacgcaaaattagtagaccgcactacacatatatactcaagtaaagttcgcagaatgcatctatatagtcagagctaaaaaaatcttacattgagaaacgtagaataaactaaacacgctacacctacaagttcggaagtatatcatgttttgaatatgacacaacattttatttttatgtggttttagattgtatgtatattaatgctaaaaaattgattgcgtggaacttggccttaaattttaagcctggctactaactaatatcatgtatgactaaatgacttgctagagaaccaaacacgatcttatagtattgtacatagaaaacaaacgagtagctcaaatgatctatactttaattagtatcgatatagaataatcatgtagaactttaattttgcattatgatttattatcacgaaaaccccaaatacattttggcatacacatggctatttgtacgaacaaccgatctaccaattctgcatgtgaacttgaactttgtttagacgtatatcacgcgtgatcaactgttaggtcaagaccagcaaatgatgggtatctgaattttaattacaaatactaagctaatatcacctacaatcaattagtaacgatctaaccttcagttcttgagttcaatataaaatcacatacatataaaagattctctcaaattcaaaataaatttgacacaatgtactttttttgtacatctataggggttgtgattgattaattctgcttttccaggtacaatggggtttgattaatcatgtttttctaacgacctaaatgtaaaccgcatagcaatacaaaataatgaggcttaagatgtttcccgcgcaaacgccatgctagttcttgatcaaaagttcaaaacaccaacatcctggttttcttacatggcaatctcgacctgatgtacgttgcctcgttggcttctattctggttgcaggcactgcctctggatcctgggcaacgcgacgaccc

SEQ ID NO: 2198 - DNA, 3839 bp, Brachypodium distachyon
  Intron number 1 from transcript Bradi3g24650.1 (locus Brad i3g24650) derived from phytozome v7.0 (chr-ID Bd3; pos 242 16007 to 24219845)
aatacgatcacatcgtcccgttctccaaaggtgtcttttcttttccgccagaaaacaccacattttcttgcttgaaaagaagatggagattaaatctcttacttcgtgacagtaatgttttttgaacgagaggtaattccaagcttcgattagtttgtgatttctttagtgtcttattgaccactgctaagctgagttaagaggcagatgagatgatttttgtggacgaatccttgatttagaatccctcatccaagcaggtgctcatttagctccgcaatctgaatggatgaaaattttagtttaattttaacacttcaagattgcttgttgattaaatgattactgatattaaattagctcttttattcattaaactggtgttaatgttttgaaatttactgaatgcaagtttaggctattggctttagagctctggtggttttattacttgtaaatggttctgactagtatatgtgtctggatccaaatttgctgcagttcaaaacaaagtgaatgtttcatgggcgtacgtccctttagggggcgcagctctaggtgtccaaataagggatgatatcccagtagtatctcctaaattagttaggcaagaggtaagataggaatatttaggtatggtttgttaggaaagtagagattagtttcttggatgtcaaatcgagtcttccctataaaacggctcgctgtaatcattactccctccagttcacaaagaatggcacgcacgcatttcaagattttgttttgaccaacaattagactaatgatttgaggcttatgtgttacaaaaattatatcattggattcgtatttcaaaaacctttccaacgatataaaatttgtaacatataatctacatacaattggtttaatcgttggtcaaagttcgacctcgaaaagcgtgggcgccattctttctgaaatggagggagtattaggcaagaaaagaataaatgtatctagttatccccttgccgttgaggtgcggctaccttcatggagctgctgagcctcttgggtagttcatgacaatttggtatcagagcagtcgatctccaatgcgactgaaggcacgaagctctctcctttcgccaagactgaagctagatatgataggattcaagttgcgctggacaaactacaaaccccgttggccaaggttgaagctatgctcgacagattacaagcaatctgtgccaacatccatgtgaggctggagcaacgaaaaacagcaaccatgtcccaactagttgcatcacccctggtcttgctgtctccttctctgttgccttcactgccgccactagtttcaccatcgctacctctaggggcaacgcaactaaagccaaccctggcggtagtgcaacctacaccaccagcgtattggcctagcagaactccttcgctattagcagctcgaggatgagcagaaagtccagcaggggtgtgaggtcatgtacaggaggtggtgttcatgtgcacctcttcaagcttgcagggagcagcaacgagcgccttggctgctcagcagcagggaagaacgcctcttagggcgggtggccgggaggcgatgtccctcggtgcaggcaaacacggtgatatgtactgcagcaacatggaggtgcctgccgccaggtgcatgggagagacctcttcttccaaaggcagcaggggcttgggtgcttcatcctccaaagttagaggtgttgtacaaccgtgataaccatggccaaccaacagcttggggcctcctcggacttcagccgtggccaccaccgcagttggagggcaagctgataaaaaaaggggggggggggggggttgtaatgtcatgggcgtacgttcctatagggggcacagccctaggtatccagataagggatgatatcccagttatctcctaaattagttaggcaagagataagatagggatatttagatatggtttgttaggaaagtagagattagcttcttggatgccaagtcgagggaagaaaatcttctacgacctgggtcgtcccgtccatcccgctggaccctcttgcgtagctgacgcctggcaaaaacgaatatcaaagctaaagctctgattaccgataccaaatccaattccacccatccacgccgctgctggccctgccgccgctcgcaggctgccccgacagtcgccggatgcagtcccgctcgcaggccgccccgccggtcgctggacgcagtcccgctgctcgccccaccgccgaccgagggccactgctcaccccgccgcttgccagttgcaggccgttgcccgccccgcctggctgcttgcggctgccggtcaaggctcattccagaggatgatgcttagttagctttggagtcaatacgtttttcttgtcaatttgtttctcgttggactgcagtccgtgattttgtatgaatgaaactttgccttctttgagcatgcggtcgttgactcgttggctcggatgaaaagggacagtttattggagtttatttgtcagattaattgttcaaggaatcaatggagatgaggccggcggcacggaagaaacaaaacaagaactgctggccaaaagaattggatttggtacatgcagggatggaccggaggaaacacggaaatagggattagggttgccacacgtcagctacttaaaagggtccagcgggatgtacgggacgaccctggtcgcagaagattttcttcccaagtcgagtcttccctataaaagggcctgctgtactcgttatcaggcaacaaaagaataaatcaatctagttatccccttgcccttgaggtgcgcctaccttcatgaaactgctgcgcctcttgggtccaggccaccccgtacaggccctagagccattatcccgtagttcatgacataatgatataatatttatgtgtccaaagtggctccccctttggtttcttttcattgcaagttttctttgattgcgtattatcaaattgtttcttcaattagtgtctggttccgtggttcgtcacaagttgttttggtccagtaggaagcgtgcatcttctggagcaatgtttttgaagtatatggccctgtttataatgggaaatcttgcaccgttgatgccataaaggcataaactactaggcatgtttgtttcatagccacaccctgccaaattttgccacaggtgtggcagctttgttaggctgctgtaagtttcactgccacaactgtagcatcccacactttcttggcggcctatcccacctgtcatagttttttttacagctacttgatcatagttaagagacaaacgttgaggaagaagattagaattgtctttgcttttgttctattgattgattgccatttccttctacagccggcttacagcttcttaaacaaaccaaaccaataattcgcctagttccttcctgattaattcattgtaaataaaggatatgatcttatctctgcgtagttcttctaatccccacccatgtcatttatggtattaggatttcttgtgctgatattctgtgcaattagaattatcttgttgtgtgttcttttgacttgaaagaacttaggctacgaaatatgtggatcatattttatttcctaaggtatgctctttgtcagtctttcctaatcatggttgttgcttgtattttttttccttgcggttgttctgcagtgtacctgaaaatggtaccgtaatgttctctttgcaactgattttgttctattagttattacaaaacactcaagcttaagtgttggtaatcggttttaggaggggagtctactgttgagaattgtcagatcctt

SEQ ID NO: 2199 - DNA, 5987 bp, Brachypodium distachyon
  Intron number 3 from transcript Bradi3g32470.2 (locus Brad i3g32470) derived from phytozome v7.0 (chr-ID Bd3; pos 348 21919 to 34827905)
ctgcccgctctgccgccgggacatctgagccgtcggtacgttggttggtcgatctcattccgtcatgcgtgtaattgacgatggccgtgcgatggcggcggcgggtggcacctggtgcccgcaagggaaccggtgagaatggggatttgtggatagggaattaagaattgtagtgctcctacgttcagattttcttgactctgcgtcaatcgatgcacacaatcatttttattgcaaagttataaaaagtaggtgttacaagtcaccgacaaatgatcgtggatacaaaaataagccacctaaaaacatcaatcatgacgaatttataattgaaggcgtctagtacaccgccagtcagcctggttgaagatatcacgagataccgtctccagccggttgcatcaaatatccataagtccccgcaggtgcacggggagcaggaaagcccaaagacggatccagtgcgtagctttgaagataacctacaaaaggttgtaaactctggatcgattaaaatccacatcattcctacaattccagatagcccaacagaaagccgaaactcccatccgcatatgagctttaagttttttctctaccccattaagccagttaccaaacaaattagtaattgatgtcgggggtggaaaattaaaagtaataaaaatgatgcgccaaataatacgagcaagatggcaggagagaaaaagatgttgaatgctctcatcagcatcacagaagcaacattttaaattcccttgccaattccgcttcgcaagattgtctttagttaaaataacctgccgatctaggaaccacataaattttttgactttggagggaatctttaacttccaaatatattttcgacgaaaaaccgtttgcccatccataaagtccgcgtacatagactttacagaaaagacgcccgagggagtaagactccaaacaaatttgtcgggctcagtcgacaaattaaccgtcataagccgctggaccaagtgcaaccatcttatccatttatccccaatgagatttcgtctgaaacgaatattcaaaagaatcgtctaaaaaaccgcggcaacagaaatgtttttatgctgaacaatgcggtatagggatggatattggtaggcgagcggtgtagtgccaagccaggtgtcttctcagaaacgaattccagtcccatccccaaggataaaacacccgcgattaaaaaaatcaacattaacatgcatgaggcccttccaaaactgcgagtcagtcggtttggccagcgtttgggaaagagtgctattcttgaggtatttatttcgtagcatctcttgccacataccttcctcgttaagttagcttaaacagccatttgctaaggacgcatctatttttaaactccagaagctcaatgcccaagcccccttgatctttggggcgacaaataatattccatttggtcaatctgtacttgcacttatgctcgtctgattgccaaaagaaacgagatctgtaaaaatccaatcttttacagactccaacggggatctcaagaaaggataacataaacatgggcatacaagtcaacaccgaattaatgagggttgggcggtcaccgtaggacagcaacttccctttccaacaacccaattttttctcaatgcgatcctctatagatttccattccttattaagaagcgagcgataatgaattggaattctcagatatcgacacgggagagatccaaattcacatccaaagatgcgcttgtagctaagcacctcatctttggcattaccgaaacaaaaaatctcgcttttatggaaattgattttatgaccagaaagttgttcaaagatacaaaggatttatttcatattaacggctttcgctaaatcgtgtttcatgaaaataatcgtgtcatccgcatattgaagaatagagacacctccctcaacccgatgaggaactagagctccaacttgaccatcttccttgccatgagaaattaagatggccaacatatccgcaataatattaaacaagatcggggacagaggatcgccctgtctcaatcctttgcgagtttgaaaggaatgacccacatcatcattaactttgactcccacgctccctccctggacaaattgcgaaatccagttgcaccacattgggtcgaatcccttcatgctgagcgcttgttgtaggaacgaccacttgactttatcataggccttctcaaagtcaattttaaaaagcactccatccattttcttccgatgaagctcatggatggtctcatgaagaacaaccacaccttctaagatgtgtcgtcctggcataaatgctgtttgagtcgggctaaccacctggttagcaatccccgcaatgcgattagtagcaactcttgtaaaaaatttaaagctcacgttaagcagacaaataggtttatattgttggatttgaacagcatcttctttcttaggaatcaacgtaatgatcccaaaattaagtttatacaggggcagctggccggtttgaagctgagcaaagagagccatcaaatcagattaataaagttccaggaaaactgatagaactccgcaggaaaaccatcaggaccgggcgctttgttatgttccatctggaagatggcatcatgcacttcctgctcggagaataccgccacgagaatggcattctctgccgcagaaagttgaggtatatcatcaacttgggattccaccagggagaaagaattcggttccaaagctccaaataatttcttataaaattcagagatatagaattgaagattagcctgccctgtgatggtcccttcctcctgctcaagttgaaatatctttttctttctgtgcttcccattagcaataagatgaagaattttgtgttacttcctccctcctgtatgtatttagcttttccccgttgggcccatttcgaatcctcatcccatcgtagcttagatacaaaatcattagcatccctcaacgtggcccgttcagccatggtgagatcaacggattcggctttaatatcaaggtcatcgataattttaagaagatggtcacgctcctttttatatttgccacttaggttcttagcccatccacgaaggaaacgacgtaagtgtctaattttattctgccatctctcaatgggtgtgcgacccgaattcaccgaggcccattcagccgcaattatgtcataaaaaccttcctcacgtaaccaagagagctcaaaagaaaattgagcgcgatttcctaagtgagcctgatcgccggaatcaataaacagtggtgtatggccggaccccgagcgggtcaacgcacggaccgacaccaaagggaacttttgttcccagccaatacttgaaagtacacggtccaacttctcgtaagttggaacctggcgtctgctagcccaagtaaattgcctgcccgaaagaacaatatctcgcaagtccagactttcaatgatggtgttaaaaataaaaggccacttagcattaaaacggtcgttgtttttttcctcccggcgacgaataatattaaagtctcctccaaccagcataggcagagtttcagcctcacatatacgaaccaattcggctaaggactcggctttgtgctcatcttgcgcagccccgtaaactggcaccaaaatccactcaaagccatcctctttagagcgaaggtgaaatttgacacagtaatctccagtatcgacccgattgacatgaagaaactagtgttaaaaccaaccaaaatacctcccgatctaccctggggcggtaaacaataccaagcaaaatcaagacccctagctaaatggcgtaaaaacgggttggagaaattagatctcccggtttccaataaagctataaaatctagccgtaaatctctaaccgactcctgtataaaacgatgcttagctaggtcacgaaggccctcgctgttccaaaatttcatcaagaaaaattctttggcttttttactctagaactacgacgaacagcggacatgtcataaactttcttccgtcgagttcgtgtgattttcacacgacgatccgcatgaccttcctcgatatatccagcaaaatcatctatatcagtacagagatcggaaatttttgagacaactaaactatgcaaattctcatattccctatccgtctcacccacattcctacgaagtaaagtaacagccctctctatttccacatcgtttagaagattaactgactcggagacggactgatcagacgaaccaagtgagaccccaatactattagcatgcgcaataatagtcgaatcaggtaaagaagcaaaagaaaattcagaaaataaatcagtacctgaagccagaagctcctcacggccctgagcacgatgagtagcacgcgccatctgggtgtcgtgccgatcaggttgggcacgaagctgcgcactagaccgaacccccgcagccttgacgtccgggatcccaccaaaagcaatcacatccgccacggaaggagaggaagtcaacaccgggatccgagccggcgaagcgccatcacgacgagcctccacaaaagcctgtgagggtggagacctcatcgggctggacacaggagcctcctgctgttgtgccccacggcgagcccccatccgcaacggcccccgcagccgcaatggccgtgccccctccagccgaaaggagaggcacaaccggccctgccaccttgctcgccccagctctcagcggacccggcgtagcagtgacaggagcaaccggagcagccgacccactcatactagcagcagccctccggtcccctccagtagcaccacgatgtgcagcatcccgactagccgtagtcgaggccaaaccaacacgaccaacaccaagcgaagccgacgagcaaccggtcatctcctcgtccaccatgtacgcccaaagcctgcgcgtgcgcaccgggccggaagagagagatcccactggaaaagacccgaaatgaatttccggcaccggcacaccaacaagctgagccgaaggagggaacacaacatctcccactgtcgaaaagaaaaaaaggtagcctggagcttgtttgtgtaccaaacacatttatcaagtgaagtggagctaaggtggagtggagtttaggtgaagtgaacccctcccaaacagtccctaagactcgaagatctgaacattttcatcactcctccaactctcatgtgctacccttgaattaagatctaacggtcagcacatcaacttatctctactaaaactcagtcagcttctatgtatcaaaaccgattaagattttaacttttctgtagtaaaaagaaagaatttaacttttgtttttgtattcggtctgcctatttggcaccaagaggtggaggaaccaactgcgctgtcaagagacacgcgacacactttcacctccctagatctagccgcctccttcataggaaacccatctagggtttcacctccgtcgtcacccttcttccgccagtagatcactagtcttctcttcaaggtgtgtaagaaggcacttatctaccggtgggagttgtggctttcctcgcttagagggtttgataggtcttcatagcaaggatcgcgccgctgagacgacggcggtgcaatcggcacggaatgtggttcccccgtctcatttctgtggttctccgtatcgtcctggaggcatgtggaagatagtgtggtctctctggaggcggcattcgacagatggtggcgcctcatcatctaaatggtctttcaggctcctattcccttcgaaatcgtttgttactgttaggatgaaatcatcagattgatgtatattcctgtcatcccctcggggcagcgacgttaggttttcttgtcgtgcatgcatgctgacaagatctggtgtcaagacttcacatctattcaaggatttaacaatgatgattgtctctcaggtg

SEQ ID NO: 2200 - DNA, 6538 bp, Glycine max
  Intron number 4 from transcript Glyma04g15130.1 (locus Gly ma04g15130) derived from phytozome v7.0 (chr-ID Gm04; pos 15586395 to 15592932 reverse strand)
cttggtgactgctggtatgttttcttgctctcttctaccccccctccctgcagtcaactggttaatcagtctgttgctcttattttcctgtttgtgcatatatcaatctttcattcagtcctctcatcactgtagtttgttttgttagtttatgtagaatattattgctatatgtcctcagatattatttgtgtaaaaggtttgtgcttaaagaaaaatgaagaaattttgaacaactataatatatctgtcgcgagtctcactgattgaatatagaatagtctataagatacaaaggaattggagcaaaatagtaatgcagggacactaaatataactagatagagaccaaaaatggtagaagaaagtagatcacctaacattagtggagatgagaaaattagtgtgctaagtccagatcatcttaggaaaatggtccttttaagttgatcccaagtatttatggctaagttgttttcttattttcttttttataccaccctaaaatgagggcattatgtttctttattgagaaggaaaactcctatttttttttgtcaaggtgacttagtaagaaactgtgaaacttctttatttaataagtcagatctaatttagaaagagtaaacaggtaactgattacttggaattattcccgtctcagagcttagttcttaaatttatctgtctactaattagttgtacaagttaatccttgaatttatttcacttgaattaatgagagatattttggatgaaatgcttgagtgttttctcactcagcttctcttatatatcaaacttagcttacaaaggaaacttttacagagagctcagaacagagaatatacaaaaaagtataaaaaaaagaacagtagcctagtacaatagggacataataacctattttctaacattccccctcaagctggaacatttaaatcatatgcaccgagcttggagcctaaaaattgaatcctaggtcccctcaatgacttggtcaaaatatctgcaatttgatcattagagctaattttttcagtattaatttccttagccaacaacttctcttgaacaaagtggtagtcaatttctatgtgtttggttctttcatggaatactgggttagaaataatatgaagtgttgattatcacaatatagttgcatctgctgaacttcacaaaatttaagttcctggagaagttgtttgacccacattagttcacaagcggctgaagccatggccttatattcaacttctgcactagaccaggcaacaacattttgtttcttgttattccaagaaatcagatttcctcctatgaacacacaatatccagtagtagagcgcctgtctataggagagcttgcccagtcattaccacagtacctagtaacatgggtgtttcccttgtcttcatacaacaatacctgtcttggagtccttttaatgtacctaagaatgcgaattacaacattccagtgattagtgtgaaaagcttgcataaattgactaactaccccaactacaaaagagatgtcaggtctagtgattgtaagataaatgagttttccaaattagtcccctgttgatggattgacaagtttaccaatgcgtctcaagtagtaaagttagaacggaagtctgagtattgtatccacagggactttgtttgtacttatgtagattaatatttgattaataaaaagatttggaaaggttgtagaaaaatagtaatttaaattggcagaaaattaaatcaaataagaggagaaattaaacaagaatttaaattaattaattaaagacagaaaagatgagaaaatccaatattattgtagaaggaaattcaaaagatgagaatgttggaaacttagtctactagagctactccttgatgtactgttaatgatttttctctatttataattatttcaatttacacctgcatctactagtatactctaactttgatcccccacatgaaagagtctaatttatctattttctctcctaaatccctttatagagctaaaattagtaaattgcattaagaatagagatgtataacaggctaaacaaatatcaatctatccctagtgataactttatttagatactcttttccagttctattagaaaataatgtttttcaacgcgtcgctacctctaaaacttatcatgcaaatgagtgatcaagccacaaacaataatattaagcacaagaaaagataatgtaaatgtaatattcataaatagatagaaagagaaattacatcaagaagggggtttagtctctcattgtcatggagactttacaattggaagaggggaatatttagtaaaggagaaaaagataagaaagggaattgagggaaggaatggctccctatacttgcttctccttctagcctttgcaacgaattgtattctgttggaatttctatgtgtcttttccttctttcctcttcttcttttataggtgcagattagtggacttcttgcactaagcccgactttactttccttaattaatcatgcttttcttaattattcttctttccttaattaaccatgctttcctcaattagtctacttcccttgattagtcttgctttcctctattagtcttctttccttaattaactttgctttcctcaattagcttgttttccttaattagctctatttccttaattaactttattttactcactaagcatcataaattcatcacttttaatattctttgcaaaaaaacttaaatgataataatttaacaattatatgctcaaaaagaaaaaattatgaggaaaaaattacaaattcctatataatttaatcccaaaatatactcataattagtcgttatcatctcctataccgttcaggatcattgaagggttcaccttgttctgccatcaacttttgatttgggtccatgggactctgaagaggcctacacccaatcatgcctttttctttcaagatatcgaaagcatactttctttgagaaatagcaatgcctttgtttgtatgagccacctcaataccaagaaagtattttagacacccaaggtcttgggtccgaaagtggttgaataggtgctttttcaaccagctaattgtagtagcatcattccctgtaataactatgtcatcaacatagacaattagataaatacactttcttggagaagtgtgacaatagaaaattgaatgatttgcttcactgtgcttcaatccaaaagcctatacaatttgactaaatttcccaaaccaagctcgtggagattgtttgagaccatagagagatcgacgcaatttacaaactaacccatattccccttgagcgacaattgcaggaggttgctccatgttatctcttcttccaggtcaccatgcacgaaggcatttttaatatccaattgatggagaggccaatggcaaatgacagccataacaagaaatacgctgaccatggtgagtttggccacaggagaaaaggtattgccatagtcaaggccatatatctgtgtgtacccttttgccaccaattgagccttaaggcgatcaacttcaccattaggcccaaccttaatagcatacactcatctacaaccaactatcttcttcccatgtatttcaacaatcatggcttgttggcatccaaggtgatcaagtgcttcatggatatttttaggaatggtgagaggtgatatggatgaaacaaaggaaacatgaggaaataactggtgataactcaaaaaattaaatataggattgaaatttttggtagatcgtatacctctcctaagagcaattggctacttagagtggtcatcagttggaactattgcatggatagctgaaggtgatggacatgaagcagatgactctccatatgacataggactagataactctctcagtgtctctcatgctggtgagtggtgtgaggtcatgaagaaggactggaagggctggttgtagaggtggcttgacttgtgtccataatagggatttcatgaaggggagacaacagtggatccagtgatgtaccattttgttggggtgtgtgaggtcatgtagaataatgtaaaatgtctattgtggttaaaacgaagaaagattagaggagaaatattctttggcattatcactcctgagaatcttaattacttttccaaattgggtcatgatttcattaaagaaagacatgaatataggtaaaagtttagatcgatctttcattaaataaacccaagtacatgtagagtattcatcaataaaggtaacaaaatatctgaaaccaatagatgtgacacggcttggacctcaaatatcagagtgaatagtgagaaaagcagagttacatcttgtttcagttctctttagaaaagaggacctaacgtgttttcctaattgacatgactcattctaagacttgaagccttctaagactaggaaccattttcttcaactttgataaatgtggatgacctaagctatcatgcaaaagcttaggagacaaagatgcaaaacaagacatagacgatctggtttcaagatagtagagacctttggattcatgtcctatgccaatcaactgacctataccacattcctgtataacaaaggaatcaacatcaaatgttacaaaacaatttaatgattttgtcagttgactaagagaaactatgttgaaaggacaattaggaacaaaaagaactggatccaagtttaaagaagaaatggagactttgccgactcctttagagtcgactttggtgccatttgctagggtgatcactaattagatgaggaaattttggaggagacttagaggtgaatagagagtcattacaagaaatatgatcagaagcacctgaatcaattacctatggaccttggctatccacagactgagaaatgcaagctgttgaagtactcgggcctgaagatgattgagcttgactattggagttcaatcgaaggtattcttgatactcctctttagaaacttaggatcaagtgtttttgatttggagacatttgctgttttatcaggccagccaattatatagtagcatttgtcttgggtgtgacccgacttcttgcaatgtgagcatcgaaggtctgacttcgtgtctctacctccacaaccgccaccacgtcttccacaattcctataatcttcctctagtagacaccattgctgaagattcaacatgctcaagtgagtttccagtctttcttggggtgggaacgtgaagaagacgtgtcatgaggctatccgttgaaggaactttttgaccagtcagaatttgatcacgaatatgatcaaaatctggattcatggcacgcaaggccagaaccatgtacagattgccatgcttccttttcatttcctccactaagtcagcatctaagagcatttttagttcttcaattgcagattgaatttgagcaacacatgtggtcatatcatgatccgtttgcttgtaagatgtcaacttgtcagctgcatcatacaatctctgaatgtcattggcataaatctttggggcctttttccaaaagtagtaacaggttttgaatgacctcaaggtttctaagatatttggctccatggactgccacaacaaggcacagagttgaaagtcaagcctcttccattgtccctgactttctgtcagtatttcagtgaactctttctccaaatggtcatgatgcccttggccaaggaaccagagttccatagatgcagaccaggacaaataatttctactaccattcagcttctctgaggttatgacaggtgtcccaaagaaagaaactatgggaccaacaaaagaggaagttgtagattaaactataataaccaaatacgaatcaaacttattataatgatgaatatgtctcattgtgagaaaaatttcagttttgatcatttatgtgcgtattaaaactttttttggtagtttgcataaggtcctagattaagaccttgttgtcgccatttaacacacacaaaaaaggtattttttttttttttttgcattgtatccactatcttaggtgtacaactctgagatccactatactgctatggtgtttttggtgtccagagttaactactacagtgagaagcattcccaaatattttttgctagttttatgctcccacctccatcatgattctgggtttttgaaattgtatcttcgaatatttggcattcagagaaaactattgtcttcccctttggcttttctgtggtgcttagttaatcgagaggggttttgatgttggacatttcaagagattgtttatctttttgttggttttttttcctggatttggccttttgtttccttatctaagtatcttattctctgctcttatgttcacttgtttcttctctaataataattcttattgtatcacaaaatggtaaaagaatagttctatgacatgtttaatggaggcagatcatgatctacttgttaacacatcatttttctgcagccgagca

SEQ ID NO: 2201 - DNA, 719 bp, Glycine max
  Intron number 3 from transcript Glyma01g42590.1 (locus Gly ma01g42590) derived from phytozome v7.0 (chr-ID Gm01; pos 53820348 to 53821066 reverse strand)
taacttttgggattgatttgttcatttctaatatagtatgagagtctatccagtcttaactttggccattcagagaagtttagtcctaaaaacttcattgatagagtattggataatgaacctcatgcatttagtgaggtggaacagagtatggatcagttatttggctcaaacgatgggaagcaatgaggagaaagtaggagagaattagtgtgggtgccgagctggcgagttcgttagaggaggcaacttattggcagaggggggagtgaggaataaaggagggagtccagtcatttttttgatttgttatttgacagaatatttttctgaggagcttaggcttcggttgtagccattgtaagagcttaggctcccattttccattgtcttaatattacacttattttctgctgttggtgtttatcattcacactccaaatgtccagttttgggcgtgccgtgtgttatgatgacctacattggctaggaatatgaccaaaacactctttataaggtttggacaatttgatttcttaagttagtttttgggattgagttaattttagttcatttttaatgattttaaatcatattgttttatccaatattttaattgaaactttatatgtagttttcttatagttgttgaaaatttgaaagaaactttcttgtccgtatcaggctggcctgaatcaaataagtaggaatcaagtgtc

SEQ ID NO: 2202 - DNA, 867 bp, Glycine max
  Intron number 5 from transcript Glyma10g16420.1 (locus Gly ma10g16420) derived from phytozome v7.0 (chr-ID Gm10; pos 19502704 to 19503570 reverse strand)
acatatacctactggcataagtgtccaatcctgtatgcatatgtttgtgttgagatgttggcttcttagtttctgtttttttccattatatattcaagattatgttttctgtttccattttgtcttttacaaataactacaaaaactgtgaccttgtcttcatttgtttccagttttcaaaggttagtataggaaatgatgagttttcccttattttgactatgtttcctatttttagaaatttgtattggaaaatcttttaaaacaagtgaaaaatgaaagcgaaggtgacattttcccaaaccaactagttcctatattttgaaagcttatgtaaattacaaataattagtgaattcaattatcaaatgggttaatataattcaattatccattgggtatttatggctgaataaaaattataaaagagattaagatgtcttttgttacattggtctaccttggactgccactatattatggcaagattgatacacagttgtaaattctcaggcctagttagtagctgttcaatttgtgctttagggttgaggaccttgaaaattgtttcacatggctgcctaaagagatgaaatggttaatagttgtaccaggcatcgtctgtataattggccatggttaatccagcttgcagttacattaatgtaacacatggagaaaactagccagtgcatgaggaagaaattaattttttgtcctgacaatcattccatagaactaaataactaccaagtcagtttcccttatttttgaaaagaaaactctgctaagcataaaaatggggattctacttaattaattttatgttgtctttgtgcaggtgagagaagccactttgcaaataag

SEQ ID NO: 2203 - DNA, 1375 bp, Glycine max
  Intron number 1 from transcript Glyma02g05520.1 (locus Gly ma02g05520) derived from phytozome v7.0 (chr-ID Gm02; pos 4418243 to 4419617)
ttcttcttccttcaattcgcttttcatccaaccaggttctctctctcctctttcattatgtgctcctttttactatattcctctttcgattctctttctttgtctcttccgttatctaaagccttcaattcttttatcttttccttcgttttttgttgcttttcagtttcaacttttcctattcgactctgggtttcgcttcattttcgatttccctcccttcttcttctagatcagtttaaaaataaaatgttccttttttaaaaaataaaataaaattgggagaatcccagttgttactgttccctaccgtgatgttatctagagttgttttagctcaatttctcgagataaccgtttgatgcattgctttgatcttgaactggtagatgcaatttccttaaccatgaggggttttcttattatttaacaaaaaaaaaaagaaaaagaaaaagggaaataagagaaaagaataactgttgcagaaaacaaaggttgttcaagatggctatagcttacaagaattagcatgtaaaggaattaattttaattttgttttttctcggttgtcttgaatttactgacgcatttaaattttagtgtgtactagggttatccatttgctttagttttcctttgtattgaatctagtttcaatttcaaacataactgtgcttgattaaacaactcatgggtatgtattatcgtaaagtaggtagttgccttgtcaatagtccctgtaggataatagctcagcgtagcttaaaccaattctatattatgttctgtgacgtgaagatgttttcaagtgctaactagattaggtttgattagaagttcagctgtttggttgcatgatatctgaatacaaatatctgtaatttccgctatttgtctgcgacaccatctgctatatgatatagccgattattagctttccaccattttctgcgatctgtcattgataactctgctgtataatttctttggtgaatttagtatatatgatatatgagattgaaaggggcaaactatgttagataagattaaaatgtagactgattttcttttgaagcgtgctttcattttagttttactttaatacttggcatctgcttgcttgtctgcatccttttagagtcagtcctggaatttattcttaaaattgaagccctgtttaagatgccttatatctttttgcttactctttgatggagttttaccttatatttctagttacaatgttgttaaggattttcatattttgaaatatgaggcttatatctctatcataatggacatgttttatgattacattattacaacttgacttcgttgttattttctcacatttctattcaacatgggacaggac

SEQ ID NO: 2204 - DNA, 2248 bp, Glycine max
  Intron number 6 from transcript Glyma05g28770.1 (locus Gly ma05g28770) derived from phytozome v7.0 (chr-ID Gm05; pos 34534942 to 34537189 reverse strand)
gtgacaggtcacagcaggttagtctattgcataaatgttaatagtaaacagctcttgtaatgggttgtcttatgtctatgatgattggtgtataacataaaactgttatagtgtgtgaaaaattgtgcatattattgttaaaaattaaattaaaaatatgaaacgtttaactgaatccccaattcccccttttttgccacatttcactttcccatattgctgttgacttttgtttatagtcacaattctttgccatttgaaatgaattgcatgttccctgattgagtatgaactctttctttaataattcttttcactctcacaactgaagtgccgcgtcccgcgtcggaggtgcaccagacacgcaaacgggtacgactccggtgcgacgcggtgtccattgcctccgccatcaccggacatggttggacgcaggaagcgcgcgattggacgcggcccaccaagaggacacgcgcgattggacgcggcccaacaagatatttcattatttatttaaaaaatgcttaccaaatactaaatcggttcttctttgtcttcttcttgccgtttcccgcaagcggcctccattgttgcacgttgtcacatccgtttccccgcgcaggtaggccctttccagtcatcttcttcgtctgctccctgtttcttttttggtttttgtcgctgccagagtgtcggttcaagtttctcggcttctcgctgccgtgttactgttttttggtgattctaatctggctgccgtgttattctcgctgccatgttactgtttcttcataatgaacagtataggacctatactataggtatggcagattggcactgcgaaatttattgaaagcaggtatgggccatattttttggtacaagatggcacaatttatccgcccgtgattccgtgaatacctgctcgtgaatactggctgtatggcactattggcaggccttattttttgcctttttgaaagagataaccacacttttaatatgactttgacaaatttaaatttttttgatgttagatatttaactcatctatgtccacttaaatatgattattgcatgcgacaaaactttttataagttatacttttacaaaaatattatatcttgaaaagcaatggttgctgcatatggcaaccgtgatctaggagatatgcagtagaaataccggctgatcagtatgagagacttaaaataaaaatttgatggacttttttcactttgaccaagagattataaaaatattttttttcactttgaccaagatcttttatgcatatcgctcatatttaattttatgtaattttattttatttgattatatatatatatatatatatatatatatatagctgtgtccgtgtcctacattttggacattacatgtgtccacgtgtcggtgtcggtgcttcttagctaaattctaaaaacatctaggaagaatatccaacctgactgtctcattaaccgagaaaatgagaaatcagaagagagaagagaagattagaatgtgtgaagttacttttacctgaaccggggacaagaagtctccatatctaataaagtgggttgagcattttatttgggctttatttggagatgacttgagacaccaaatagacgggttgcacgattgcattaaggaactattttcttcttctgcaattctattgaatccaaatgttatgtctactgcattcctgtgattctaatacaaaacacagaatcttgagccttgcaagatttgcaagtcaaacatttcaagactagaagtctagaacagctatcaaatggttattcctataaaagaattgtttctggttacatgcaatattattaggtttaaaatgattctgtcatttcttcatcctttttttgggcacatcttttgcagtcattctctgatattattaccttattatttttttgttcagacctggagctttcaaatattcttatatattatttatttttcccaggttttttcattaatagggtcatggtcctggattcttgcatcattttgcttggtagttagtcttaggaaattgctattcaacttgctaccctcatattaaacccttttgcttcatagcatttactaacttttctgttggttttgaactgcaacaatattattggttaagtatatacttgttatcttactgtgttcatcaattctgacatacctgcaggaaagagaattagccttgaggtcatttaaaagtgg

SEQ ID NO: 2205 - DNA, 1990 bp, Glycine max
  Intron number 1 from transcript Glyma13g07890.1 (locus Gly ma13g07890) derived from phytozome v7.0 (chr-ID Gm13; pos 8115675 to 8117664)
ctgtggcaaatccacacttcttgatactttagcaggtaaatgcatgcatatatttttctttttctttttttctttttgatttcttggtggaattggaatattgggtcttcatattctcattggtgtatgcatactatgattgtcagcaagtataaaatttatggatatataaggatttccacctttctctgaagtttatactttacttacatgatgtaaacagattaaaaatataaggtgttgatggaacattttatttgacggagaagaaaaatagagatataaagcacggcgtaaaaacataaagttaaataaaataaagaggtaaaaaaaaaaaaaaaaaagtcactgtacaatatttatctttgtgtgaacttgctgataaaggggtcaaatgggctctcaggagatcaaatgggaaggttaaatcggacaaatgttttgtttttacttcgacttagattggattgctactaatttatcctaatatgatatgtgaaaataggattaaataaaaacatttttacctgaaaaaatcatcgattgtaattaacttcaataaactaataaatatatacgactattgatttattaatctaaagtgtattttttcattttagaaaagtcaaattcttcccaagaacttttatgtttaggtattgaaggaagtaacacccaaaattttggataaagtttagtttgatacattaatttttaaattatttacactattaatccattagaaatcatcttgattcaatataattttaaaaataattattaaaaattccataattttatcatacatcacattataacaatgtaaaatatctatatcttaattttagtacattctaatcagatttctaatggcttaaatatgttttgttattttctcaattttgagttatttttgtttttctcttaaattttttttagtccttcgaaaactgatctatttagtcattctccttttaaaaaattatacatcccaaacatttcaaaattaatctagagaattttttttatgaagaaagactaaaaagagcaaaatatttttgaatttcagaaattaaaaaaagataaatttaaatttatcaaaataaaagtgacccaaattggatggactaaaaaaatatgtgaaccaattctaattatataagtatcatttagtttttttccggagaattaagcctagtcattcagttatgtaacaaaaactacagaagtcattttacatgttaaaataaacaattactttctatagttttaaaaatgattcttggatattttatatgttatttgatacttagtgaaataaaaagaaatagtagaagaaaaaggtaaacataataggtaatatatataataagaaaatagagatgaagaaaattataaatgttgatggggtgtctttaattaaaaaatagtgttcatatatcattgttcttatagttttaaccaatttcaatattattatataatttatttttgactatttttctgagattttgtgggattacataattttctttttgtttttttatccttacattaaccttcttaattatttgaaaaatatttcaccaacattccttacacattacactaacactcctttattatttgataaacattacacatgggtaggttgctcggttgctgtaaaggtaaaaaaaaaaaaaaattgtgtaatttcataaaaaaaaattgaacatttgtctccttagtttaacttatttaaatgttaatttttcaatgaccaatatttcaacaaatgaaactataagtaaatagtaaaaattatggggaaaaaaataaaacttagataagatcatagggacagatagtaatggtgtggatcagaaccttaaaaattgaatattaagacggatataaataaataaaaaatgtggacaaactgttcagtttaatcttaatgaaaatttatgcaggaagactagctccaagcacaaagcaaacagggaaa

SEQ ID NO: 2206 - DNA, 6260 bp, Glycine max
  Intron number 2 from transcript Glyma02g38840.1 (locus Gly ma02g38840) derived from phytozome v7.0 (chr-ID Gm02; pos 44187023 to 44193282 reverse strand)
gaaagctgaatttcaggtaatttggctgggctgtcaaatgcaatctattaattttgttttaaagaaataattgttaagaaaaagtttaaatgagatgtttcttcattcagatgatctttttttttcatcttgctctagatctgagctcagttaagtaggtttcttatacatagaaagaaacatataaagcaaatccacagtataccaggaatattagaaagaaacctcctccaatagggaggaattatatctctgaatctttcctttatctctggaaatccttaacacaactacctttgaaaagcaaatcctgtctgttgaagattctgcagttcctgtgaatacaaccatagtttgtattctataataaattattggagacccattgcaacaaaattttccttccattaaaatttagattattatatgaagcttcaatatcttgtaatactatattgttggaaagttgagcatttaatgataatttcctttccaagtagcttagttaatagttatctggttcaatgtatcttaggaagatgtgatattttaattgttctcttgaaaacaaaattagatatttattatccatgtaatcattcagaatataaataaatcaatctgttgggtggaagatgaacctagaaaggcatattcaaaatagctttgcttttctcactctcttcttaacatggtatcagaactcccgatctaggggggctctgcttctgcacaaaaagggttatttagcacttttgactgggctcttgaagctatcagacttttccagcaactctcagaattccggtgacttttccggtgactgtcagaattctgacaacttttccgacaattgtcagaaattccggcaactattccggtgactttgttagatttcagcttaaaaccaattggcattaagtgaagttgcttaacaaatatataagctgcaccctaagaactaaggtaggcgatgtgagacttcctaacaccccccccccccccctccatagatgcctgctaatacaggtgagcctattagaataggcaagtactaagatgggttataggctttgataccatgatagatttcagcttaaaccaattggcactaagtgaagttgtccaacaaatatttttttttggtcagcaaagataaaatatatattaattgagtacgagaggtactgaaagatacaatttacaaggtagaagccaaataattggttccatttcagacttaatgtagtctaagaggaaccaaaatctggctacataaatgagactagtatgtagagttagtctaattcctatccacatctagtgactaaaccctgtgctaatattgctagactagtggttgtaatgagtaacgaagtccttccccaaattcctaagccattttcagagtaaaaagactgcatcgtccaacactttgttggggttaaaggtgtcatttgaaaagatgatgttatttctgtgcttccaaatggtccatgtcagtgccaaccaccaccacttccacctgttagccttgatgccctcggtcactccgaatacatgttggaggaaatgttgttttggattatgcgggaaaacacccacgatgttcacccaagacaacggttcccaccaaacaggaagaattttgctacaatggaagaaaaagtggcctgcggtctcctccaagcttctgcaaaaaggacaagtactatcttctaattcaatttgtcgccttctcaggtttgctcttgttggtagtttgtctctgagtaacctccatgcaaatgctgaaattttatttggaaccttgagtttccatagttcctcaaaagttccatcctggatctcgtctgatgtctcccccctcagcacttttagccgagtattaaccgcttgtgtctgccattcacacccactgatctctaatctgtgactgaattctgttacattcaacatcttttaggaatgaaacagccatatttcactatcaaataatggtctcctccatttgaaatctcactcccaccctgtgtctccccaagtccccaattgctggataatttggtttcgctggcaagagataatatacaacctagggtatttggctagtagtggaccagctccatttatccaattgtcctcccagaacttaaatttgtcaccacatccaaccctccacatagttgtattctgcattgcaaagccatgctgtggatgttgagacaccaattttaagtccctccaccatatggattccctattgtctcgatgttcttcattcaaactcctccaaccgccatacttagattcaagtaccttgacccacaattccccctggtgctgaaagaggctccacttccgtttaccaagcaatgctaggttgaaagtgtcgatatctttcattcccaaaccccctttttcttttggaaggcacactgtgtcccacttaatccaagctatcttgttttggtcatgtgcacctccctatagaaatctcctctgcaaactcaccagcttgtcctccacctttttaggaaccttgaaaactcctctgtccaacaaatatataagctgcaccctaagaactgaggcaagcaatgtgagacttctacctaacagacttttccggcaactgtcagaattccggtgactttctggcgactcagttttccaacaatttttcctactgctttcaaatatggagagagaggttgtgcatccatcaggtacttctacattggcatattcaggtatgcttcctttttcatttggattaatgtctcaaaaacacttccatccctttgggttttagattctagagccactgaccatatgactccttcatttaaatacttctccacctattctccatgtcctagcaataagaaaatagcaactgctgattgcactcttgtaattgtagcctgtataggaaacatcaaaataaatccctttgtaaccctaaaaagtgttttgcatgtcccaaagttgtccacaaatcttgtctctattcagaaagttacaaatggcatatcttgtattattattttttatgaccattgttgtgtattccaggacaaggaatcggggaggacgattggacgtgctagagaaagaaatggcctttatcttcttgaagagtcttgtgtaccagtgttagaagaaaaccaatctcattcgttcatgttagagtctcaactgtcaaaaaagagaaatttctactttttcattatcgactaggacatccctcttttgaaatcattaaagttatgtttccatctctattttctggcctaaaaaatgaatgccttcaatgtgatgtatgtgaaattgtaaaacacaagcatgtaccgtttccatcaagtaataaaaagagtacctttcctttttaccttgttcataatgatgtttgggggccatctcctattccaaatgtgtcaggggctcattggtttgtgacttttattgatgactatactcgagtgacttgggttttccttcttaaacacaaatctgaagtaaacaatgtctttcaaaatttcttctcattgattaagaatcaatttggtgcatccataaagaaactaaggtctgacaataggaaggagtatttcaatcaagtcattactttgtttttccaaaaagaaggaatcattcatgagtcttcttgtgtccaaacacacaacaaaatgacattgcagaaagaaaaaataggcacctgttagatcaaactagggcattgttgtttcaaaaaaatgttccaaaaagttttttgggggaggctgttgtcacaactacttatcttatcaatagattaccctaaaaaatcttgagatataagagtcctatggtactttcttccttctatcctaacttatccacttcttgtaaacttcccccaaaagtcttttgatgtgtctcatttgtccatgttcattgtcaagataggggtaaacttgatcctagagctcttaagtgtgtctttgttggctactcctatgctcaaaaagggtacaagtgtttccatcctccttccaagagtctttgggaagataaggagaataattttgatacacttgtccttcccactcttgagttaaattcttgtgatcttacacaaaaacccgagcaagaaacattagcccaaaatgaatccaacaaggatgcacccaccagacttgaaaatgatacaaggtttgggaagaatctggtttacaccagaagatcaatggccatttctgaatcaacacacgcccaagaggccaatcctactcttgtagatcaggtaactaactctgattttccaattttgaatgataatcttttagcttctccaaatgaaatggaaatttcagaacataatgatgacctttatcttcccattgtctttagaaaaggaactagaacatgtaccaaaaagcctctctatcctatctcaaattacatctcatttcataaattttctccaacccataaaacctttcttgcaaatctaaactctctcaattcccactaatgtttttgaggcattatctgataaaaattggaagcaggccatagatacagaaatgcagccattgcagaagaacaaaacatgggagttggtttcttttccaataggaaagaaaccagtgggttacaagtgggtgtatacagtaatataggacagattggtcgattgagaggtacaaggcgaaattggttgctaagggtttcacacaaacctatgggatagattactcggagacttttgctcctgttgcaaagatgaatacagttcaagtaatattatctcttgctgcgaattttggctgggaattacagcagtttgatgtaaagaatgctttcttgcatggggagcttgaggaggaaatctatatggagcttccacctggatatgaaggtgctgccaattctgttttccggttaaaaaaggctttgtatgggttgaaacaatcccccaaggcatggtttgggagatttactaaggtcatgacagcattaggatacaaataaagccaaggagaccacactttattcatcaaacacttgacctcagggggagtgattgtattgttatgtatttgtggatgatatcattgttgtattttcatatcccaacagaaatatgccacatatttgctgaaggagacaggtatgacagcttgtaaacctctaagtactcccatggattcaaaccttaaattgggtaatgaagatgacaatgcagaggtggattaggagatctatcaacgtctagttggaaaattgatttacttgtctcacacaaggcctgattacttttgctgttagtttggggagcccatttatgcactgtccaagagaagttcacttacaggctacctatagaattctccattaccttaaggggacaccaggaagaggaattttgtacaaaagaaataagaatacaatacttgaagcttatacggatgctgactatgcaggatcaataactgataggagatccacttccggatattgtacctttctaggaggaaacttggtaacttggagaagtaaaaaacaagatgttgtagcacgatctagtgctgaagctgaatttcgggctatggcacaaggtatttgtgaattgctttggttaaaaatcatcttagaagacttgaagattaaatgggagggacctatgaagctctactgtgataataagtcagcaatcagcatagcccataatcctgtacagcatgattgtacaaaacacactgaagtggatagacattttatcaaggaaaagttggatagtggtttgatttgtactccatatgtgccttcactaggtcaacttgcagatattctcactaaaggattgtgcactccaaattttgatagaataatatgcaagctgggaatggataacatctattctccagctagagggggagtgttggaaagtggagcatttaatgataatttcctttccaagtagcttagttaatagttagctgggttcaatgtatcttaggaagatgtgattttttaattgttctcttgaaaacagaattagttatttattatccatgtaatcattctgaatataaataaatctatctgctgggtggaagatgaacctagaaaggcatattcaaaatagctttgcttctctcactctcttaacatatatgaacatcaaaatacacatttttttaattaagtgactcagttctaattttataattgcagattgcttttggcttgaactttaaatataattattt

SEQ ID NO: 2207 - DNA, 8854 bp, Glycine max
  Intron number 3 from transcript Glyma03g02000.2 (locus Gly ma03g02000) derived from phytozome v7.0 (chr-ID Gm03; pos 1781555 to 1790408)
ttcttgcatagaacggcaccgccaccaacaagtacgtgtaaatactggatgaatggtaactgcaaattcggtgatcagtgtcggagtttacattcatggtcagatgtggaggcaacttttgttggcacgcagcatgtttttttggtatgtttttcctttttttgttttgcaatcaccaaatactcaagagcaaaacaaatctagaggttttaggccatcaacattacttttttctttaaagtcaaaaacaaaacaaaaaattcctcttaatttttgatttaggtcttttgttggattggtcttggatgcaatgagtttgttgccgagtttattcattttgctaacatgcaaatacttccacaggacgataacccaagacctacaagattggtttggtggaccccacctcccagaggattctttaaactcaactgtgatggggccttcactgtttatggaaataaaggagctgcaggaggagttctgagggattggaagggtgaatttattcttggcttttccgatgccttgatcgagtgttcttccgcgttagaggctgaattatgggccatcaagattggaatgcaaacagtagtggcaaggggatacagaaatttaattgtggagagtgattctctaaaagctattcagatcattaatgctcacaagggtgattttcttcgatcttctatccaacacatgactcggatggttgaccgaatttgttggaatcatgtatacagagaaactaattcggtagcagatggttttgctaaacatgggttatccttgtctcaagaccagagcatcagagtttttgactctgctcctgatttcattgagtctcgtttgtatggagatagaattggaaaaatatactgcagatgatcgattttcctctttatttgattggggtctgtattttttgttgaccctttggaaccatttttctttgatcaagtatctctctttgttatgttaatattgttaaaaaaaacattgtggaatacaacaattgagcaagtgtgtgtctgattttaccatgggttagcattgtttcttgtttcatgttcggaaatatgtgtataacacctccggtctagataaacttcctaattttgaagtttttttttctttgttaaacttgatttgaggtctgatcattggggaccttttttgataatattaatgactgacttgctttcttattctgactatagatatgtttggaatttcacatttattcaaggatttgtaataattaatataaatgtgtttcttctgaattaaaaaataaaaataaattttaatggaatttagggtaaaaaataatagccaatagattaccattacaataactataattataataaataattgagaatcgatttaaatgttttgaataaataaaaaattatattatagtttaaattttttattataaatttaaaatataatttatatacttaaaaatatttatttgttataaaaaatttaattatagtaaaataatcatttttcttataaaatatacttaatactaattgaaatattatacttataaatatcatggaagttgctaaccacaaaaggaaacgatattttgattatttgtagaaagataaaaagatatgaaattattttaaattttgtctttgcactgttaaacaaaaattttgttacttcaagaatgcacatctagatacacaaattaatatttttttaatttattattgttgtgtatttcaaatgtaaaatagatcctaattgttatcaagattacactcgagatgggaaatgattataaaatatcacttgcatgcattgtcatgtttactaagttgatagaccattacaaggtacttgtcacatgctccttgcttgcctagctacctactctcttagtcacattttccttcctcttagtaagtttttttattcttttagataataaaatgtggagattagcaatggaagtgtgtaatatatctattatgagtggttttgagatgaattccgtctagagaacagatgattttccactcacaattgttggaaaggttagtttctatatgatttttgttttattttgttttattcacataattcaagatgcttgtcattttttcttaagtgtctcgtgtccgccaatttcttgagtcactattgctatctttaccttcatgatttcgaatggatgacaagagagaatcaaacccgctcaattcaacccaatatttatagtaaaataaaagtaatttctactttatagaatctcatgtctcaattaagaggagtcatgaaaagaacgagttcaaaatctcgatcaattcttttttcaaatcctgtcggcagctgcacaagctctttgcgcgtgccataaatggcctacaaatagggagaatcctagaacaagatgagaagtaaaaagtcctgtgcagagaagtaaactcctttgagtgatgaaaacagaagaggacttttgaaggatcatcacacataaaattttgaaccttttagcggaataatcagaaatcttcggcgagaaattttatcttctatataatttcttttttattttgttctcctattctgcaacacagtttattttcttggaacaagatatggatattcaaatgtcacgtgttacatcttcttgaattcgttggatcagtaatgttgatgtgatagaataatttaaattttattattcttctatattctatatatatttattgtacgttcacaaaattaaatccaaataaaatgttaattatttcatctttttatattttaattaattctagcaggtttaaaatcataaaaataataattatgaaataaatattaggagttttaaaaatgatcagaaatcacgtttttaaattttaaaggaaagataaaaaatattttatcatgaaccaacaacaacaaaaattaataggaatcaaaaataaaattcaattatttatcatcaacgaaaaatatatttaaatatttttaaattttcataattttgatctactatttgtgtggttaatattaagtatattgttagagctgtcaaacctgtttttattaagtatattttataagaaaaatgattattttactataattaaatttattataacaaataaatatttttaagtatataaattatatttttttattttttataataaaaaatttaaatcttgtctttactctattgaataaaaaaaatgttgcttcaagaacacgcatctagatacataaattaatattttttttaatttattattgttgtatatttcaaatacaaaatagatcttaattgttgtcaaaattacattggagacctccttcccaatatgtatcccatttgatgtcataaatgggtccactttcccacatgcataccatgatttatgggaaatgattataaaatatcactttcttgaattatcatgtttactaagttgatagaccattacaaggtacttgtcacatgctccttgcttgcctagctacctactctcttaatcacatttaatattcttatagtattaaatgaactaagaatgtttacgttaggttgaagattatcaacctatgattccttactactctcagaacacagaaccaagatctcacgagaacctagaatgcaaaggaagaagggaaactcactcgtggaactcacacaaggaagaacagtcccaagggactgaatgttattaatttgttatgaattaatttgattacgataggatactactatttatacaagtgaaagcaatgagacccacttaaactctaacaaccctttctatttttaaccccttacagttatttttataaattgattattacaatttcccctccatctgaaagccttgcccccaaggccctctcatccactggcctcattaataaagaggtccaatccacttgaggaaactattgcttcagcttgtgcacctcatgccatgtagcttctcctggtgtggtatgttgccaatgtgttaacacttctgtgatcggcctgttgcctcttttctttattattttagctaaaatgtcaattggcatcagctcaaattgatcattgctgtcaaaacttggcagtgctgtagaaactggacaatctccatgatgtcttttcagcaaggaaatgtggaatacattatgtatgcgagcttgagctggtaattctagcttgtgtgccaccttcccccactctctctacagttctgtaaggaccataaaatcgtgcagctaatttatgaaacgctgagttaggtattgattgttgtttaaatggttgtaacttcaaatatacccaatctcccactacaaattctttgtttgtcctattcttgttagcatacaactgcatcctcccctgtgctttcctgagattcttgtgcaaaattgttgcaatttcctctcgagtcctgatggtgtagtctactgcttcaatcgttgtatcacctgccattaagggattgttgttgattggtttgtaaccatataaagcttcaaacggggtcatttttgttgctgaatgaaacttagtgttgtaccaagattcggcataacttaagaattcactccacttagagggcatctctcctgttgcacacctgagatatccttctaatactttatttaaagcctctgactgcccatcagtttgtggatggaatgcagtggactttagaaatttgactccatgcaacttgaagagttttgaccagaatttactcataaaaattgagtccctatctgacactatctcactgggccatccatgcaacttcactattgtatcaatgaacacctgagcaatcttagtagcattgattggatgccgtaatgctacaaaatgagcatatttggtgtacctatcaactaccaccagaatgattgtcttcccattagattttggcaagcccacaataaaatccatggctaagcactgccaagcttgagtagggacaagaagtggttgtaacaaactagctgacttagtcaaaacaggtttattcctttggcaaactgtacacttgtgcacccaatccttaacctctttctgcatccttttccaatagaaaatttgattcaacctcttatatgtatgtgatgcttctgagtgaccaccaaggacagattcatggaaataagcaagcaacttgtttctcacctcctgttgttgccctactactatccttcctttcctcttcaacacctctctttgccactcatactgcttataggattgttgtaacagttggatcttatcaattattttttgtattttattatcttcattgtaagtgtctttcactgtttgcagtaaatctgatcctatctggtaaattgcagcaacacttccttccgtacacttccttgataacacatctgcaattgtgttctctctgcctttcttatattcaattgtgaattgcagccccatcagtttttctaagccccaattctgcatcaaggatgttggtggctgttccaaagatgctttaaagccttctgatctgtcttgatgataaaatgattgtcgagaaaatagtgttgccacttccgcactgcaaataaaatagcataaaactccttttgataagtggataacatctgatatttcttccccattgccttgcttatatacgcgataggatgacctctttgtatcaaaactgcccctatacctgaacctgaagcatcagtttcaattataaactattctgcaaaattaggtagacctagtactggagcccttgttaatgccatctttaatgtagtaaatgcttcctcagctgcttcattccactgaaaatgttgcttccttcttaaaaagtgttgtcagaggttgtgccagctgaccataattcatgataaaccttctataatatcccgatagacccaaaaaccctctcagctgtttggttgttgtctgtcttggccacttctggactgcttctatcttgtctgcatcaagagctactcctaacttggaaattacatggcccaagtattcaacttgacgtttagcaaagatacatttttctctgttcataaccaatgtgttatctcttaggagtgtcaaggccaaggaaagatgctccatgtgctcactccaagtttttgaataaatcaaaatatcatcaaagaagactaagatgaaattccttaaataaggccgaaaaacatcattcatcaaattctggaaggtagttggtgcattggttaatccaaatggaagaaccacccactcacagtgtccactatgagtcctaaatgcaattttaggaatgtcaggctcccacattcgaatttgaatataaccactcctcaaatccaacttagaaaaataagtggcaccttccaactcatccaacaagtcctcaatcaatggaataggaaatttatttttaattgtgactgaatttaacttcctttagtcgatgcaaagtctctaccctccatccttcttcttgatgagcaccactggtgatgcaaatgcactcccactctctctgataaatcctgtttgtagcagctcttgcaccatcttttcaatttctgtcttttgggcatgtggatatctgtacgatttagaagataaaggggtattgtttgtcaaatgaatctgatgatcgtatttcctgtgaggaggcaactgagtaggaattctgaatagatcttcaaattgcaataatatttcagttaagtcttgttgttgttgttctgtcagcgttgtttccagatgtgaagtctcctgttgggtctcaagaactgaaatagataacaacatagcttttggtaaaatgcaattcataactatagttgctccttggtgctgtcgaccttgttgttctcccacgagcttcactgttttcctagcatgttcaaatttcatagtaagagatttgcagttccaccttatttctccaagtgttttcagccactgtgttccaagaattaccccaaagtgagatccaggtaacactaaaaaatccccaacaaattcatggtctttaaatttccaacgcaattgctcacacttcttgtctataattactggtttatcactggctaccaccacaggaaattctttgatacactgagttgttaatcctaatttcttcatccatctatcactcgcaaaattatgtgtacttccagtgtccattaagaatggtaactctgtattgttaataattccttttgactgtaaggtctggccactagctatccctttaagggcatgtagtgaaatttgaactgcatcagtatctaacagttcttttcataaggctataatgttctcatgttcttcctcctcttcagattcttctgatgcctcaccctgagcagtaaatatgacacttaatttcccccaaacgacacatttttctctatgattcttatcccatggctcaccacaaaacctgcagagaccttttgctatcctggcactcatttctcttttgctgcttgaagaaggttttgctgtagacatttcctttctagatggatttgtagaagattgagctgatggactttgtgtattggtgattggtgatggtcttgagttgactgttgtaggattccaacttctgtaatagcttctggcaccctcaaattgcttctgctttgtaccttccaatttcctttctaattcttgtaggacctcatcttgcaatctagctaatcgcattgcatcttgtagagacctagggttgtgaatacagactgatttttctaatgaagcatgtaatcctcccaagaaaaagctgatagccatttcttcagtaacatctaccctagctaataattgatcaaacttttcaaaataatcaagcaaggtaccttcttggcgtagtatagataattctgatatgggatcatcataattccccatgtcaaatcttgaagccatatcctgaagaatctactgccaagatttcatcttattgctgttatgagtcttgtaatgcctttgccaaacaaatgctttcccttccattgacaataacaaaatcttgccccattgagcttgtggcgcattctccaattcaaagaactgttctactttggctctccattcgcgataatttgtgccatcaaaagtggggaacaaaatttgtgctctgtccaaaatcttggcagaacctatctcgctgcccacctcttcttcttcttctgaatttgatttagcacccaataactgaacttgtttatagagtttctcgagcatggaattcatagaatccatcgccaactgatggtttttttattattctgcaatggccgcttgagtttcttgatgaatcttgtagttgtcttgctgtgaattctccaagatcttttctagaccttcaatccaatgctccaaatccttattggttgtattgcctaccatcgttacccgtcaactgataccaattgttaggttgaagattatcaacctatgattccttactactctcagaacacagaactaagatctcacaagaacttagaatgcaaaggaagaagggaaactcactcgtggaactcacacaaggaagaacagtcccaagggactgaatgctattaatttgattacaataggatattgctatttatacaagtgaaagcaatgagacccacttaaactctaacaaccctttctatttttaactccttacagttatttttataaactgagtattacaatttcccctccatctgaaggccttgcccccaaggccctttcatccactggcctcgttaataaagaggttcaatccacttgaggaaactgttgcttcagcttgtgcacctcatgccatgtagcttcttctggtgtggt

SEQ ID NO: 2208 - DNA, 7986 bp, Glycine max
  Intron number 5 from transcript Glyma10g19040.3 (locus Gly ma10g19040) derived from phytozome v7.0 (chr-ID Gm10; pos 23572108 to 23580093)
tgtggggtggcaaaaagagtacacctactgaagaggtattttatgtttttctttttttggctgtgttcttacctttgcatatagcatggcataaaagagtattttttttctcggggtttgatacttaatgaaagaaagtaatgaactatgttactgtaattcacatttctaggcttctgtttctttggaaatagtgctttacaatttagatagtagcaacatgaaagttttgatagcagaggtttaaattgtacatttaatgatgaccagttctgccgtacactttgaatttactgtgtaggaatactgataggaatctggttccaattgaagatgaggaatattgtagtattgaattgaaatggtataagttttagaagaaacagagctatgctcccagctaagggaagatttcccttaaccccaagctaatgccgaactatccaacaattaagaaagatccttctcttccctattttctcttttctaacagaatacattatttccttccctttttctctcttgtctaactaaccttccacttaaatccttttttttgggcctgcgagaatataccatgagcttgtcagtaccagacgtaaccttagtagctacttggtcagctgctccatttttgtcttgggttacttgggcttgggtacttatcaatatcacctttctgaggaactgcctggtcctcaatgcaaaaagctgggaattggtatcagcaccttttctagatggacaaatgttgtgttcaatagatcacgaactgatttttctctcatttttgcggttaaaggatactgatatggtctcacattcactgaagtttctcctgcttgtaatactatttgcatgatcatggtctcttgtgggagcaaactttttggccttagaaagatctgttgaatgtcctgcaaaatcaattctgttactgttgctgttggagtttgttctactcttctgcctaagtcgcatgggaaattccttcaacatcacactctagtgcctacaaaacttgttccaaggcagtaatttgtggttgtccccccaatctggtgccacaccacaaaccatctccctctcactttgaatattcgactcctttgtttgcagaggtttatttttcgcatcttgctccttgccctcccatataagtcttaagttttgggtcatgcgatattgaattggttgatatggataattcagttagttcagtttgttcagtttctggttatatgttaggtagtttgataactaattacttttaactaagtactgttgaaaatcagaataaatattctgattctattaataatagcggtatatagacgcattatctttgatttagaggaaatagaatatcctctatttatgtgtaaataatgtaattaacctacataaacatgcatccgctgtgtactctaagacactggtttcactcaattatcccttcttcaatgatcttcatttttattcagtttttgtggcaacttttcttcaacaaaaatcttgccaccgtctcttttctgaagtgtttttcggccattgccttctgctcgcagctcaagttcctgctgccatccttttctgctgtgtttttcaatgactcttctgtgcttcactggtggtgtgtttctaccattgttttccttgcccatggctatttatgattatttcctgtcaccaataaatagatgataattagctgttgtaactgcctttaatacagttacattttcagttacagaaattatctctgaattctattaacttcttgtgtttggtcctctaatgaaaaacaggattagatgcaatatgcaaagctgttttattatcacaaatcagaatcatttgcaatccttgttatgcagtggaacttgttgaatatccttgtagtttagccatttgtagtaacttagttggtagcatttttcagagggcaacagtgcattgtcactgtcatagcctctctctctctcttctttccctatcttttgtactctatatatatgtactagtttgaattcaataaagtaaggaagaaagctttattctggtctccttcaacttggcatcagagcgggttgccgccgtccccgccgcgccgtccgccgtccgccgtccgctgccgcgccgtccgccgtccgccgccgccggccgccatcaactccggcggttttctccggcgagaccagggttcggatcgcctcgaaaagcgcgatccacccctggaactcgtgcagccgtaggccgccgcacgcgcccacacgctccgcctttcctccgcgcgatttccggcgcgtgctgctcacgcgccgccgtaccggcgtcgggagctgtcccttccggtcccggcagcctcaccgtcacctcctggacctgtttcaagcttcaaatcccgcttccggcaagtcgtttggtcagcccttgtgtgtttgcctctcttgtgtgttagggtttgctgtttttcctcttaaatggcctcctctggacctgttttttccttttccgggaccccaaccatcaccactgccaagctgaactggaaaaactatccttcatggtctgcttccgtggagttgtggttccttggtcaaggacaccatgatcacttggagaaaacctccgattctgtttcagatgataaaagagctgaatgggagaagcttgactatcaattatgtgctgtgttatggcaatcagttgagctggatatcttggagattctccgatcttttaaatcatgccgttctttttggaagaaagcccaggaaatctttgccaatgatatccaaagcttgtttgatgcaactatgaaagttacagccctcaagcaaaccggtcatgacatgatcgctcatgtgggtaaggctcgggctgccgtggaagaactaagaaagttccttgtagctgattcattggaggaagtgaataggaaacttgacaagttctacatggttcttattttgaggagcttacattcagactttgatcatgtgcgtgatcaagtgcttgctggggaccaaattccatcaatggattctctcatcacccgacttctccgtgtgcctcatttactgaaggatgagaatcctactgatggagtggagacgtcagccatggttgcatctagagggagaggaagcggccgcaatagtcgaggaggtcgcagtggaaggggtggacgtcctcattgcacctattgcaagaggataggtcacacccaagagacttgctattcattacatgggtttcccgacaaggtcgcacaggtttctaaatcagagaaagcagagtccagattctctgatgaggagtatcatgagtacttgaagctcaaatcagagaagcccagcaaccaagctcaaccctcggctgtaccatgtttttcaacagcgtgtatctctcaatccattgagggtcacagcccttggatactcgactcaggtgcctctgatcatatttctggtaataagtcctccttctcatccttttctctgccaaaaattcctcacctcgttactgtagctaatggctccaaggttctcaaggaagtggtcaagtttcattgtctccctctttgaaattaaattctgttttatttcttcctcagtgtccctataatctaatctcattaagtcaattaactcgttcgttaaattgttcagtaacctttactgccaattcttttgttattcaggaacatgggacggggcgactgattggagaaggacatgaatcacgagggctttattacttggaatccagtccacctgggtcttgttttgctatctcgagacccaaacttttgcatgatcgtctgggtcacccaagtttatcaaaattgaagattatggttcctggtcttaagaatcttcgagtcttagattgtgagtcttgtcaactaggaaaacatgtcaggtcgtcatttcctcaaactgtacaaagatgtgactcggctttttctaccattcattctgatatttggggaccaagtcgcgtcacatcttttggttttcgatattttgtaacctttattgatgaattctccagatgtacttgggtttatttattgaaagacagatctgaacttttgcctatattcgtgtcattctacaatgagattgagaatcaatttggaaaaacaattaaaatttttagaagtgataatgctaaagagtatttctcgtatgatctttcttcttttttgtcttccaaaggtattatacatcagtccacatgtccacatacaccacaacaaaatggtatagcagaaaggaagaatcgacatcttcttgaaactgctcgttccctaatgctaaattcgaatgttcctacacatcattggggagacgcggtgcttactgcttgtttcctaatcaataggatgccctcttcttcccttgaaaatcaaatccctcactcaattgtctttcctcatgatccactttttcatgtctctcctaaagtgtttggttgtacctgctttgttcatgatttgtctcctggtttagacaagctttctgcaaggtcagtcaaatgtgtctttttgggttattctcgtcttcaaaaaggttacaaatgctactctcccaccatgagacggtactatatgtcggcagatgtcaccttttttgaagacacacccttcttctcttcctctatggactactcttcgtctctccaggaggttcttcctatctcttcagaccataatgtcagtgttgtcccatctccctcaccaacttcacctaacgttatctctccacctctggttatcgatcaacccaggacaaggcaaattggatctccagtacctgaagcctctcctagtgattctcgttcttcttcagccagtcctccactcatggatccttcctcttctcctactcattctgactcacattggcccattgccatcaggaaaggtactcgttctactcgtaatcctcatcctatttataatttcttaagttatcaccgtttgtctccttcatatagttcttttgttttctccttatcttccctcactgttccttccactattcttgaggcacttgatcatcctggctgaagacaagctatggttgatgaaatgcaggctcttgaaaataatggtacttgggagcttgttcctctccctcctggtaagacgactgtaggttgcagatgggtttacactgttaaagttgggcccaatggtaaggttgatcggcttaaggctcgcttggtcgctaagggctacacacaggtatatggcattgattactgtgatactttctctcctgtagccaagctcaccactgttcgtttgttccttgctatggcggctatccgtcactggccccttcatcagcttgatattaagaatgccttcctccacggtgatcttgaggaggatatttatatggagcaacctcctgggtttgttgctcagggggagtatggccttgtgtgtaagcttcgtcggtctctttatgggttgaaacaatctcctcgagcatggtttggtaaatttagtcatgttgttcaaatgtttggactaaaacgaagtgaagctgatcactctgtattttattatcatacatctcctggaaaatgtgtctatctaatggtctatgttgatgatatagtgattacagggaacgatactactaagattgtccagctgaaggagcacttattcagtcatttccagaccaaagatctgggatctttgaagtatttccttggtattgaagtggctcaatcaggagatggtattgtgatctctcagaggaagtatgctcttgatattttagaagaaacaggtatgcaaaactgtagacctgttgaaagccctatggatcctaatctaaagctcatggcagatcaaagtgagcttatcctgaccccgagagatataggaggcttgtgggaaaactcatttaccttactatcactagacctgatatctcctttgctgtgggagtggttagccaatttatgcagaatcctcatttggaccattggaatgttgtcatgcgtattctgaggtatgttaagagagctcctggacaagggttgttgtatgaagacaagggtagtacgcaactatcaggatattgtgatgctgattgggctggatgtcccatggataggagatctacatcaggttattgtgtcttcattggaggaaatcttatctcttggaaaagcaagaaacagactgttgtcgctcggtccagtgcagaagctgagtatcgatctatggctatggttacgtgtgagctcatgtggatcaaacaatttcttcaagaattgaggttttgtgaagagttgcaaatgaagttgtattgtgataatcaggctgctcttcatattgcctcaaacccagtctttcatgagaggaccaagcatatagagattgattgtcatttcattcgagagaagcttttgtccaaggagattgtcactgagttcattggttctaatgatcagccagcggatattttgactaagtccttaagaggacccagaattcagactatatgtaacaagcttggtgcatatgatctatatgctccagcttgagggggagtgttgaatatccttgtagtttagccatttgtagtaacttagttggtagcatttttcagagggcaacagtgcattgtcactgtcatagcctctctctctctctcttctctccctatcttttgtactctatatatatgtactagtttgaattcaataaagtaaggaagaaagctttattctggtctccttcaactgaactctctcttggaattatcttgcaagctgttttattagagcttgttgccaaaaagaaaacaatttgcaaccttgaggtttgaatcatggtgtacctcaaaagactcacctatcaaagtaccaacatttcaagtaccaaaactaatcaggcacccctggactggcttcttctatcgacctgtccaaaaaaatgataggacccatgctcatttaacattacatctgggagccatgataatgatgttaccatgtatttggcttaaagtttagtgtgttgtagaagttgcaaattcctagatattttcagtttaacacacaagtagggtgtagtgtccttttttgtcccttgcatactgtgggttcttggtttgcaggtatcaacatgctcctcttaaattttggagatagttgtcaatatggtattatttgttagcatcttttgaggtcacattctttttttttttaacattaacaagtcttcttcagttgtgcacgtgatgatgtcatcaaaccttcatcaaatttgtcttcatgctttattgtgaacgttgaactaggtgagctcaggcccagtgtgagggtaaagttggtacatatttgtgcaacagcatggattcaccgaagttgaaacattatgtgcatgtttggttaggataaattaaggaaataatgggggtatttttttccattgtttcaaaagcaatcagaaaaccgaaaaaaataatagtttttccaaaataaactgaaactgaactgaacatgtttttagtctgacctaagctgaaatgacctccaattgaatgggatcacttttgacaattgtctaatgttttattgacgagtgcaagtgttgcttgttaatttatgctagagattgagtttttggtgcaagtcgtcttatagcattaacctgaaaagtcgtctacctatctatattgtatataaaaaattaaagattgtacatattgctaaaaaatgcacctttggttgaggttgcatgtaataagtggatgagtggtggtatcctagtccctagtggttgatgtacctctccctgaggctgcgggatttgttattgtgttcctgttttatggcttgagtaatagcatagatactcatttatttttgtatttctttcatcttgctactgacaatgcaattgctgctttgtaaacgctcttgccaaatattgtagtctggccatcg

SEQ ID NO: 2209 - DNA, 209 bp, Glycine max
  Intron number 9 from transcript Glyma08g12360.1 (locus Gly ma08g12360) derived from phytozome v7.0 (chr-ID Gm08; pos 9041560 to 9041768)
acagacagggcaaacctcatttcttctgctccgttggtactaccaagagattctttgtagttgaatatttgtaaaacacacacatacttttactgttaaaaaataattacctacatgaataaagcaaagaatatgtttgatttagttattgactcttgaacatgtttgtggcaggataaagattccataccctcttgagtggggtgctc

SEQ ID NO: 2210 - DNA, 1267 bp, Glycine max
  Intron number 2 from transcript Glyma05g33510.2 (locus Gly ma05g33510) derived from phytozome v7.0 (chr-ID Gm05; pos 38136223 to 38137489)
aagtcgacaaacaccgttctttcttgcaattggaggttcgctttcattttctttttattattacctctttctattttacattgtgtttgtagctttaattttaattttccaatcacctagtgcttgagaaaatttatacattaattctgttattctgaacatagtaggaaatatagctgttactaaaatcattttctttatgaatgcattcacccttaccgtaatttgaagtcattagctgataaagacaacttcattctttgactcgaagttaattttgaatcccactttttctcccagtataacttttgtctttaaacagggtcttgacatcaatggaagattatatttgaatgaacaaggtattaatgcgcaggtcagttttgcccatgtactggttagcaattctgtcatgagcatctccatagaaagatatattttcttgtttaacctgattggaaatgccaagcgtgatgtccattacatgggagagttcgcttgcattataattatgaaaaatggtgaacttacaccccattttttaggtgtatgggtgtatggataagagaagtagaaagaaagaaaaaaaaatcgaaaataaagaaagagggagaaaatgatagttttgatgaaaatcgaagagatagaagaaaaatagggtgaaaataaggtagaagagaaagtgaatgtacaactatgaagcaccgatacttcattctgcttcatgtatctgtgtccgatacgtatccaataccgatactcttggatacttcaccgatatgtattgataaagtaaccaaacctatggaacaccgataactccatttgcttcacgtatactgatactctttagatactgctctaatacgtattggtgaagtatccaagcttttaaaccattttatgaaaatccaatacaactatatgaaacacataagtatgtataatatagaaacaccatttcttaatgaaccaaaaatgaaaattgttctttttatgggtgatttttatgaatttttataaatttttaaatatgtatgtatcttacacttattgtatcctatatattttttaaataattgtatcgccatatcagatatgtatcggatctgtgtatcatagatgtatgataataataactataaatatttacttagcgtacaacaatgtttataaacgtagctacgagacttacttacagtattttgcggtccaaatatgtaattctgatgtgatatattactgcagtatagcgggccatcaaaag

SEQ ID NO: 2211 - DNA, 1168 bp, Glycine max
  Intron number 6 from transcript Glyma15g03840.1 (locus Gly ma15g03840) derived from phytozome v7.0 (chr-ID Gm15; pos 2690114 to 2691281 reverse strand)
ttagcattattccccaaccagctggtaatgtatgcatactgacgataaaacgttgtcagttttatgttctaaccagtaactacacttgccaagttgtaatgcaatttctttccaagccctatataagtataaatattttttttacccagcattttaatatcctaccagaaatgactttgtatatattgttataaagtaaagtggggaatgtttcattcaaacttagggagaaagcaggaaattaaaattaatggaaacagaagaggttccaaaaagaaagaaatgaagaaagaaaaaaggatgttattatgatagaaaccacgtatctttgttgcagaattacaaggatggccttccctttctacaaaatggaatgctaacacactcagcagttcttgagagacttcacctcccaagtgaaaggccctaatctcttataaatgataaaatgatctgtctcctgcctccctccttatttttgtaggcaacatgccttatttagactatctaactaactcaccaatgtaactagctaatgggtatgtaacctatcataactaactgctaacaggggttatccaacatattctctagttgcaaatataagttttttgctttttatacagctaactagagctaaaaaggactaaaacaagttgcagtgttctgcaagtggcccaaatttttccttgataatttttatttgtgtattgacatttgatagtaagctattatatctcataccttgtaatcctttggagaatttgggatattttctttatgttgaaaaatgagaaaaatgaattcaaggtttagagtttgagtttacaactgatatttgtagtacaaagattgagagcctatctgaagtgtaatctgtcagttacaactgtcataaagacagttgtgactgattttcaatcagttaacagtagtacatgtaaggaagaggtgacacactaagtctatgtaaaagaaaacagagaaatgatattctctctcaatccacaactaatgctgtcaaatggaaaatacatatattcttgaagaagtgacataatctcttttatttgtcttcacccattagatccatggtattctctaaagtctaaacttctgtattttgtttgtttggcatgctatagatacagggaaggttgatttggtg

SEQ ID NO: 2212 - DNA, 722 bp, Glycine max
  Intron number 1 from transcript Glyma15g42750.1 (locus Gly ma15g42750) derived from phytozome v7.0 (chr-ID Gm15; pos 50180016 to 50180737)
tctaagaggtgaggttgatcatcctgtgttttgtattgggttaattgactttttcttgatgtgggtcttcagttttgtgttctgcagtttctccaatttatgttgattattgatttttatatgtttgtgtaaattattgttcttataatcctgctttcttgatctttgaacccgagaaaaaactattgtttttgttttccatctggggtgtgtcattcattgagcagaattcagaaaaaaagggttgaaagttgatactttttttcttgccccttttgttatcgaatttggaaaatctttatttgatttcgatagcttttgttagtggaaactcaatcaagttataatttttaacatatcattcattccagagacttctatggtcatgacagacaataaacctttcgtggatgttataaaaatgttgaattctgtaaaagcaaaatttggcattgatatctagtctgtggtttgtagttgacacttgatacgatttaactatgaaatcatttgaattgagccatttgttttggtttgtggaaatctggataaaaggttttaattggggaccttggtttttgattctttggacaagtgttgtgtggtccttttctttctctgttaatatgttctctattttctaatgcatcttgaagattattttaatttttgtaatttcttatcttctgaatcatgtagggttctttgcaagttttttgctc

SEQ ID NO: 2213 - DNA, 2668 bp, Glycine max
  Intron number 5 from transcript Glyma19g04970.1 (locus Gly ma19g04970) derived from phytozome v7.0 (chr-ID Gm19; pos 5208721 to 5211388)
gatcaactctacaaacttcttagggtaagttcaaattcaattcacacacgtttagtttacatttgaattgtggcaaacaataaactttacagaatttgttatataagaggttaaatgagatttggtcttgaattttttaattaaaaagttatctcgcataccatgcatggtaaaatgctcatgtttcagctaagtattactcatcattgctaaacttacttttttgcatgagaaaagaaagataaaatatatattttaaaaaaatgttttgttttctttcctttccttttacgtacttctctctctaggtatggggatccttctcctaaatttactttgttgagattaaagttttatttgattcaatgtggtgtatctacataaaaagatttatatgtttacattgaatttctaatatgtagttgtctttttgtactcttaacatttttgcaatagctaacatttgttttatgtaaagggaggagcatcttatcatctacaaaagtgggtggcatgctcacaaattgatttctttttcataaggaaattagatagaaaaatttacatggagtgcaaagtcattcttgggcaaagcttaacgacccaacatagagttttggttatggatgtaatgtgagagtggagaagagaataaggacaaaaggccaagatagagtttcaaagatcaactggtggcaattgaaggtgaaaaaaaagaagcttttggtgaatatttatggaggaagggtgtcaggaggcatatgtaagtgtagatgatgtgagacatagtggcatagggattaggaagttagcaaatgagactcttggtgaatcaagagctggactttaaggtaaagaatcatggtgatggaatgcaagtgagcaagataaagtaagggttaaaagggatgttataaagcatgtccttgtgtaagaatgctaaaaattgggggaaaatgtggtagctaagaagaatacagaagttggtttgatgggttataccacttcttaggcaccaaaagatttacttgcttgctaaaagtagggaaagaaaaccaagagactggattaagttacatgcattaaggatggagaaggcttctcagaacatttcaattactggtccagcaatattagacaacaattttttagtactaatagaggtctactttagctatcacttatgtttttctttgggttatatagagtggttccttttcagaccttttgtctgtttatggaaccattactatggctaccccttatgtatttcagtacctctggtactctttatatatataatatattatctttgctgaccaaaaaaaaaaattaaggatggagaaggttaagtcttggttatggaacgagacattaaggaaagatggacaaattgctttcacaagctatttaatgaatgactcaattttttgcatttggatggctaaacacaagggatgaagaccaaaattataccttttattgatgaatttgaaagcttgaggttaaaaaaccatggcaattggcaaagtggttggactggatgatatacttattatggtaagaaagggtctaggtgagaagggtgttggttggcttacaaaactgtttaacaacactataaggtctgagaaactgtcaacataatattatagtgttgtttgattcatgcagacatgatttacaataggaaaatataatgttgcttgattcgtgtggctggccccacctagtaggaaaatacttggttatagttatttatttttgtaaataattgttaaatatatgaatataaatttggggcatgattgaatatatgaatatataaaagttttttttcttcctttttttgtttggtaaaagaatgaaattcaaaataatcatttgcatccaattcaattaaattggatggctacacataggaatttttcttttctctttcccgatgagatttagaattattaatagattaatagaaaagaaaaaactgattcctaaatgatatgatctatattcatactttatatatattgtacatattccaaatctgtattccatcatcctcatttagggtgtcctcaaaggcgtttggtccaaggaataggtaagtcagagaagagtggataaaatgtcctttctttccctggtgataatgtgaaatttatcttaacatttttaactcctaaaagcatctccaatgggggtttcttaagtgaaaaaacagtttctaacagtttcttccccattggagcaaatctatgtggcaagaagagtttcttaaaaataagatttgtatcttctataagaaactgctttttagcaataaaaaataatatttatctgacacataacaataccataattaaatcataattaagtgaaaataaaaaatataaaagtgagtttcttgaagtttccttgagtttcttaccattggagcaaaattgtgtatggatttcttacaatgacatgacactatggggaccacaaaaagtaacttaagaaacccacttaagaaatttccattggagatgctctaagatgtataagtggcgaactacagttcatagttacttcattatttctgtccattgtgtttttttttttttttgaattatattaagaatctattccctggttggtcatgcaggataagaatcatcgtttc

SEQ ID NO: 2214 - DNA, 2340 bp, Glycine max
  Intron number 4 from transcript Glyma06g08530.1 (locus Gly ma06g08530) derived from phytozome v7.0 (chr-ID Gm06; pos 6202461 to 6204800 reverse strand)
atgtaagttgcattgcaagcattatatctttgtcttcatagttcttgttctcttggcacttcttgtaccttactacatcaccatacgaccaaatgaacaagatagagttgtcaagacaaggtcaacctctaaggttggcatttggcccgaccatgcttttagtgcctagcttaaacaacgatcttgttgggctagacttatattataactaagcttggccaaactattttttgagtttaaattagatccccttcaactcttgagccaatttaactgggaaggcaaaggggttgggttgtttgatgcttgtcaattcggttccctaacaaaaaatgatgcattgttagggtaaaactattgtctagacactatcaaaacacacaaaatttccatattgcacttaattcttttagtttttttttaaatgagttgcatcatatgttacgcttacaagttcattttaccatcaaactaatgatggagatgaaaaatttctaaaatgttgttgaaaaattatataaagcatttattttgaacttgtaaattttttagttgatatcaaactactgtaaatttttttagttgatatcaaactataataatggataaaatttatagtgataatggatcgaaattaggttgtgtttattggttgggtttggagtccatctattaggttatctcaaaatgttcaaatttttatgtagatttatttatttatggtggatttatattttgtagatacatttgagggtaaaaaattacttgtctttgattacttatgtgtgggcttattttattattttaaaatataggaattggatttaattttttttaatcaactttagtttatcgtggtgaataagaatagtttatttattttattatcttttttttataaagggaaattcataaaacttaactttcatgttttcatgcaaacccttctaccaatgagggattagttctagtgatacattcatgattccccttaagcaagtcttcaattcaagcaccgtgtatgtaaaaagccccttttgaaagagcagcctcattgtctcgcggatgtttttgcctcgaacaagattgccttttgtggggatatcaaggtttagaaccaaagaataaacccgatattgcgaatgtaataatttgcccaacataaaaccatggttttgaatcccagggagtggcacgtagtggccgaccccaataataagttttgatcaaataagcctatgaaatttctaacgactcctataggttttgtttagctttttcaataagtttcttggtgagatttatcaaaataagcttattgaattaagtgcttatgacactttcatgtgataagcttatgataaataaatatttaactaagcttccatagttaaggttggcttaagtgctcaacccgtttgacaactctaatacaacttccaatttgggattggtgaaaaatttggtgctcattcattttgaatgccgaagctactattttaaatttggttctcattcattttggtaatctctcaccagtgtgtttcctactgcttttgggttatcaattttgttgctttagaaaatttggttgacttctccgatattgagttttgatttaggataagttttattaagtctttatgaaggattggaagtcaagtcggaatgttggtttgaatgattaattgaagtaatttaaggctatcctgacgagatttcaaccaaatacatccatttaagttttgaggatacttggggcgagaaattggtgagatgttttctcatcttgttgttttagaaggaaggcgtgactagaaactattaaaaaatggtctgaaccatcaaaatatggcttgagcatgccaagacatggctcagttcgttggaaattcgtcatgaaattggtttaggccatggggaatatgtagggaaagttgggaatagactggaaaagctaggaacatgctagaaccagtgttgtcaaaatctgaccaaactggccagttggattggttgatctaggaaccatgcctttgtgagagatgctttctcgtccatcacttgagatctcatttagtgctttgtcttgttgtttgagatgaaaggcgcaactagaaactagttgaaaatggctcgactagaaactagtcaaaaatggtgtgaactttttgtttagtgggaaatcttgttgtgaagtttttaaaaggaattaatagttaatagattttacaatcgttgcttgcttcttcttaacatcaatccaagtagtttggtactttgtcttgggtgttctaatgcaatttttccctctactttgtcataggaggatagaagcaa

SEQ ID NO: 2215 - DNA, 7313 bp, Glycine max
  Intron number 12 from transcript Glyma03g22090.1 (locus Gl yma03g22090) derived from phytozome v7.0 (chr-ID Gm03; pos 27986060 to 27993372 reverse strand)
ttagaaacactgtggttactaaagatcttgaccaggtcagttgcactttcatagcaagatgcttcattctgatgataaatattaaggatccatcataatggtatttttcagatatgaaaatcattatgctcatgatttagaattgtttgataagcaaattttgttggtatagttttgtttgataatgcctcaataaggcttttcttttaacgtgaacatgggtagggaatcctcattatttacgcttgcatgatgggatttaaagaacaggttaccaaaaacaaaacacgcgattatgtcctgtcaattttttcttatggttagtcaatgaattataattgttacgtcattagttaatggtattatttgagtgagctagaccccttgctagtttcatgttaaatagtgtttgaagactattgatgatttggtagtttaatttattatgtgaagatgctggatttttaggttaataaatttattcatacaatagtttggtttgaaagttagtaacgtacgtggctattatttcctagtatagaattttaatttttaaattagcactgagttgaaaagttgaaatattaggaagaatgcacaatatataattatatatatatatatatatatatatatatatatatatatatatagtagttaaatactaatacaatttaagatagtaattagctctagtaagttaaattagcatgtagtttgtgatttttctattactggctcaaatatgtgtattttttcatttagtaaaccacaatcatgcactttaacatcacatcaatatttgaaggggaaattataaatttcgcacaaataataataaaaaaattaattattctacatcggttgagtgataaacgatgtagaaacccttcaaattctacatcggttgacttataacggatgtagaaaccttgccattattacccattctacatcggttgacttataaccgatgtagaaaccctaccattcaacatcggttacaaccttagaaccgatgtagaaagctcacattccacatcaattgacttataaccgatgtagaaaccttgccattattacccattttacatcggtcatcagtcaaccgatgtagaaaccctaccattcaacatcggtttcaaccttagaactgatgtagaaaactcacattctacatcggttgagctacacaaccgaggtagaaaggtcgcctttcaaagacggtcctctaaccgatgtcggtattcaacgacactgtgttaccaccacgcgtcataaccgatgtagaaaggctattagaatcgatgtagaagaccttttttttagtagtgcctatctttaaggagcaagttagttttaatattctgttttgctaatatcttgttatctaattagtttatcttttgttatttattgtatcgctggtgagaacaatttgaattagaatagaatagttttatttcctccacatacgtattgtctctcttctctcctctgttttttataatttcctccacaaaatcaacaattggtatcgagagccttattcttacgagacatgtaccatggaaggtgaagcaagtttttcccacataactcttccaatctttgatggagagaattatgatctttgggaagtgaaaatgcaatcctacatggaatctttggatttgtgggatgctgtggaagaggattatgaaatatattcgttgcctgaaaatcccaccacgacccaaattaaaaatcacaaggaaagaaagatgaagaaggcaaaggcgaggtcatgtttgttcactggtgtttcacaaattatattcatcagaatcatgactcttaaatcacccaaagtaattttggattatctgaaagaggaatacactggagatgatagaatacgaagcatgcaagtgctgaatttaaggagggaatttgagcttcaaatgatggaagagtcagatacaatcaaagaatactcaaacaaattgttgggtattgccaacaagataaagttgttgggaagtgattttgctgattcgagaattgtagagaaaattttggtaacggtgccggagaggtaggaagcatctatagcttcattggagaacacaaaggatctgtcgaaaatcacattgacagaagtgctacatgccctgcaagctcaagagcaacgaaggttgatgaagcaagatcgtgttgtcgaaggtgctttgtctgccaaacatcatgaagttgatgaaagcaaaaaggattttttcaagaagaatcaaccagcaaggaacgaaaataattcaaacaaccaaaacaaaggtaaggataaaaagaaaaattatccaccttgtcatcattgtggcaaaaaaggtcatgcacctttcagatgttggaggagaccagatgcaaaatgtaacaagtgcaaccagatagggcatgaagcagtgatctgccccaacaaaaatcaccatgatgagggagctcagattgctaatcaagaagaggaggaccaactgtttgtggccacatgcttcttgagtagtgaatcaagtgaaagttggttgattgatagtggttgtacgaatctcatgacatatgataagactctattcaaggatttgaagccaactaatgtctcaaaggtcaaaattgggaatggtggctatattgtagtaaaaggaaaaggaactgttgcaatttcaacgtgttcaagtatcaaattaatatcagatgttctttatgtacctaatattgaccaaaacttgctaagtgtaggtcagttaattaacaagggatataaagtgtcctttgaacatcaacattgctttatctatgacattgctggccgggaagttctaagggttaaaatgaaaggtaaaagcttttcatttgatccagcagaggaggagcatacaacctatttcactcaagtcacacccacggaattcaagcacaagagacttgatcattgccatcttgaaagaatgctaaacatgaaaaaaaggaaatatgcaaaagaaaatttgaagaagtttcaaatgaaggaatgcaaatctgttagcacactaatgaatcaaaaggagaagttcagaaaagaagaaagtgttgataacattgatgaaggatattatgggagcttgattggatgtctaatgtatctcactacaacaagaccaaacattctattttctcaaaagaacaaaactggaatttttgttgacaatcaagtagctattgctattgcaaacaatcccgtgtgtcatgggaagactaaacatttcaatatcaaggtctattatttgataaagatgcaacaaagtggagaagtgaacttaatttactgcaagtttaaagatgaactggctaacatgtttacaaagttactaccaatcaaaaaacttgaactcttaaggcaaagaattggagtttgcagttccaaaagcaaggaggagtgttgaagatatacttttgtaactgcataatattttattttttagtttttaaaataggatttagtaaataagttggtttcctatattttaggagtaagtcaatcttaatggattaacctagtcaataagtgattcctatctttaaggagcaagttagttttaatattctgttttgctaatatcttgttatctaattagtttatcttttgctatttattgtatcgctactgagaacaatttgaattagaataaaataattctatttcctccacatacgtattgtctctcttctctcctctgttttttataatttcctctacaaaaccaacaatcaatacatcaagtacatcctcatgaaaccacaatcgacttcgcttcccaagttcctttattgaacttccacgaattatctctcttcccatttgttgaagtaaaggatgcattccaagtttgttgttcttttcaatttttacgaggctacgctctataagaacaggtatcccaatatcagcatgtagtccacagccgtttagtatctctgtaacataggctctatctttaccaataaagaaacaacatacatcaagaaatatatccttttccatgggatcacgtaaaccatcaaagcttattcttaatttttcttgaacttgataattgggaatttgctttagttttgacaatacactttcccattcgtcaatcctcctaccatgtaagtaagatccaagaacttcaagagctagtagtagtcctccacaataagcaactacatttcttgcaagttcattgaagtcttcttttggatttggttctccaaaagcgtgaaaacaaaaaagctcaagagactcattttcgtccatttcctccatttcataaacataatcaactttaaataggttcagtacacctgcatctcttgttgtaatgattattacagatccttgaccgaaccattcacaatttccacataaatcttctaattggcgaatctccttcacatcatcaagtacaatgagcaccctttttcctgaaagtctattctctatcatagttgttcccatcccaatgctatgtatcttgacctttgtgtttaggacatcgaaaagcagttgttcttgtaaatgaacatgtcctttactattgggtccatgggctaagtatgaatccacttatctttgtacatattagattaggatttcattatttttgggtcttgtatttagggctacataatgtaagtagggtaccctagaaatataggatttttcaacccttgttgtaacatcccatttttttcataaataaaaagttttttagtaaaaataataaaaataaataaataaagtagataataggtcgtaaatgcccctagctataaataacaacatgctaggtttttcagactgacttctcagcctcctctgcctctcattttcgtttttccccttctctcaaaatcctttctttttcccgtagctcactaaacctgtctcagaaaaacgacgatctcagaatcattcaccgttggattgtcgtgaaatttaaacaccaggttcacaacccaactccgagaattctaaccgttgggaatttcaaaatcatgtctgagcttataggaaaacccttcgcattgtagccttttaatttcccgcagaaacccaaaactgtctcagtaaaactatgatcccggtttcgttaaccgttggattttcatgaaatttggatatattgttcgaaattcaattgcgcacactttcaccgtttggatttgcgagataatattcgtggagagaaaaaacgaatcgcatgaagacagtacaagtggaagtttcaatcccttctccgtctctctgacatttgggaattctatcagagtagtcggaggaataactaaaggaatctcagggaaccgctagagatgctgctatcgctggctgaagacgcgtgagtccgctcagaggtaagggatgagttattcacaattgggaattagtgagaacatatgtaaagatccttagagatatcaattggaatgagtttttgggatgtttttgcaattttcattttatccttataattattacaatgaattatatatgtttgacagaccaattgttgtgaaattaatatgctattgtgttgagcgtgaaccctataaatcgagtatttttctaattaatatgaattgatgaaataaagtaaggaaaaatttagagagagatattgattttgtattttctctttttcttgctttttttaggtttttatatataatttaaaaaattaatgtcataattgaaattgaccaaagtgttcatataattatttagaatttgtgcattgaaagcttactttgatatttgtgattcaatatgatgtatgctagcttatatatagagaggtagttatttatattaataatttatgtaaataatattgtagagtgttatagtataattccaaaaattattaagtgttggagtttgagaatattatggttaaatttgatgaacatgtgtgtgttgtaccttatgaatatcattaggaatgttatgagatggttgatgtgatgttatgagatgttaaagtgtggacatgatattcgattgtgaataagtggatgtgtttaacacttgatgttacattaattatattgtgagctatgaattatacaataatctggccagtgtttatgcgcagtgttaaagagaaagtgtaggttcctagttaggaaccagtgttaaattgtagcgcaattgtgttaaacatgtttgaaacatgagtgtgaggtcgtgatattgtataattcatgagcaatgtttataaatgaaatatgtgatgaattatggaataatatgttgccttgagattataatattcttattgagattgagtaaaagtgtaaagtagaacatgtgttgaattgtgaaatacatgaaaacatgtgatggtggattgtgacattatgagatgtgaaattgtgaatgagttttggttgtgaataagtgtgtgattaactcttgatgtgacattatttgtgttgtaagctgtgaattgtacaataacccaaccagtgttatcttgagaaaagtgtaaatgcgcagtgttaaagagaaagtgcaggtttcctatttaggaaccaatgttaaattgtagcgcaatatgttgtacgtgtttaacacacgagtgtgaggtcatgggtattgtataattcacgagcagtgtctgtgtgctaaaatgattttaggggttggacttgaatcaggagggagaggccctgacggactcttcggagtgtaggtcttgggggtcaccgggtttgagtgctcctttaagcctattctgatcccatatggttagagtattctcgcaaaacattgtgaccctgactggtctccctatgatcttacttagtgagattgacctgacaaacccattgtttggtgtgtcttattatgtactcctaagcgccccatagtggtttttcactgacatggtaccacattgcatataggcttgagtcttagcataactgtctcatgcgcttgctaattgtttattatgaaattgatgtgttattatgtcttgatcaaagcgtgtgatttttgtgtaatgtgattgatgattgaaaagtgattgatgattcgtgtgattcttgtgtaatgtgattgatgattgaaaagtgaacttggaatgacagtggtgaaattacgtgaattacgtgtaactaagttttatttggtttatatgatatgtatatctagttgttttgtttctctattagttaggaatgtgataactcactccccgtgtattgtttgtgtttggatcctgtgatgatcttgaactttgtgttcaggagagcag

SEQ ID NO: 2216 - DNA, 5106 bp, Glycine max
  Intron number 2 from transcript Glyma12g00260.2 (locus Gly ma12g00260) derived from phytozome v7.0 (chr-ID Gm12; pos 28169 to 33274)
caaggtataaattcttccttctctaaattttttttattgtgataacgtgcaaagcatagcaacctaaataagaagagaatttttggattggcattggcttcttatgagacgcttttatcaaatgtgcattagtaaaaagtaaaaaccagctatttgtggttctttctatcgattgttaaacagaagctgcggaattgccattttctaacaatatactataatatggttatggcatcgtgtaattctcatggctgctgcagtgatagcaagaggtatggtggggaaagcagtacttattctttctttttgacacaacagattctgattgttcagacttcgatgactattcccttgcattcaatgttctttaaacatggttactacaagtgttctcacatcttttgcaaactcaaacccatgacttgaatgagacctctttgattgaacacttctaccaaattttgtgacagactctgctgtgaacaactgttttggttttctttggtaacctgtctattttgagtctcattctttgttttcttctttttctccaatcatttcatctgtttccttgtctgttctctctatttttctatattctgtaagatacactctactcctttgttttgtgtgtctatctattcctatgtgttctaagtctctacttctctttgttctctgttctgtcctttctgatttaggatcagtggttctctaatagagttttgtgaaagagagtgattgagagtgaggaagatattattattcaacctaattctttaatcaatacatgctcggtttatatacagcttgacaaacataacagaactgagtaactaaataactgtagttagttagttaatacagttgtttgcagctgtaatgacagctgtcaactgttgtactaagtactaacaaaagaaaaataaacccatcagagtaggtatactctaataccccccgcgagctcatgaggggttggctgaaagcttttcaagcactctgagcttgtctctgtaggcagaaaaggtggaaggtgtgagcttttgtgaggatgtctgcacactgatcaacatcaggaatgtgaacaacttgaatcagattagtgtgcaccttctctcgaacaaaaaacagatccaactccatatgtttacttcaagagtggagaacagggttatgagccaaagccactgtacttgtgtcacaaagaataacaggagaagcatgagagtccttgagttcagaaagcagagacaaaatccaagtgacttctactgcaactaaggtcatgcttctatattcagcctcagtgctggatcttgcaacaacagtctgcatcttggaccaccaggaaattaagtttggaccaaggaagatagctgcaccagatgtggacctcctgtcatcaggatcagaggcctattttgcattacagtaggcatgaatggagaaaggatgcttggtggaagccggctggaacattaatcccaatgatatggtacctttaagatatcttaggatcctcttgacagctgaccagtgctgttcagagggtttagacataaacgggtcaactttattaacagaaaagcaaattttgggtcttgtgattgtgacatactgaagtgcccctacaacagacccatataaggtagggtcagagacatcttcagaacctgtcttagtcagtttgcagcctccaaccataggagaagaaataggtttttgattcttccatgttggttttggttgagttcagacttctattctcaaaaaataatccaaatcacctagatcctttatggaaaaacagcattcagtttggagacaagggactgaatgagattggaattgcttccaattatcatgatgtcatccacatagactaggatgcaaacaacagaattttgctcagaatagacaaaaagagaaggatcacacttgctggaggaaaatataaactgtaggagagtagcttttagtttatcacacttgctggaggaaaatataaactgtaggagagtagattttagtttatcaaaccaagctgtgggagtttgttttaagccataaatggcttgtgcagtcaactcacaagctgcttgttggaggattcaaaggctgagtcatatagacttcctcttgaagggttccattgaataaatcattcttcagatggaaacccttggcaacaagcctgtctatatatttattgagtgtcccatcaggattttccttaatcttgaagactcatttgcagccaatagctttccttgaaggtggcaagtaaactagagtccaagtgccatttctgagtaaagcatcatattcacagtaagccatgtgggattgttcagggcagattttgtggttttggactcaagatgagtgagaagtaatatagggttgagtcttggcttaacaatcccagatttagcatgagtacacatggagtgtacactgtcaggtctaacaatggaaggctgtgaaggagggtcgaattgaatagtatcaatgactgatgaagtttcattgagattggaatggatggttcaggttcattagctggtaaagatggtgaagcatattgactgtcaaaatgtgttggaagtggtgttagaagaggtgttgggatagtagaatcatgaatagtattagtggtcggaggatgtaaagtaggttgtaagggtgttgggagagtaagagttgaggttgttaggtgtttctgaggtgagtaatgagggattggtaaaaggagttttgtagggaaaactggacttgttaaaagttacatctttggagatgtatattcaaccatcagcagcaaggcacttgtagcctttgtgagaggtagagtagcccaaaaagatgcattactgagacctatactgcagattgtgcttgttgtaaggtctgagcagaggaaagcaagaacagccaaactccttgaggaaactgtaatcaggtaatttctgaaataagcttgggtagagaacttcattgttgatggaagaggagggaaatcagttgataagataaacacttgaagtgaaggcatggtcccaataatgaaaaggcatattagcttgagagagtaaggtaagaccaagctccactgtatgccaatgctttctttcaactacaccattttggtgatgggtgtggggcttatcaatctgtgcaaaattcccagatcattgagaaacttggtgaagggtctgaactttctactccaatctgaattgacagctttaatgggaagattagactgagtttgaatatagctttgaactgtttaaaaatctccaatgtttctgatttacttttaagtatacctaagtaaacctaccatgagcatcaacaaatgtaatgtaatacttaaaaccttaaggaggaggaacatgtgcaggaccccacaaatcagtaaatatgagttcaaagggttttgaattgacagatttagatcaagaaggtggaagtctatgaaacttacaaccacagcaatgattggaaaaatcagaaacatttttattgattggtggaatattacagattttaaagacaattttcatagcatccatactagggtgtcctagtctagaatgccaagttgaaaaggaaattgaattacaagctgtatttacaataggaacaacagaagtacttttattaacagaaacagactgaggagtctgaggcaccaaagattgtaaagttggaaattgataaagaccatcatgtcccactaacccttgaagaagtatttccttagtgtcctgtgatgtaacaagacaaaaagaaaaatgaaattcaaggaaaacatcattgtctttgcaaatttgactcactaattagttttttagtaattgagggaacaaacagcagattatttaagacaagagacaaattaggttttaaaacagagggaaaggtagagacacctgaattgatgttaagtccctgaccattaccaatagtaatttggtcaggaccctcaaaaggagttaactgatgaatgttttgagacatattggtgacatggtgtgggatgcaccaaagtcaagataccagctctgtgagggagattgagcagtgctggtgagataagcctgaggagcagcctaacatgtagaactcaaaggcaaagggttgggtgaagtgtaaggaagctaagtttggtataattgaagatagacaaactgtggtgggaacctgcatgatggagtccagaatggtgcgcaccactgagctggtgcttgagttgtggtagaggcaacaagagagcccatcagagtagttatactctaatattcccactcttctatttgttctcaatgattcttgtagtgttcaggtcaaggatcattgcagactactaacaaggctggtccagagtggaaatattgtcattccttggaagaaaataacaggagcactttttgtatgtgattcatgtggaaaaatttagctaatgttatgacaaaactagtcaagtaactgtgttaaattcttgtatatcctctccattaataggtttagttttgacttagttggatactaaataaaataactatgaattcaaataaggaatcggctttctaattagtcccttattagcttttgttcttggtgtattaatgtagctcaatagctcattaaagaaattaaattcattaatataaattattaagaagtgtagtttctgtaagcattaaatactacttacatatcctctccattaataggtctagttttgacgaagttggatactaaattaaataactatgaattcaagtcaggaattttttcatctgattaatgctggatcattttaagtgaaaatctattttatttaatagtgaaaccccttccaattccattgttatttttattaaataaaacttgtggttctcagaataatttcatgcagacttcaccaatccccctgtatgcatcagttggttaaacatttgtactgttgctagtctttctgaaattatataaactagtgtctgccattttattgagcattaaactttgtatttggttttactttggcctgaaattattttatattatttcagattagagatatccgcacaaaaa

SEQ ID NO: 2217 - DNA, 9173 bp, Glycine max
  Intron number 8 from transcript Glyma04g36560.1 (locus Gly ma04g36560) derived from phytozome v7.0 (chr-ID Gm04; pos 43079503 to 43088675)
attcggtaatttcaattcttctgctcgctaatggttgtaacttgctcattatattacatcccatctttatcttgtgctcaattgaaattacacataacagacaaacctcggttgttgttgctgagtggtttaagattaactgattaacataatcttgtttaggcagttgcaaattatggtttggatatgggaaaagtcatttgaagtttaaaatgatgaaaattatgatacttaaagttgttctttgctaagtattcttttaaatatattccaaattgtttgtatgtaaaaatgataataaaaagataaaatcagaatagtctattactagtgtggtttttgtgtataatgctgtatgaaactatgaatgacaaaagtattatatatgaaattagaacttacgatcacccatggaaggcaatgagaataaatgaaagagaaggtcatctgatgtgtagctgcccaaggaatgcagcttgtggaaaaatggacttggcatttttggtctttccttgagttgccaaattcttttcactatttcaaaataaaataaaaggttatataggcatagattggcttctattgcctggatgagttctggaataggatcactttttgtatgcctactagagtgaagtgtttcaatgcccggtaaagtctagctaccatcctgacttttgatattattagagtattgtacagagagttgcagtattcaactgcactctcaattaaatcagttagttaggagttaattttatgttttgagttagttagttataactaactatctaggcctatatatactgagttgtaactcaaagatgatgtgatcctgactaggagcggatcgcttgatacaggctacggagatttggatgacgccacttccaatgaaggaagataagtcaggatagacgccacaatgattaccttgataagtctgagattagtttaacaaaggaacccagagagaagttctcaccaaattttatgaaaatgccaaaagtttttttattgaaaaaagaaaaaccaatacttatagtgtatctgacaaaataaatagacatgggccttcaaaacagtttgggtcaaaattacaacgaaaataattataaattaaaaatagaacatatttattatgggccttcaaattaatctggacctttagcaacaattaatagtcttgatagtgtctctgtctttgggccttcatccttctccactcgggggctttgtccttttccacttgggcctttagcctgtatttgatcagttttaggattctcatcattccctccttcttggaaaacatttgccctcaaatgtccaggatcatcaccgggttcaagtaccacttccttccttttcttgttggcttgcttgacataactttcattcttctttgcaatttgcaccttcacttggtcatacaatcttttcacatactcaactttggtctatgcatccttatgctgagtctcttggggcttgctgttgtaagttggcctgttaggcaatgaagcttctggaaggagatcaacttgatggtctatgcttcttgaaggtggcagtccatgagagattttcttgggaaagacatctttaaattcctgcaataagggttgaacactaggagaaacataaatagttaactgattagaattatcactctctcttgtgtatcactctatctatcaggtgtatcactcttcctttttctattcctctgtgctgtctcactattgtctttctcttgttctctcttttctctccttttgatttggtcatcacacacttctctgagggataaaggtttaagaataattttctggtcatggtgctggaaagaaatcttgttggtgaagccatcatgcactgctttggtgtcctcttcaatgttggcccttactagtgccatctccatctccttgtagtactccttaacaatcaaaattccctgggataacctctggaatttctgtcgcatggttctactgtagctagttggaacatacatctttcgcataacccttctcatctcagttcatgtatctatctcccgtccttcttctctctttgatttttcttccaccaaacaagagcatagtctcagaatgtagctgctgctaacttcaccttctgctcttcagaataatcattataggagaatgtatgctgaatcttcatcttccaatcaaggtaggcatctgggtcactcttgcctttaaaagggggaacattgagttttactccctcaattctgtcctgtccttctattcggttcggtccattattgacccttctgttcctaccataaggtctcccaccatttgggttcatttggtgctctagtccttctattcgtctgtagagctcttcattgttacggttcaacaattgttgcatttgtgtagttatcgcgtccagtaataagcattgagatccgtccaattgatgataatcaccaccaccgttcaaacatatttttttttttactcaaagtctgaaagacacaagaaacaagaacaagaacaaaaacgtgacaagaacaagaacgaaacaaagacataaacaagaatgcaacaagacgcaaacaagaaaacaaataacagaataaggacaaaacacgaacctggacaaattacaaagaaaaagaataggataggatagaacctgtatgaagagccgaagctctgataccagatgatgtgatcctgactaggagcggatcgcttgatacaggctacggagatttggatgacgccactttcagtgaaggaagataagtcaggatagagtcacaaggattaccttgattagtctgagattggttcaacaaggaatccagagagaagctctcaccaaattttatgaaaatgccaaaagtttttttattgaaaaaagaaaaaccaatacttatagtgtatctgacaaaataaatagacatgggccttcaaactagtttgggccaaaattacaacgaaaataattataaattaaaaatagaacatatttattatgcgccttcaaattaatctgggccttcagcaacaattaatagtcttgatagtgtctctgtctctgggccttcatccttctccactcgggggctttgtccttctccacttgggccttcatccttctccacttgggcctttagcctgtatttggccagttttaggattctcatcagttcattgaccaataatcatttccacttcttctttctaaagtttttccctctcaaaatatcttctattatgatttgatagaattcttttatggtatcaagagcttggtaaggttgtcaatggcggcacaaagcaacgcgtttcttgctccttcttttcctcattcgattgcacataagcttgatgatttgactttccttttatggcgtcaacaagttgagccagtcatcaaatcacattgtcttcaatgtttcgttgtcaatcctcagattcctctccgttttctttctgaagaagatcatgaagctggcatagagagccctgtgtatgaagtatggcatcagcaggatcaagtgctgcttacttggctgcaatcgacgctttcaacgtcgatcgcatgtgctaggatgcgctcactcctatgaggtttgggagcacattcatgactatttccataaacaaacacgtgctacagcacgtcaactgcgaactcagttacaggctacaaatcttggtggaaaatcgatgcacgagttcttgtcgcaaattaaagctcttttagatgctcttgcttccttcggaagtttgattatgcttcaggaacatgttgactccattcttgaaggcctaccatcagactatcactccatcattgcgattattgaaagtttgaacctctcccgatcggttaagtcgaagctcttcttcttgctcatgaagcacgtctaaataaattcaccaaatagactctgtccgattcaccttccatcaactattcacaagcacatcgcaagtctctagcggttagctctaatgactattccatgccaaacaagacaaatccagagagtttcttggcttttcgtggtggatctggctgtggtggtggtggtggtcacggccgtggtggtggccgttttgctaacttccagtgccaggtgtgtctaaaatttggtcacactgcttctgtttgtcactatcgctttgatcagtactatcaaccaaactcaaccttggtacttcatgatcctttgagtccaaattattctcaggccacctccactcaatctcaaaaaattacaacaattattcacagaatagtaacaattatggccaaaattctggtgatactagacctactaatgtttgaactaataacaattacaaatctgccagtaacaatcatcagtccaatcctagtgctttgctcacaaatgctcaacctcaatccaattccactaattggattccagattctagtgcttcatttcatgttacttgagaatcacaaaacgtccaacaactatagcctttctgaaggtcctgatccagtgttgtcaaatggtggttatggcggcgccatggcggtattgtgtggcggtttttttgaaaaaacgcctccaaatagcggtggtgttgcgggtttcaaatggcggtgccatggtggccgccgtaggcttaacgatggtggcagaatggcggttatgatggaagaaacttttttttaaaaataatttccccaaaattacagattgggtcgtcttgggctgacctgacccaaccctaaatccgtttttctaatcaaaatgggatgagtagcacgcagcacgcgaactcccgaactccagtgcgagcacgggcacgagcagcaggcagcacacagcacgcaccagcaacgacggcaccacgcacgcgagcaacagatggtgatggcgacggcagcagcaatggctacagactgcgacggctacaggcacgcgagcattctgttttttttcttctgtttgacacccttttttactttttggctctattttttttttttctgtatgacactcttttaatttttggttctactttttttttttttttttctgttcagccctcttctacttacaatggctgaaccatcatctaatgctgcaacaaggaaaaataagacagaccctggttggaaatattgccatccacttgtggaaggggatacaaacatcattgtttgaactcttgaatgagtttatttggtgttggttattgtgtgaactcatgaaacttttttagtttatttgaatgctatccattgtattatttaatttttatttatatttattttttatctattgttttatatatatatatatatatatatatatatatatatatatatatatatatccgtcatttgccgcaacgccatccgccatatttttatggtggatttttggcttttcaccatgaaccgtcatccgccattaacaacattgtcctgatcagatcttcataggaaatggtcaaggtctgcaaattcactcctctggttcttcctatttcacttctccatataattcctctgtctctttatatcttaatcatctattacatgtgcctaaaatcactaaaaaccttctttcagtcagcaaatttgccaaggacaatgatgtttactttgaatttcactctaattattgtgctgtgaaatctcaggttaccaatgaagtcttacttcaaggcaatgttggttcttatggtcttcgcagttttcctcacattcagtttcaaccttcaactgtcgttgcttcctattgtttgtccagttctgtcaattcctgtaaattcttctaataagaatgcagatttcactgtcaatccattcaatagatctagtagtctttggcatgacagactataggtcacatgagtgtcttttcttgggttattctacttcccattaaggatacaaatgcctttctccttctggcagaatcttcatttctaaagatgtcttgtttaatgaatcaaaatatccttatgcttccttatttgagtccacagcttcttctagtaagtcctattcttcagtttccttccatacctatcattgctcctaatctgaatttccctatatcatcatctcagcctacttcttcttccactcagcctactcagtctgatcattcagaacttgctaatgttcctcttcagtcagtacctaactgtatatctgttcaatcagaaactgctactgttcctcttcagtcttctaatactgagaaaacagcttcaccaatggctgataatgctgtcataccctccttccatttcttcatcatcaaacactaatacaacaaaatcttcatctgcaagaactccttcttcacctagaccagccaatactcaccctatgcagactagatttaaatctggtattcacttacccagaataattccttctcttcttttaactcactgtgaaccaaagagtgtgaaacaggccttgactgatccaaattggctttcagccatgcaactagaatatgaaactttgatgaagaatcacacttgggatttagtgcctcttccatcagacagaaaagctattggtcgtaaatgggtttttagggacaaggaaaatgcagatgggtctatcaataaatttaaggctagactagttgccaaaggttttaatcaagttcaaggctttgattttttagaaaccttttctccatttgtgaagcctgttagtattaggcttattttaactctagcaatcacaaatcaatggatgcttgttcagctagatgtaaataatgcctttcttaatggcttgcttaatgagactgtctatatgtctcaacctcctggtttccaactatcaaatccctctctggtatgtaaactaaatattgccttgtatgggctcaaacaagcctcaagacagtggtttgagaggctggaatctgctctaactcagtttggttttgtggctagtaagtgtgatccctttctctttgtttaccagacttatctcacactgtgtatcttttagtttatgtggaatgatatcatccttcttggcagttccactcagttgattcagcacctgacatctcaacttaattcaaaattttctcttaaacaaattggtctgctagattactttctgggaattgaagttaagactcttcctgactagtcatcactcctcactcagtaaatatatcagagatttgttgcagaaaacaaatatggcagaggctcaacctatttcctctcctatggcttctagctgcaaactttctaaaacaggctcagatctcttttctgatcctactttgtatcggtctgtagtgggtgctttacaatacttgactatcactaggcctgagatcaactactcaatgaacaaagtttgtcaatttatggccaatcctttagattctcattggatttctgcgaaaagaatcctaagatacttgaaaggtacagtgtcgcaaggtcttcatcttagacctgctgttttggggaaactcttcgtgtcttctgtgatgcagattgggcttctgatattgaagacagaagatccatttctggttctgctatctactttggtcctaatctcatctcatgctggtcccgaaagcagcaggttgttgcaagatctagtacagaggcagaatatcgaagtttggctcagactgctgctgaaatatcttggattcagacccttttaaccgagttaaaagttcctttcagcactcccattgtcttctgtgataatcaaagtgcagttgttatagctcataatcctgttcttcatgctcggaccaagcacatggagattgatgtcttctttgttagagaaaaagtcttaaccaagcagctggttgttcatcatattcctgcccttgatcagtgggcagatgctctcaccaagcccctctctccaaccagattcacgtttctaagggccaaactctatgtgcttgagactccttcaaagtctcacccaccttgagtttgaggtggggtattattgtactgagagtcgcagtattcaactgcactctcagttaagtcagttaggtaggagttagttttatgttctgagttagttagtcataactaactatctaagtctatgtatactgagttgtagctcaaagttcagtggccaataatcattttcacttattctttctaaagtttttccctctcaaaatatcttctattatgatctgatagaactcttttagatatgtagctcctgatctctctattaaaatagaagggcacttaagttggtattttgcaggagctgcacacattgccactttatgaagtttccatttgagtttttgctaatgcattatcagtttttatttaacattgaccaatgactttatttccattaaaaactagtttgagggcattaaattccagcgaatcaatttttattagctttcacatgaagctttctttatttgttgtcgtcaccattacttctgggacaagttgttaatcttatggatattatttgggagcaagatttttgccttttgaccttctgtcagtcaacaagtcttgcttcttgtttccattttattgtgcttttaagctccttttcatctgttaggttcttgaggttttccctcagcaatcattttaatcctttttttaaactctctgacaggcaacagccacactaatgagtacatatgtctcctattgaattactacaaaaaatatttaattttcaaaataattttagtgatggattaaatatccataataaaatgttaatggatggattggatttttttaatgaatttttaatggattgtaaattgactaatggattgtttttagtccatctattaatctgaataaaaaattatccagtctatccatttgatggacctaatataccatttaaatgtaaagatgctggcagttacttcagttgtgatgttgaagaattttcgagttccctatctaagccaggttttattcgcggcataaaactaatcaggctatgtatgtggtgcactagttactgtgtgtgacttcttgtctagtcaacgaacatcttaaagcaaaatatagttatatttacatacctgcagagtacagattatcactagaacaaaatctcaatattcttgtagtatcagaaactaaattattttgatttttctaggg

SEQ ID NO: 2218 - DNA, 9745 bp, Glycine max
  Intron number 10 from transcript Glyma07g34600.1 (locus Gl yma07g34600) derived from phytozome v7.0 (chr-ID Gm07; pos 39622468 to 39632212)
aatttgggagaattgtaagttttccacattcttcacctcgtatttttgtttttttatggcactaagatcatattatgttgttttttttaatcactgcattgacatttttgccttgaacaataatttttagagacactttatgatcacttaataatcttatacacattgaatttcattaattcaactgcttgtttgagagttcactataattaagtcaagtatacacaatttcaatttataaattatttgataattcattaagccactataatttaatgataatacacgtttcaaattataagtgttagttataagactacatgtgaatgttcaatttatccaaaatttgacatgcatgatcatcaagataatatcacataattcatcagttgggtttttcaaatttgtattctagaattagttaagtggagcaagtttgccaaactttctcccggtgtaagtagattcttccccataaaactatggttcgccaattttatttacctgtcatcatttcccctaatctcctatttaattttttacttttgtattgtttttcattttttttgtttggattgatttagttgtattagaatgatagaagagagaggaaaattgagattgagaaactgttattattcaacccaactaacaacagattacaaaggtgattatatagtaggataacaacccactatcataactgtcaactaactagagttagttgatacagctgtcccaaagctgtcagcactaacagactaaacaactaactataactaactaactactaactagagaagttagaataacagccaaacaaaaaaatacacatcgtgtaatgaatactcttattgtaattgttaggctctgaatgcgctgatggtaattttgtatattatgtgaattactgagactgagtttaaccttttaggtccactgataacaaatcaatcttttgattctgagtaagaaattcaaattgttaagggtgtataaatatgttgtgtgtgtgtgtgtgtgtgttcaggactgcgagtttactcatgatcctgcaattttttggggtccaacgagcttaatctcatggagggtcgcttgcaaagcggatcacatccgatcgtgaattttttcttcaactcgcaggattgtcgatcctgaatgagtttcaatgagatgcgctttccggttcgagtttggcctggcccagtttgaaaacatgtaaagccctctgttaggcttcccaaaatgaaaaccaaaatcgtgctcacttccttttccgtctccttctgacgttggcacatcttgccatgctcttctttctgtttgaaaaaatctgtttctctattctctgttcttggttgattttttgcttcttgttgcttgcagcttcttttcttgcttgcctactgcagctgtgcattgtgtgctctattagatgttcaccattcagtgttttgttggctgagaggagtgcttcgggtggttgtgtgttcttgcttgcctgaggggtgtcaggtgttagttgtttgggtgttctctgttctgtgtttgggtgcagagtaatgtgtgctcaattagaagacatgaccataggtagttttgaggaatgatcatccagaagtttaaccagagagagatgagagagagaaacagagagtctgggtgggtgagagaaatagagagtgggtgagcgtaggatcccgacggaaccccaacggaaatgggtatgggcagcagtgagaaatgaggaaaacaaattggtgggatacatctgatgttcactcgttctatttcacaagatttcctgaagatatgaatgaaactgatttgtggtacgagtttaaaagatagggggacgttcgagaggtattcatcgcaagaaaccgtaataagaggggcaagagatatggatttgttagatttaagggggtgaaggatgttacatggttggagagaaagctggataacatggtagtaggaggattaaagatgcatgtcaatgtaccaaagcatgaaagagacgacggcacatggagaagctagtagaggaggacgacaggaaaaggggaaacaactctaacagatgaaagaggcagtctcgtatgcgaaggtcctgatgacggacagcaagaacctgacacgagggagaaatcccacaaacccgagttcaactggatctgtatctcatccgtcggtgcagctgaacatatctgtggaagaaaagacatggctaaataatacatgggtgggaagactgaagaacctcgcactgtttgataggatggaagatgatctcatgtggcatgggtgagatggcattacgccaaaatatatcggagatgacatggtattgctaatgggccttacaaagaccagagctgcacaaatggcgaaggaagtaaatgaacaaggctcgtccttattctactcattggaaaagtggactcctcaactgagaactggatactatctggtctggcttttatgctggggtataccattgcatgcctgggacttggagcacattaaacagatatgcgacggcggtaggagaagtggtggaggtggacgacgacatggacgaactccacaggctggataaggggcggataactgttaagacaccacgacaaccattaatacaacacaaggtctcagcatggattaatggggtagaatacaccgtgcatatggttgaagaaaaatgttacaaccaggataaatgcaaatgttgggggagaagattcatagggtcttcggaggaaataagctccgatgacagcgacagcgaaatagggacgcaaacgatgaacgaagatgtaatgtcagaaacaaaactgtcggaggaggattctctgccgagtgccgcgggcggtgggcagggtcaaggagtcacggtggcacaacggactgatggacaataccagtccaacaaaccacagatcaataatcagaggttactgacacgagcacatgagtgggtcatactagacacttgcagtgatcaaagagaagctgaccgaagcaaccttaggcctgataaaagtgaaaaaatacaggcacaagagactgttgatgagtctaatcgcaccccaagtagccgtaaaggaaatgaggtcaaaatcaatgaagataagacagagaagggattaataaaggagacagaaatggtagcagcagtaattgcggaaagggaacatgcactggaatgggaaaattgtaaggagggtagtgggagtgaggtggacctagtgacgccaacaaattttgaattagtggccacagatccatgcgttggtttacaaaatgtcgagggtggtggaccctcaatgggcctctcaaaagatactcttcatgacaaaacaggagttgcaaaaaacaatgtcaattgtgatcaaaaaggcccaaggcacatggagaaggtatactcaagaagcagagggtgtagaaagaaactgggtcatgggcacattgttggactctttaaaaaaataaacaacaacacccataatgaagtcaacagcgtaattgagaaccatgataatctctcaccagaaatgagaggtagtgggttgaaagaagtggcagaatggaaagcactgaacaaagagcagcctccaacacaagctccactgcaaaaaaatagccatgaaacatgtgttaaagtaagggaagccacatcacaatggaacatggtgcagaatctgggagttacatgtgcgacaagagatgcaacagtgtcacaaagttaatgaatattgaggagagggataaggaggaggccgacaagttgggaaatagggggtctggataatgaagatcattacgtataacataagggggctagggagaggggtaaaatgggaatcataagaatggtaaaaaagaagagagcaaacatgttgtgtatacaagaggctaagaaggaacatttagataattatatttgtcatgctctgtggggagatatagacgtcaagtgggaaatgcaatcagccatcaatagagcaggaggactactatgtttgtggaacgaaagctctttcagattggataggaagttatgtgggcaaggcttcgtctatctagaggggatatgggtccctgatgggcagaagatgtctatagtcaacacatacacgccatgtgacatgattcaaaagagaaatttgtggaaccaaatcagataactgagagatttaaaccaggagcgttgtggtgcatacttgaagattttaacagcattcgaacagcagaggagagagtacggctgagtcaaaggagggtaaatgataccaatatggatgatttcaacgaatggatagaggaccttcaggttgaagatgtgccctgtgtggggagaaaattcacttgatacaagccaaatggaacaacaaagagcagattggacaaatttcttgtctctgctaattggttttggaaatggcaaggcacggcacaatttattttggaaagaaacttctcggaccattgcctagtcgtgctgaaatctgaaattgctgattggggaccccaacctttccagatcctaaattgttggttccatgataaatatttttgaagggcagttcaagaatcttgattgaataatcaattaaggggatggggggttttgtactcaaagaaaaaataaaaggaatcaaggccaccctaagcatggaataaggatcattttggagattccctgcaaaagctagtaaccattgagaaggagttaaataagctagaagctgaaggtgatgtaagacagctatctgcccaagaattactatgtaggaaaaagctttaggaggagttgtggtcagctgcccaatctcacgagtccttattgaggcagaaagcaaggtcaagatggatcgaagagggagatggtaattccaagttttttcatagagctgtaaacgagaggaatgtttgtaaatggtgtccgggttgacgaacctggaagggtgaaggaggagacacacttgttcttcaagaacagatttcaggaggaagagtgggtgaggcccaaactagatggtgccagctttaaagtcattggacaacaacacaatgacagattgttagggccattcaccgaaaaagaaattaaggatgcggtgtgggagtgataagacccacggtctagacggccttaatttcaaattcattaaggaattttgggaagttatcaaggttgaagtgcttcgcttcatggatgagttttatgttcatggaactttcccgaagaggtgtaatgcatctttcatagccctcatccccaaggtaaacgacccgtagaacttaaatgaatgcagacctatttctcttataggtagcatatacaaaattgtggccaaggtgttagcaaggaggttgaaggggttgctgccaatattaatagatgagacacaataaacatttatagaaggtcgacacttgctacacaacactctcattgcaaatgaagtgatccacgatgcaaagataaggaacaagtcgtgtctggttttcaaagtagattacgaaaaggcttatgatttagtatcttgggaattcttgttgtaaatgtttaagatgatggggttttgtgcaaaatggatatcatggattaaaggctgtctaaaatccgcttctatatccatactgattaatggtagtcctacgtctgagttcaccccccaaagagctctaagacaaggggaccctttagctccattcttatttaacattgttgtggagggactaaatggattggtgagagaagcaatggacaaaaacttgtttcaaggcttccttgtggccagaaatgaggtcaaagttagcatattgcagtatgtagatgatacactttttcttgggaaagcatccatggaaaatgtgaaagcgataaggtgattttgagaagttttgaactagtctcaggcctcaaaattaacttctcaaagagtagttttgggacaattgggatgtcggagagttggaaggtggttgctgctagttacttaaattgtaggctattggtcataccttttctatacttgggtatctcgattggggcaaacccaaggtgttccaagttgtgggattctatcgtcaagaaatgtgagagaaaattggcaaaatggaaacaaaaactactatcatttggaggaagggtaacactcataaagtttgtcataaattctattcctatattttttttttcagggctctaaacagcattctggacaaactggtgtggatacagaggcgttttctgtggggtggaggtatgaagcataagaagatagcgtgggtgaagtgggagtcggtgtgtctaccaaaggagaaaggaggaattggaattaggaaccttaggaagtttaattatgatcttctcggaaagtggaagtggaacctcttccataaccaaggagaattgtgggctaaaatactgatttcaaaatatggtgactagtgtaatttggagggggaaagaaggggcagtagagtatcagcatggtggaaggatataaacggcatagcttctgctggcgtagatggcagttgtttagttaaagggataaaatggaaagtggggtgtgaagcaaaggttaaattctgggaggatggatggaaggaggatggagtatcacttaagcagaaataccctacacttttttccatatcaaagcagcaaaatcatgtcattcagcaaatgggcagtttcatagatgaaggatgggaatgggacttcaaatggagacacgaactctttgatggcgagatggatatggctgtgaggttcttagaagatttagaaggcaccagcattcacctggatcgagaagataagtggatttggaaggaagatacatcgggtgtatacacagccgggaatgggtacaggttgctcatgtcagatcaaacgaatgaaaatcaggatggtgcttttacagagctgtggaaggtcaaggttcctagtaaagttgctttcttcgtgtggagactaatcagggacagattactaactaaaatcaacctgcacaggagaaatatggatatacatgatcccacatgcccattctgcaaaaataaagaagaggatgtagcacatctcttctttagttgcagaaaaatcatgccgctttggtgggaatcatcatcatggacaaacatctcagcaccacttccacaaaacccgaaaatgcacttcctccagcatgtggttgggaaagaaaatggtaacagctttcaaaaatggaaatgctggtggatttccttgacttggagtatttggcagcatcggaatatgattgtttttgaagaggaaaattttaatgatagtaagctgttggaggatgctatatttctcagctggacttggctaaaaaatctggataaaggatttgacatgccatttcatcactggtccagcaacatgaaggaggcctttatgtgattagggtgggataattatataagtgggggtaactgtgagataagtataatttcagaactatggtttcttaattcatgttgtaaactatgtattaggacaccatagtcctactcaaactggccactgtgtaaccccttcagtacaacttgtactgtttaatatataatacaatactatttttgctgattaaaaaaaacaacgtgctcaattttgagttgtgttatgtgttggatcttaatctttatgatttgttatgagttatgcattatttttattgtctacattattttttaagtatgtgtatgtgtatgttgagaatcagaatattattagaataggattagtttcatattctttctttattatcatatcagaattataggaacaatatctcctataattaattgtaattaatctatataaagaggcattgttgtgtaattcaatcacacggctttcacccaaattttccttagttttatcatattcttacatgatatctagagctaggctgagggaataaggaaaaatcgttcctcaccggggacccactgtctccactgagcccttttggtcgctgcctttcttttatcattctttttccagtttccggtggaccattccactcgttgcccttcttctggcaaactgtgtatgttttctggctagtgttcttatccggtgaaccatactctgctgtgcagaagctgtcactgctagcaccacctgatttgtgtcctcgtcgcccagtcaagcccacctttctccggcgccattggagctgccacacgttggcaccttctccggccatctcttttaatcgttttcacgttttgtcagatctactcctctccggtgcaatctaggtgcacccactaccaccatggtgctcgtcttcctccgacaagtctgaccatgtagtcagtcaccatcgccgccgctggagatttcactgtttgactgtttttggttcttttcacctgccgattccatttctgatgttcttttcttctctacccccctggtgggtctccacaattggttctaaagcttccaaatcttggtattaagaaagtcggaacttgctttgaaccttctgaggctgatgtgtttttcagctctctctttttctagcaatattctctgatttcaccaagatccctgagttgttgtcttcaaaatatttttttgaaacttccaaatgttagttttaagaaagtcggaactttcttttcttagaccgatggatattccagctctctctttctagcaatattctccgccttcaccaacatccctggttttaagaaatgtctcaccatgttttatgtttttgattgggaataaaattttcttgtaacaagctgagagcttagtaagcttccttgagggggagtgttgagaatcagaatattattagaatagggttagtttcatattctttctttattatcatatcagaattataggaacaatatctcctataattgattgtattaattgtaattaatatatataaagaggcaccactgtgtaattcaataacacgtttttcacccaaatttccctcagtttctcctatttttacagtgtataaatataattttacatatgcatataagttctacgatctgagttacaatcctcaagttactatcttttaccctcccttttgatcctcttacggtatggtgtgtttcacaacatttggtggtacggtatggtgtgttttcttttaaatgccagaagaaaagatgatctgtaatgtattgtgctttggaatagaaaagtaccacaccattgtgtctgaagatttgttttgcatgcttgtgacttgtgatatgtatatatagagaggggagagggatcaacttacaccaatagtaacttttttagggttactcctcatccttgccattcattttcttggaatctaacagataaaattagtgacttattaatttgaagaaaatgaatggtgaagatgaaaagagttattcttggagtaagttgatccctccatatatgcaatattttaatcagttttaatatttttttttttggtcaacaaagataaatatattcatatatatgaaaagagtaccagaggtactttaatacagctgtttggtttctgagatttggttccttaacagattaaattaaatctggataggaaccgaatccaggcacctattacactattagtatgtagcttaaaccacagtgcatcacttatccttgtttgaattattcttttgttgcttccagttgactcccaaggaagcctttcgg

SEQ ID NO: 2219 - DNA, 2518 bp, Glycine max
  Intron number 3 from transcript Glyma01g08580.1 (locus Gly ma01g08580) derived from phytozome v7.0 (chr-ID Gm01; pos 9982058 to 9984575)
tggctccgtaagtactgtatcatgctgatattccatgtactatgttatatttgtcaatgaagggggaaactagcttttctattttcttaagtatttttgtttaacttaactctgattgtttctttattcttcaaagaataaatatttacataaataaaagacgtacaagaaggaaaaatataaaatatgctagttattagagtattcttactccactaattttacttagtggagtaagaatactctagatcaaagggaaatcttttctgctggcttgttctatgtattttatgttttaaatcaaattgttctagaacaatgttaaaataacataaaaaaaaagaagaaagagaggtaatgtagtggaacaacttgttgttataatgatttaaatgttgtacaaactgattagtcttttgtttatcttattttatatgcaaatgtgtattaggatatatatctgttcttatttgaagacaggattctaggtgtatactattatataaaaaatattagatggtttcacactacgatctaactacccaagggttctttctatgttgcaattaaattttatttaacagaggctggtattagtaatcaaggaaaagttggcatttgttagaagtttctaattacattccttggattcacatttgtgggagctttactatgagcaagaatgccactctggtattttaggaaaaaaaattatttgattagtgtaccatccagatatgacttgactaagcatgacgttgccccttatcaggcttcagtgcctctcttgagctcacggctcagggctgtgcatcatctggatattcctcagatataatccaagatatactcaacctcaacccatcccatggaacatacactacttgagccctccagcctgataaatgtttctgccctattaacaaaacaaattgatctctaattccatataaacaataggttgaatttcaacaatatcccaaactcaatctaaccaattccttcccccaattgatatcaggactggtcatgatttaagctcccattaaatttgccattaatataccaccagtgtaactgtaaccccatgaggtggtatcttcaccctttagactcaggctaggctagtccaagcaccctttctgtgctaatatggttaaccagagttgtatgcatcattatcaattcccgaatagtgatgcagagcagctgaccccaaaactggcatagtaggatagtagatagtggaatcatcactattatgaaatttatagatataaattaagtaatttatattacatatgctaaaacattaaaataaaaactacacaaaattaaagaattcttaattaatgattaaaattcgtaatttgaagtcaaacacaatttaataacaagagtcaagtgatataaaaggaaaaatagaaagtataggaagaaagggcaatgtaaggttagctatctgaacccaacaatgaaagagaaaacataatgtagacatgctggaaaaaaataaaaataaaaccgaacatagacggatagacccctctgtgacatgaacagaacagaggccaaaggatatgaacagagtagagaccacagaacagtgtgcgaatgttactgcggaaacatgcaggaaaggttgctagagagagtgagtcttcattggagagaaggatggtgttcgtcaccatgtagccactgctgtacaggacactttagttctctgggaaatggacgaaaaatgcagtgtgacaccaacaaagttgctgtagaaatatggatcctcactgatgagaagaaggctaaggtctgaccttgtatgaggtgtgcaaaatggagagaaaaggggaagaagaaaattcaaaagggaaggagggcacctaaaatagctcagaataacgctgttcatggctcaaaattgtgtttttcgacgtggctatcttggacactgttgctttgaacatagtgaaatgctctatgattagtaccatgggtgcaccacggggtgcaatgcgatgccgctatggtgggctatcgtacgcaactagtctggtcttacgtgaacaattagcatttaaaattcttgggaatttatttttgaactcttaaaacttaaaatagtttgtttggttctcaatgcataattgcatatttctaggaatatgtgagataattcttgaaatgcccttactatgtaaaaacattattcttttaattttaaatggagttcatagaaaaatagaacaaaaaaaaatgcaaggtgattattatacccatactatttcaaattcactcttctttctttctttctaccatttagaagtggaaatcgagtttaaattatgagagaaatattggaggaatacaaagagcaagaaatgggggagagagagaggattgtgaattggaatgagtatttaattctaactgtgcttgtttccttttttgttatgagggaagtgctgtaacatttttaagtaagcctcactctaattatataatgttacaatcaggt

SEQ ID NO: 2220 - DNA, 4104 bp, Glycine max
  Intron number 5 from transcript Glyma16g18440.2 (locus Gly ma16g18440) derived from phytozome v7.0 (chr-ID Gm16; pos 20331942 to 20336045 reverse strand)
ggtataccagtacgcattgagctactcttggaattttgtacttttcatgtcggtctgtttttgatggaattatttcgcagttccattgataatgtgactcgtgttaaatatggaaattcctgcaacttgaaatgatgtgccctattttttcatggacctgttatatgttcaattgaccctatttttgtgtcaatgtgcaatatttcctgcactttggtagcttggttcatttgagtggagggttactgtcacatttttaagggtatcccttcggataagtagctgctttaggataagactaggcatttggcttccatatgatttagagcacataggttttagaaaggtgctgttaggattcccagaacccaacagagaaacaaagagaggggggggggggggggggggaatcttcccttgattgttatcgatgatcaaatgaaaaacagtgtacaaataggagttaccttctcaaatggtgcgtgttttccccactagtgtcgtgcctaacaggtgcccccatgcacgttgagggattagactcatgtttgatttaaagctttgtacagcaattataccaagtcaatgacactatgaaagacaatatttcttccaaaaggaaatctgcttaattaaatggcctcgtgaaataataattgaggtattcaaattaattcagtaggttccggaagagtgtcatgggtcaaaaaagttctggctattaaaggattcacggtccaagaaggatgtcttctctagacttggctgtgaacatttttgttttctatccaaaatattttaatgtcatttttaacactgaggagctagggtgacaagaattgtatgagctaagaagagttggatttgtagaaaactgctgattcagcaatgagttgggtccaggactgtgtgggctcctaagaacattagaacacaattttttgtgatataattcaagcaaatcctttggtgttagagtaaaaataagaatatgttttctatacagacaacagagcttgccattttcctttgtcctccaaagctagtagtagctggcaatgttttaggtctcaggctattattgccttttttctttctcatgtgaacttgttcagacttttgtcttgtatatatattgagagtttctgagtgggaaattactcaagcacttctgtagttcagtattgtagtccatgattttaacatggtagcaaagcaggtatgatcccactttgttgtctctccgccacagttcattgttgcttgcttcttttgtcgccataaaccaccgtctgtgccggtgaccattttctccggcaacctcacggtgcgccctgtcaagggcaacctaacccaagtggtattgggtctagattgtggcccaccctctctcatgtgcggttctcgtgcgcttctctcctttttttatcttttgtcagacatatttctctccagtctgattcaacaacatccactaccaccattgtgttcgtctctctggtgagtttgaccatgtagtcagcaaccatcgttgctgccggggccaccatgtgtcatattctgggcattggagtcctctaccttgaggttgttttcattttctgaagcttcagttcatatgttccaagcttagagcatatttaatttatttgcgccagcttgaggggcagtgttagaaaaaactgttttatatctgttgtaaatcttttagtggggaaagacagtaaagatgggactcgaagctcaaataatgaagctacgccacatagagtgctgaaatcagatgttgactcttccagattcagaatccctttctattgaagaaattgctgttcaggtttctgatttttggcttgacgaaatgaaggacgataagttgctggttgataacttacaagtgtcaatttctgaagttccagctctggatatccccttaatgagcttgtttttggaattctgttaactttttgaatatcacacatatgaaggaaacttggcagctaagcgacccttagttcgccacaatctctgtattaatctctatagtggaaaataaggaattgaattgcttggctagtttgattaactatggtcataagataggtatgctggttgagtttgtgtctctggagattattagttggaatttgagtgggttggatgattgtaggaagaggaagagagttagggagataatttcaatagcatcactgactattgtcaagcttcaagaaactaagctggagagttttgatgctcttcaggatattagggacttaagatttaaagattatgggtcttcttgccttctttaggtgtctgtgagtgccatggtattgctgtttggacaccagatgtgtttctaaaatcagttcttttcttggtaccttttcagtttcagtttccttggatgtcaaaggatgagggaattggtgcttgacttcagtttatgggcctcattctccatatttgtgctcttttgggattagcttagtttcacgttttacatagtaataggagagagttggaggaccaagataaacagaattaaaaagaaggaaagctgaataaaaataaaagaggagagtttcctagaaaagagaacagagagaataaggagaggttgccagagaggataacaaaggacagaaggaatagaaaaaagataggaaattatttttcaccagagaaggaagttgccacttgttcaagatgtgacaagtcagtggctgaagaggttgattgttggagagaaaagattgatggctgctagacttagatggctgaagagaagagagtagcctttaaatttagggatcatggactcatatctcagacatggtgcccatctctatcactctcttaatttggggactcatatctgagtcatgttacctttggatatctagtatccctgggtttgggcaatggttcccatgttaaattttgggaggacatttggccatctgggtgggttacattcctctttttaatgcttttccaagactcttctctattttgtccagtgcccctataagccaattttattcatcttttgctactctttcatgaaattttttattccattgaaatttgaattatagggaattctctgaattacagtcccatatggtatggctgcattcaatccatctctttctaatccagataagaggatttggtctcttgacacctcaagcttattttcttgtaaacccgactttcaatccgtctctttcatgttccaggaatgactctatacttttagataagtccatttagtaatcaattactccctctaagatcaaatcctttgtatgcacagcagttctgaaaagaattaataccaattatttacttcaattttgaagacctctaagtgctttgtctctcgactattgtgtgatgtacagatgagttctgaaactaattctcatttgtttttgcattactcagtaatttcctttttacggaatgaccattagtgttttttggtaaagattggcttcacccaaaggatctccaagagttggtgtgtattatttttagaggatttggcacttgtagatattctaagaggctttgatgctgttctcaatttatagttatctagtatatctgtttggaaagaaatgatagaatctttattgttctttaattgcctcgagtttattcaggatttgaacagttcatgtaacttttctgtggtgttctactaatggtcttttcagggttctatctttgctagactttcttagagattggcctgttctattgcatgttacttgttttgttttgttttttgcccttttagttttgatttacttctggaggatttctcttcgtcttgcatttgtacctgtcatctaacctaataaattattcgtaatcaaagaagttgattgtgatttactgacttctcttttggctgggattcactttctactaatgcattcttgctggacttccagttatcttgggtactttctgttgtatcactgcttctaggagccatgtaactcatgttcttggtagccatttttctcttatcatgttgtcgaagctttatttcttgtagacgtgccaagctacaacgtatctttt

SEQ ID NO: 2221 - DNA, 2868 bp, Glycine max
  Intron number 5 from transcript Glyma19g30210.1 (locus Gly ma19g30210) derived from phytozome v7.0 (chr-ID Gm19; pos 37873780 to 37876647)
ggtcaggtgccaggataaagaaagaagcctttcaggtatttatctctgtaaattgaatcttatccttcaaatgcatccaagtttgtcaaaattgtataagcaacagaagttaaagcatttagatttcagtgctctgttccttgagtggacacatagttgtcaatcccaaatagtggggatggcagttagccagatgactgcaattttgaagattgaagatacgagctagatcatgtatattacccccatataaatgctcaaatataaaaagttacacaaagtgaaagatatattcataattaataatcaaaaatcaaattcttaagctatacagtattcacacaagttaggaacaataagtctaagtcagataaatttaagcctccaagtgatgatatcttaactgtgtcaagggtaaccaatgaagtaaaaaaagtcagagcagaatagaccatgaagatagggcagagtggtgagcaggtacaacagaatgaggatttagaaaagaaaaaaaacagggtgagcgactgaacagagccaggaaaagggttgtaccttcttctcagaagactcttgtgagatctgaaagtagaggatgtgcaaactatcaacattacagtttgtacaaaaccgagaagtaggtatgtttcagcaaacacttggtgtggccagtttgtattgaaacaagtgagagagcagtgtatgttgttcttatcaaaaaagggatgaaatcatgaaaataaccccaaaagattgttggacaaggggcaaaggttgttttttaccccctatttagcagtggctgctacaactgtgaattgccatgattttgagcatgattgacggtatgacacacgacacagtaaccctctggtgatgccgtttctgtagcagggaccagctgcaatgcaacactacattgtgaaagtgctgctattgataaccctgactgggaagtaaatgattggccattcagttgaccatgttttccaaaggccatgggaagtatacatagtggttaaaacttaatagtgtgctatagtgatgtagtagtgtgaagcagccagaggctgctaatctggactccattggagagttttgtgtcgctggagtctcagctgcaaatagcattcactcccaaaatttgtggtcattgctaccgctactgttgacctaggaaaatcccttcattatacttattattggtagggaagtggtccttttttttcttttgatatttcagtctttatttaagagaaaggcagagaaccactctatttctgttgtgagaagttcagaataaagatgagacttaacagcagccctggtgaagagcacctccgtttccagcaaacccacagctccattgtcagttttggtagtttccaaatttttggtgaacatttacctttttttctgcccttctgttctgttctctccaacggagctctctgtccctttctttccaacaagctttttctgttctctgtccaacagaccatcacaattcacaagtctttcatttcactgttctgtgcttttccttttttccccttgtcttctaagtactgatgagttttgacctcatcactgttctctattttttttattccttgacctatgttgttaccaacttgtgtgtttagctcaaggctatgaatttttactattaattataaatgtattttaattttaggtaattttttttgagcatttatatatgtgtagtataaatttttaatttgtatttattatattcaaaatagtggtcctcccactatgtgctatcctgttatatagtctgcaccatgtgggattgatactataagcataaatatttgttgtgaaactttccatttgtattagttcataattttatttatccctgctagaactctgcttcattacattgcctgttgacttctgagtatagtgtagctgccctgttggctttttcttggatgttaattgttaggtgagtaaaaatttaaaggttttggtaggaggtgaggactgcaaagctttattggttggggcatgctgtatggtctatctggttgaagtgaaatatatggaatttcaaggagatatattatcctctatgaagccccgataattaacagaagatgggtgtccgatatggcatggacatggtgatacaagaaattcttaatttgaaatacattataacatagctatgtcacatgcaacacagttatagaaaatataattgaattaatgctaaataattggaaaaaaaaatacagctgtgtgtgatttatttcaatggtcagtgaagacgacacattgatagtcagtcagtgaatatgtgaatagatgcaatatgagactagaggatgcaagacaagtgatattatgagacacggaacaaaaacaacctgcaagaccaaagtgattaataaattttaaagcaaaaaatgaaggatgcctcctggataagtaattgagattcatagcttatccttattttgttacgggacagaatttctttttggcttttctttcattttaaactctagtctaaacatattgtttcattctgtgtatttatttgatagatattctgtagattaggagagcatattttgttgtgtaaattacttcccttgttggttatgaacttgtatatttgtttctttcttagaaaaaagttatatccagctttacattttgtttgtttctttttctttaaataattttagtgtcaagaattgctacctggttctttccacacatacctctttttacgtacgtgtgtgtataactgatagtttccatgcttaatcttacattttttggggtaaaatcctaggctgcttcaattcctgttgttttggtcgagaacag

SEQ ID NO: 2222 - DNA, 1480 bp, Glycine max
  Intron number 1 from transcript Glyma08g13230.1 (locus Gly ma08g13230) derived from phytozome v7.0 (chr-ID Gm08; pos 9673836 to 9675315)
ttcttgtcaattccttctacaagctggaggagcaggtatatttcttgtcaaacttgcacagtatttcaactcctttccaagaatatgttgtaatttactattcatttgatatcatttcttatgtctatggtttaaaaaataataatcttatgcctgtgattgtgcaccaacatgtttaaaagtaatcatgagccatgtattggagttagggtgggcattgattggatttttaagaatctaattcatatccaattaaatggattggatcttaaatctatatccatattttttaaaaaataatttggattcaagatccaatccatttaagtagatatgaatttgatcatatccaatttatatcctcttaaatgttataagaattttttttttacaaattttagtaatcaaacgctaaaaattgaaaacttggaacttgcctatataagcattattttcaattgatcttagtcaagactatttttgatcaatcttggttagggtatttttagcctatctcaactagggcaatttgggttgacataagcctagatatttttcagctgatgttagtcagtgcattttcggtcgacgttgaccaaagatgtttttggtcaatcttaggtagcgttattttatgtttgaggtcggttaggatttttagtcaatgtcggttggtaatattctttggtcaacatcagtcaggactatattttggtcaacattaactagatttttttgctggcgctggttgaaacttttttttgttgttggcgttagctagggcttgttggccaacatcaccatgactatttcttctggccggcgctggttaggaatattttttgttaacatcaactaggattttttcgattaacgtcaattgagggaatattttgggtttgaaaatccaaacaaatatacaattaattggatttgatttaaaatctaaaaaattagatttgaatataaaactagaccatttaaatggatttaaagaaaaatagattagagtgaatatggattgattttatatatttgaattttttttcacaatcctaattggattattttagagatagtcaaaacaataatttcatccctatccattaaaatgactaaattattggtggtaggtatgttaattaaagcggttgactagtaacagtaactgattaaggtaactagaacggagtagtagagcaagaaaagatcatatatcttacgggttacaaattcgagtttccatttgtcttttcgagtgcggtaaatgcaagttttttttttgagttcaaagactttttccgccttggactaaaacaccaccccctctccctaagttttgtcaagaaaaaattaactgattaagaacggaaattcgtaatcatgtgacaaaattgaattgtgaatgtgtttggctgaacaaattatgacctcatgattttccatgtcaatgatgattgatgtataggtggtggattcc

SEQ ID NO: 2223 - DNA, 1631 bp, Glycine max
  Intron number 14 from transcript Glyma03g25160.1 (locus Gl yma03g25160) derived from phytozome v7.0 (chr-ID Gm03; pos 32127859 to 32129489)
atccaggggtcctccatcagctttttatttggcaggttgaaataccttttcattgttcttgttaaagatgttgcataaaatccttcacgtgtcttcatctaacacttaaattttttatcatgaaccaattgtcccaaaaaacttatattacatctctaacatgtgccttctcttgctagagcagtctggtcttaaagcgtgctcattacacatgttgatagggacagacaatagtcaattataaatattacacagttgaagttgtaggggtagggaattagcttaaataggagaaggtaaaagaatgggctttctggctgctatcatttgggaaatgagcattgttagctctagtgtagaatgtggaaacccttggaacgagaattctctttattctttttaattcaataaacactgcagaagtattctttctcttttcttcatagttttaaaaaccagactgaccgattcgattggtatggtctggaaccagtttagtgaccagtctggtcactccaaaaaccagctcatctcagaacctgtgagaactggtctaaaacaggtgcagaaagctggtttaaagctttttttaaatcatttttttaatatatgcattttaaaacatttttaagataaataaaaacacatttaaggattacacataggtatatattgtttttctaattattattaatttttaatttataaaacatttaatttagctatttatattgattttattttttatatcttgatttattataattttaaatcattttattacttattataaattttaaaaatataaatttaattactactgattcaaccacggttcaattgcggttgaaccaataaaatgtgaaccagtcctttcacattcgattacctgcctggttttaaaacattgtttgtctctcatttttctcatatctctttctgaaaacagattttgtttgaattcctaacacaagtctacctacctcatgctgaaattcaacttttcgttagaagaatggagcggcaaggatcaatcttctttagactagtcagagagactctaataacatgttatgaaccatccatcctcaatgcttaagttgctgggggaatacatgaatgattttatagataactactaaagcataacttttaatttcacttttactgagcttgactgtaaattaatgcaaacagcaactagtagtcttgttgggttgggtttgtgcttgttgtaaactgttaataaactagtatgtgacctagatggtttttaatataaataggtgttagcgttttgtcgtatcatgcacacattcagagtagactctcctgtctctcctcttcaccctttccttgtaatttcaacaatatttgtgagatttgctttacaaatgcaaacactattttatggcagtgcaatgcatatagttcatttatatctgtattgatctcgctcgtttgtgttgtattttataaaaaaagttgccattatggaaaatcttatctgttagtacaagatatatgaatgactgtatatttgaaagaaacataaaatgccccatatcaattttctgattactaattctcttgcagaaacagctcaaggtctatctttcaccttttcttca

SEQ ID NO: 2224 - DNA, 1850 bp, Glycine max
  Intron number 7 from transcript Glyma09g24120.1 (locus Gly ma09g24120) derived from phytozome v7.0 (chr-ID Gm09; pos 29821667 to 29823516 reverse strand)
aaggtatagctttgcttcgggtctattacgtgttacatatgtaacccatatctttgatgagctttattgtttgcttacatgtctttccttttaatgtttgactttgatgcatggcatgaattcttgattctgtagtattcttattcgtatgccttccatctatgtacatttttcttttcttttgtttttttttctcctaatgtaacttagtgaagaatttgtcgctaatccatgtatattagcggtgtcaatttggcttgacacattgatttccttagggatcagtgttgatttgttcaagattagaaggcagctgtcattggcactctttgttgatcaaaacattggaactactgaaatggagattgtatgtcctgtcttgtttacaccgaaatgcttaggtttcctttatctgtatccctccaatactttctaataccttttattttttggtgaattggtgttggttaaatgatatgagataatcctactttgccctcaaggaccatccatcctcattgatggaggaggattcaatcccaagaccttgtgccaagtgctaaggactttacctttgaaccactggacacctccagcattttcaaaattcttctgctaggttttcttctgttaactaagggtgataatgagagacatcagtgttatcaaatagtggctattgtggcgctaccacactatagcatagtgggttttagagataacgcaatcatgatggcatcacgtagcggactccgtgaaaatcgcaatcgcgtgcgccttacacgtcgcggaacctcattgcatcgcgacttttgcgtcacactggtttccaacaaggttgaatctggagagaaactgcattgacggtgcgcttagggttcattgttctaaaagaggaaaccgggtcatgtgcagattgcggattcgggtcaggtacttcagagttgttttgggcttgcaatccacaaggcttttagctttgttaaaagttaaaaactcacgtgcagtagtcaagtgggtttttaaaagtttactctattggtttttaaaacatcagagtcaaatttaatgtttttattctattctttttactttttactttgtacttatggacttgagccttcatctaataggcccaacagtagcattttgacttctacttcacaaatgttttctgttttccagaccattctagaaccttttagaatttcctcttattcttagtcaccacgtaatcccttccctaccaaaactttccagccttcttcgtccagtgcctctgtttttttttttacagataacaactttttttttactttcttttgtttaatactcccccttcttccctaccacaactgtttttagcatttttttattatactggcgaagggacagaggagaatgaacatattttgtattgaacaatttaacttttgagataatattatgttaatgattgtccagcttatttttatttgcatatatcatgttttttatgcatatttaattgttatatatatatataacaaattagggaaacaaatcttgagaattgagatagagaaaaatgataaccaattctaagggataatagaaaatagagaaactaccactagaagatatgcaagttatgttaagaatttttcatatattataaacttatttgttaattgacttaattctaaaaacaatttgcactgactgttctttgtttgttaacttttacaagtaaaacaattgttgagtgcttctatgatatgaattctgattttccccatgttatgacccttaccatctcattatttgcatttgcagataagttctctcgtcatataatagttcgcatacca

SEQ ID NO: 2225 - DNA, 10059 bp, Glycine max
  Intron number 7 from transcript Glyma10g43110.1 (locus Gly ma10g43110) derived from phytozome v7.0 (chr-ID Gm10; pos 49926013 to 49936071 reverse strand)
ataaaaattactccattgtaatccaattgataaattttccaaggatcacagagcatcctcaggtatacaagttttagtggaagagggaaaacttcctacacattgtcggtgaactgatggaagtgactgctaaatgaggtagggagtccagttcctctccagaagttttcagtggaagaaagaaagactcaaaaaggtttcgtgggccccacaaagaaatactcaaaaggttttgtgaaccccatcatgtaacttccagtattggaaagtttttttttcccagatgttgcatatcaaattgatggaattggcaaagaaacaaatgtacagaaaaaaacacatctattactgatagtttttgcctacaaagagaacttgagctctggaatttttcaagatacatacttgtcaagttggtggttatgcttcatgtggatccatgagagaatacaagaaggaaaagaaatgaagacaagaaaaataaagaaaaaaaaaacaattttcacttgtattgtttgaatggagaaggaaataaagaaatgaaatatattattttttttatatttgatctattatgttttgcaatggttgttttttttctatatgttaaaaaacgctagtataatgagatctgtgcttccgtctacccttcttggcgtcacgatctgcacctctctaaaccaaaaaaagaataaaaagggaagtcatttggagaattaaattaccaaactcaaccaaaaatatttcttagacggaaatccaagtgagtagtgagggaagagagaaagaaagggaaaaaggtttgaaatcatattttaatttaatttattattattattgtggggatggattagagacagagaaagcatggtggacttgagacgaagcgttgagtaagccaaaaggtcggagttttggagggaattttgtgtggtgcggacgagggaaaatgaatctatctataaaccttacacctcaaagggtcacattggagagagacccgaatctgctgtgtgctgtgattataggatggtggtcaaggaggtgaggagagagagtcgcaaatggaaagaaattatcaaaatagacactttaaaagcttaaaacaacaaattaaaactattaaaacttaatgtataaaaagtaattgcaaaatataatatcccaaaaatgatatcaagtttttgttttttaatgacatttagggctgctaatatatgacaaaatataaatgtaacgtggaatatatgtcattttatcaatttttatcatctcacttgtttttatcaatttctgtttctgctctttctttcccttcagcttgtcatttcaaatccaaactattgaaaatgcattaaaatttgttttttctttcatcaataaaactcactttaaattatacactcaatcaattttaattacaaatgttcaacattatatatcaaaatcacacccaaaatgcatttgtcccgttctttttctccgtttctattaattaatttatttttaaattcgagcccatttgacgatccaatagtcatttccacccctccccaccttttaacttcactgcaaaagacatggtggcttataagtactactgttcaaaatcccctcatgttagcatgctcagaagttagacgataatttaggaaaaaaacagccacaataaccatcacaacagttatcccctcggaccctgtaaaagaactggccacttaaatgccattcattttccattagaataaagacaatgtagagagctggttccaaaagtcacatgttacatttaaaatgaaggagctggagacatagcacagactatctccctaatatggaaatgctattaaaataagggatattagcccccaacttggcacaaattttcttcaatttgaagtgaagaacatctattaagtcctcctacaagttgctcccagaagcagatacctcagtactacaaactgggcaaacctgcagacaaaaagccaacggttacaccaatctaatttgatcaaaatgatgaggaaatttatgagttgttgatacattactattagattttgtaaatgaaacttgaacaatcatcattataaaagggctcagtataaaagatgtgttctgtacaataacgtggaccaatcattattcatgttcatgcttcaactttaccaactcaagtggtctcacaaactgatttgtctttttttatagggtaaactggcctgtgactcgtatttcaagcctaaagcaatttttcaagaaggagcgtcttggtgataaaaaaaaatcattgaacccaacaaattgagctgcaatcactctattaaaatggtatcattgatttctatcgcttttcaatcactctaaatgcccattttttgaccaaagatccttcaaaatttattataattattgtaattgtaaaccatttttcttcaatttctcatttcacatccttctcacagtttaacttgtgatcaattatttctttaaggctaaagcttcctcccaaaccgtaatgattcaagtcaaagtgtagtttagtctagcctttaattgccaagtgcagaaacaatatataatggatggcatcaatatctactagcggcagtgaaaatgtttcaaactccacaccagtttcttattaaaaactcaaaagaggcatgaaacagctataaaagaaacagctataaaagtttagaagataaagaggcatgaaacatgggaataaaatcaaagagggctgttgatttacagctgttaaaaatattcaatagaaaaatcaggattaaaaaaataaacagatccaagttcaattcaaggtatctaaagcacctcacaagcagaacaagactaacaatcacaaaagaatatctatatgccctataactgtcttgggattagggcacaaaagcattatccaaccagctgcatacaggtgcatgtattaaggacctaatggaaccgtaaactacaactaccacctggaaattggaaactattaactacatgaaaatatgtgcattgaccatatctatgctaccaaatgtaaacgataaggcagaaccataccttgtttattttcaaccaattgttaatgcactcaggatggtacagatgtttgcaggaaagaactgtcaaggactcaccatcctcatagtccacccggcaaatgacacacctgacacaggaccacagcaatcaggcactatggtatatcatggacacagttaaggttagaagtaacaatctgcacatacgaatcatggcttccatgttgatcactcccagtcttgtagttgactgaaggtaaacaggcaatagtatcagttgaaagacctctgctctcagttccaactacttcactcaatgccagtaattcctgaaataattgacatttactcttatacatgagacacaaggagacagggaggatggacagcatcgcagaaactttggtacatagatcaaagttacctcgtatgaaagttcatctggatcaacatcctcccaagcatcctacaaaatcagatgaacaacaagaagcatttacagaattaaaacaacattacatgagaaacacaatcaaaatctacagtccaaaaaataataacaaatcaatccagcctaactgattctgtgcgttaataaacaagatgaagaagctaaatcagaataagcaattttgagttaaaatgaaagaaattgagccaattgttggtccaatgatataattatagccttaaactttcatttacttttttatatatattttctaataatttctctttattctcaaagaaatgagattaatcttttatctccaaggttttgacccatataatgcatgggattttttgttaacaaagttattgccatttaaaacatgttaatgctattgacacagaactttaacaagttgtcaacatagcagccactatctgaaaatatcagagcattttagatagagtcttgaccatcacagcatcactggactgtaatagcaaccactatcctgtatagagagacaaattcctttacaaattaaacagggggttttcgattttgcggatttcttcactgtagtgattgctccccaaaactgctatgccacaacgataaaccattggataaataaatggctcccaccataagcctatcatccaatagatttgttttcatccctatttgtttctggtgcaaaaagatttgccctaaagagcaaacctttaatttcaaagaaaaacagaaaaaagataacataaaattgtttttacctaaatttaaatattgggagttcaaataatacaacaaagggctgcccaatgcatgaggctcctgaagaggtctaaggtgggtagatatttgcagcctaaccccacacccaaggcaacagccttaccattgggcaaggcttctaagtcacagcaactcattcttttttcccaccctctgttctgctaaaaatgtagagcttttttggggtagacgttttttttcaagtctaccctaaaaatgatgcagtagcaggatagaccaacaaaatctccaaaatacccaaaagaaaaggtctacgctgagttaaattaattttcaaaataggatcaaactatgtccataactaaagcaaacatccatccacgggtattattttccaaggaaccataagatataccccaaattatacagtactgagatttcacaccttttgaatgtttggtaaaacattcatgggtgtgtgtgagtgcacatatacagacagttagatacacataaaatagagacgtttacctgagaattagcaccatgctcctctatgtcctcttcctcccctgaaattgaaaatgaaattagtggttctaagtggatgattataaaaaagaattaaataaaaatccatcaagttacagtcatagccaagaaaacttacgatcatttatcccagcaagagccaacagtctaactgccatttccctctcttcggcttcttgtaatgctcttgcatatgcttcatcacttgaaaatagatctgggtcaaattcaatactgggattatcatgttctccagcactagcatgagcatgggcatcaaatgcatcttcatcctcatactcctcattttcatcatcttcatcatcatcctcatcctcatcctcatccacatcagtgccatcatgtagatcatcaaaatcatccccatcatcatgcaaatagcttccaccttcccaacttccataatcacttccatcattattcattctcagcatcatatatgccctttcctgttcaatagttaaatgacacaatataaataagaggaatatgaaaataaaaaaataaaaaaaaaatcaacatttgtatttatacttagtataagtatataattgtaaatacacacatggggaggcaacgagcctaatgaaaacaaattagtaaatctcattatacaacaacattcattcgttatattcaacgctctctctctccctccctctccctctctctctctctctctctctctccatagatatctaggtgttatcaacatcaagggtataaaatcttggtcagccgcaaaactgatccaacacatgatggcactgatgtatagaatcaacgggaataattagttcctggtgtgaagttcggctttgattatccttcttttaagaggaaacagtttgggagagaatcataagtttcacacagcaaaactgatccaacacagcttcatgacgtgtagacattataccttaacacaaattcagtaaagcaaaatgtctcatcagagatatcaatcaacgcctggagtctgcatgtccttgggcagctatcattacatgcataaatatagggtttaagcagtttgaagcattccgatacagaaaacaatttcgattactcgaaattcacaaatcaaatcactgtcgaaattggattggaaaagcttaagctagttcacttaatttgggtttccatatggaaccacgtgcatagaatataattaaaacaaaggaatgagaagaagatggggaacctgctcctgaagggttcgagcgagagcgaggtcagcatcgacctggctgagattagtgaaaggggttctggaaggttggcgcgggttgggcgcagcagatccagtttcttctccttcgccttcatcggcttgtcgatcttcttcttcttcttcttcttcttctgcctccacttgttctgccatctgctcctcgccattcaaattggaatgctcctcttctaggttatggttgttcgatttcactcctccggaacctgctttcgcggcggcggtggcggtggtgttattgttagcggcggcggcggtgtcgttctccatgcgaatgaggaacggtgacagagacagagagagagaattgaattgaagatgaattttaagaaggagaatgaggaatagcggagatagattagaggatcgaatcaatccaagagaatatatatgtaaatatgattatattatatatcatagtgtaacaattattattatatgttattgtaaaataaataaagaaagaaatagggaagggtgtggtgacgttggagagaaagagcaaaatcgaggaaagggcaacgaaaatcaaaatcaaaatcaaataaaaaaggtcgacggagaaatacggagcctctgttgggttcacaagtttccacgctccgatttaatgcaaccgtccatcacacataagatcaacggctccagttgcggattccgaattactcaaaacttgggggaaaatgcattgttttatataatttactttgagataatattcttaagatgcgtttattttgaaatttcgagtaaatcttcatttttttccctaaataaaagatttaagcggaaaatttttagaggaagaataatacttaaaattctttttttacgtttaacacattagttgatttaattcttatgttagtctcgttcaattacgacagtgactgtgcctatatatgacaaattaattttagttaacattactacttgaaataatatttaatatttattttcttttttataaaacattttaagtaggttgtaatttttttagctgaataatttctttgatttgattgtttgataaaaaataagaagttttcaacatttttattagaggttagtattttttaaaatgttaattcctaattttttactttttaatttttttaaaatatttattatattttttaaatgtttttttatacaaggtcagatttatatatgctgaaggagtattattttgcttatttgcattccttctaagttaacatttgatatactcttaaacaaaaattaaatagcatcataagaaaaaaaagataaaaaattattttgattcttgatattatttttttaagataatttttatagacttaaatatattttttgtctttataatttattattttttattttcattcttataattttattttttcttttaatctttacaatatgtgcttattttatttttcattttttaaacactttagataatatattatcaattacaatatattttttatccttataattgataatatatatatatatatatatatatatatatatatatatatatattgtcaattagaaatataagttgactacattcaatccgcaatctaattcaacttattcaatctaattacatttttataagttatgttgttaggtaatattgtgtttagtttacccaattaaatttaagttggataacgagttctcctaatcctattaattccaactcaattttgaccacataataaatatataacaaaaaatactagttatctagttttatgtgttatgtgacagattgagtaaagaaaatctcaaactctcacttttattcacttacaacatacaacaatttaattttggttttagagaataactcaatctaataattgtgagttgtaatataatttaatatatatttttaaaatgatagcaattattagttgaaactttaaacaatgtagttcaagttccattaacaaattattaatttagatcacttacactcctattgtctatttttactgtaagtaacaaagaattacatttttgagtatcaaagtgttagttcacccaaaaggaagaagtaaacatttgagtgaaaagaaaaaaaatttaattaagataaaagttttgaattaaaataaaatataaaaataagaatttcacctcattttattttcatttattcttcttttccgttttatttctcgtcaaacgaacgtatcctacgtgaggaaaggaatgcatgaaattgcattgcaacatcgaaacaagtgaagtgcagcaaataagattaagatataatacaaaggcgaaaagaacgcttacgcaagtggaaattaccgtggcatgttgcgtgcaaggaaagctccacaaacatcaacacgtctctttttgcgggtatgaatcacttgggcttaactatattgttggttttgcgtctttgtctactttgatgttgttgttgtattgtatgcttcattttatattataattattttttgttgcttttatgtttgaactaacttggtttcaaagctgttagagctattttctggaatcacagacagggttactgtttgcaaactgcttaataaaatgactgaatgaaactttattgcacgaacaactacttgaataaatcatttgtacaaattggactgcttgagtgaattcatattatgcactgctatgctgaaccttttcaactctcacagaatataacataacaagctacagaggggaatactaatgctatgttcttaagttgagttttctaacaaaacaaaagaaggccttaaaattttatttttttgcctaaatatttgattttgaattatacttgttgaatttgatataatccctctgtttagtcaagagatttgaatcagtaaaagaatttatgtgactgggtttcaattacagaaagtcactttttattatcttgcactgtgattcgaggttgaagacttgaagcatattattgtatatttgtgtttgattaaatgtctaaatagtgtgtaatccttgttttcctgtttaattcttggttcctaatcttgattgtgatggctcagtctcaatcatgctgtgagaacctattttttagtggtgactaaattattggtggaagggctttgaagttaagaaatatgagatcggcttattcttcaaattttgggctgggatttgaactttttcctgtgattaattgggaattaaacctttatgagagtaaccatgcattctcataatccatgggtcatgctgggtagtttgattcagttcaaatttattagagatattttgattgaccctggttttaagtttttatttttgggtcttgatgcatcaatactaaaatcttattttgctgcatttttgccaattgaaagtgatatgaaattgtgggctgttggaaggttttgtgaatttaacaactttattaaaatgaacaataaaagaagtcaggttcccttaattcttcatttgttcaaataatctatttcacctttttgtttaattttgcttaggcctgagggcttccattatgtcttaatttgatttcccatttacgttgctggctctatttcattaatgacccactttgtaaattcaattcagagctagaggacctattgatccctgaccattgtattctatgtctcttaacagtgttgcctgggctcacccttgcttggatgatacataacacttgaagcattaaacctgcaggtgttacaacatatatttctaaatgcttggtgtgtcattgtcgtgtaaaattacaaatataaaccataatctactcagcttccttgatgaatgcaaatcaatgcttgaactgaagcaacttcatgctgttgtgatctcctttggcttatctcaagataacccatttatatccaaaattctttgtttttctgctctgccaaatttgggcgacattaattattcctacagggtattctcccagctttccagtcctgcaattttta

SEQ ID NO: 2226 - DNA, 3310 bp, Glycine max
  Intron number 2 from transcript Glyma17g03570.1 (locus Gly ma17g03570) derived from phytozome v7.0 (chr-ID Gm17; pos 2385770 to 2389079)
tctctgttgattatttagaggtttgaaaatcttttttatttgatgaagcttttatttgtgacacgacagcttgggtaatggtatcatttactctgtgtagcttcttacacctggtggaaaaaggcttttgttgcttgcattcgtaattggcttgcctattacttttatctgcttaattttcccttgggtagtgtttggatagagaatttcaaaattctatggaatttgatatgtatgggaatttaatttagttgcttcaattaaattaaaaaacattaaaatagcaaggtgcatcatagatagagatgcactaaagttttgaggttagagaattcaaggtgagccatgaaagagaatgaatttccaaattttttcactttaggtattatttgaattcccttcaatttagttgtgagattatgttttggtattattcatgatattatattatatttatatttattattagaatattctatttcctattaatcagtaattgattgatcttgtaatcaatattgattcccttttccatattataaatagcatgagggtgtggtctacattgacacacaacttaccgcagtaaataatactgttccatggtatcaaagcttaggtttgttgttctccatcggggacctactgtcctcggtgaacatctttgcttgtcgtcctaccactggcaacctccacgccagtcattgctctggcagccactgcgcgtctccatgtgcgtctctttggttttttgggtgaatagtacccacaatacttgcgtccattgtttggccatcgccgcctatccctttcaccaacgacctattccaactggagttgccgtccatcggtgacctctgagccagagatgagactcgcaactcctctgcacatgcctctgtggcgcttgtaactcacctgctcttcacaaattggcacgtggcgctgtttctggttagacccatcctttggcgacccctccgctgccattccctacttctggtgaactatccagcccttgttcagacctgtttggctcagtttgaaaccaaacacccctctcaacaccctcgcttggctgtttcgctgtgtttcatggcctctaacaaccctccttcggaatcccacttccacatctgctatgaggttcaccaatgtccctcacacagacagatttgtgcgcaactttctttgcgggtgaactgtacttgcgcccattgatgggcctgtttggaagccactgtgccgcgctcttgttggtctgcatcaatgacctttcaagaatgtcacaacgtccacgagtgcagccaactcaacactccgccacagtgaccccatgtagggcccttttctagcgagaaaagttcacgcaaacaatgcgtgacgcatcttcaacgagtgtcacattgaaactgcttcctttcgccttagggcatgctttattcacgggtgaacacccatcacaactactaccatccttcgttggctgccgctgacgtttttcggcacaaccacatgactggaactgtctttatttttgtttttgttgggttgaccacatttgtaataaacttgattcatatcacacatatgctctagcttgaggggagtgtgagattatgttttaatattattcctgatattgtatttattattagaatattttatttcctatttatcggtaattgattgatcttgtaatcaatattgattcccttttccatattataaatagcatgagggtgtggtctacatcaacacacaacttacaacagtacaacaatgttacaagctgaaaaaagattccctgtaaaattcccattcacataaatcaaaatctagatatataatttatcatatttaacatcttcattttgtccatcttcatcatccaaattctccatttagcagcatcattgatgtcctttgcaccttggtctagaaccaagtccttatcttcaatttggagcatccccatccaagttgtccatatccaaaccttcattgttccatcatcattttccacaatccagtcattctcggacgaagcatcatctaaatttagctcaagattcttccttttcgtagcttgtttctttttggtcattcttgaattaacctaacaaatacaacatcattcattgttttttgcttcgatcagtttcttcttttggtctagacctaaacaaaagcaaatacaactaagatttaagatgaacaagtagttagcttgtaggcaattttaaaaggggattagaatttgtatttgatctctttgcttgaaactctagttgtgttcacacctagaggaactacataatgtcaagcttattatccaaataacatttttgaagtatggatgttcttccccataagattcccaccacggtcccaccaatttgttggagtcttcttagccaaatatcattctagctaaaggaccaccaaactgagttgatccttgtaatcatcaagttggacatcaaccttacattgttttcatgatcaaccaccatccttgtcagacaatcatattcatacagctaacaattaacttcaagatcagacttaaatccaggactataattgagggttaagaaaatagtccgcagcatgtgaaggcttttgaaggaagaaagttgggtggactgacaaaaggagaacaatattgagggtgcagcataaaatagtccacatcaaaagcctttgcatctcatttaaacatgaactgtcttcttaaccctcaattacactgtagtcctggatgcaaagttggctgcaccataataactagtgagtggactgattccacaatccatcctggcaatttcacaaatttctgatcctgcatgtgaatgattttaactgccatggaacctttcatctttgtctttcgaattataaaattataattttatctatttttagtacacattttcctttaggattgttgaaaacattaattttacctgctttcttataatagctgagtaccattacaggagttataaggttagcttggtgctttgaatccctccccctaacaaaaaactaacaaccaacattggctgataaaaaaaaatctgagtaccattacatattttgcttctcccacgtaaaatatttgtgatctgtatagctaatatggtttgatattaaaaaaaatgtggtcagtaggtattactgcatgtaaatgcatatcatttacctgatttttctttttatcttttattagacaaacgcggattcattgcattgaaaatatatttttttatgatgcagcgatcagaagagctgggcttatttgttt

SEQ ID NO: 2227 - DNA, 776 bp, Glycine max
  Intron number 4 from transcript Glyma08g14760.1 (locus Gly ma08g14760) derived from phytozome v7.0 (chr-ID Gm08; pos 10743279 to 10744054 reverse strand)
ttacacttggcaacactccaccaaggcaaacccaggtcatttttttatatttatgatttcatatttttctattagctttgaatcttttgtgttgttatggggaagaggggccacttgattttgtctgtgtatgcactaggatccagtgacatggatataaaagtacatttgggttttgtctctccatgtcagtcatctacaaatttaacctatgaatgtgtttcttttgaatgacttaatattatcttcctcttctcaatgaaaaccatgtcaataccaaaaatactcaatttggatatttatttttagagctgtttcctagatagaatttcagttgatcatctacctattctgctgaggttttgctacacatttattggcagaataaccgattcatttcacttaaccaaaatcattttttttctgtccctttagaataggtttgccttaattgttggtttaaaatttttctggtcccttgctcttgggcatcctatctaatgccacttccaaattgtattttgaccttgagtttcacgatgtacatgctagagttcgaagcttgttgaatatcataaaggcaaagaacattgtgttttctgctgaatatatataaaattgaggtttttttttttatggagctttatttattattatcacatgttgcatgctgtatactcttttcctgaaaaagtgaatatactaaattactaatatcctttatgatgatgtgctgatcaggtggtttcaactggccctaatccagagtggggtga

SEQ ID NO: 2228 - DNA, 4884 bp, Glycine max
  Intron number 5 from transcript Glyma20g00600.1 (locus Gly ma20g00600) derived from phytozome v7.0 (chr-ID Gm20; pos 353337 to 358220)
tttttagcacaaggtcgaagagaaagaactcagggtgaatttgagaacttgtggaaggtttttccaagtttgatgttgcaagtagtgacatctcatctacgctaggagtgatggaattctataaatagatattgcagagtagtaatttgatatgatagctctatcaaatgttacattgatgacttaaaagactttaaataaattgggcctaggttaattgttagcacttagcagttgccttttacttttaatttaagttccctataatctgatgttggcacaaggaatgttattccaatggttagcaactatatatcagattatttatgttatattgcttttgagactatggaatcatgaataaaaagtttctagttttcttttatccctttgttctactttctttagcataactctagatattgaataaatagcagcaacaccctaacaatttggtgctttcgttcgctgccacaacgcttcctaattaaagttgctggtcaagaaattgatgaagctctataataactaatgtatgtctaattactgggagggttgggagctttacagactcaaatggaaaactagcaaatgctctctttcaacaaaccatatatgattcctttaaggagcatgtgagttcgatgtcatttcgttacaataaattctcataccttgcaagaatttacgagaaacattatcaaatatatgacagaaaatagacacacataaactcacaagacacaaaaattttaacgtgaaaactgcattaatataaggataaaaatcacgttaaaactaaaaaatatatagcttcactcttatcaataagggttaaaaaaaatctccaacaaatacatatgtttacaattagaggtgttgttgatattttctcattcaacaaactatggagtttttcgtttataattagagttttgcatatataattttcactatataaaagtctacaactaagatgaaatctctataaaattatatatatatatatatatatatatatatatatatatatatatatatatatatatatatatatatatatatatatatatatatatatatatatatatatatatatatatatatatatatatatatatatatatatatatatatatatatatatatatatatatatatatatatatatatatatatatatatatatatataattttttccgtggtcatcatgtgtcgacagacaaggctaaaaaatactaaacctttgtggccataatattattgatgggtttataaatatataatttttatctttaaattattaattattcagaatttactactaataataataaatagtttttatttgggcatttgtgtatctttaaataaacaagttataacttaataaagaaaaataattatagacgtattcttgtgcatgacttataaccaatgtttgtgtgatgataaaaaaagaataaagggaaaaaagtatgagaacacatctacaaactgatgtagaacaaaaagtatgggcagaattttacaaccatgcatcgttgatcagcggactgtttccctttctaatccatttttctttattttggcaaatatatgacttttcacgtcaagaagcgccaattttttgacttatcaaaacaatatgggtatacctttcagtattaaataatacaaaccgtaaaatggtgaagacccatgacaacgaaatttgtacatgtacctgctccaattttcataaaaaataaaaaatatccgagttgattgggtttaaaaattaccttgatatttttatttttggggtaagttcagaaatgaggatgtcactatcgactctgtactctactcatatctgttccgataaaaaaattattaaatttttttacataatttaagatttttttttatatttttgtagacagatgcactacaataaatatattgataaataagcagttaaaaatatatgtgtaaaaattaatttatttattttaaaatcaaatttttaatataatttaaaaaaaaattattttacaaatctaaaccatgaacgggagaagaacagaaataccagatactcaataagaatgaaatgacaaagtttacccgcatcaaacatcatagacgagtacaaaaatatattaaggagtgaagatagaaaattagaaaaacaatagcccattctcattccgcccaattcacatatctagtcattgacaaggtaaacacctactcaaaatgaaagtaatagatagcatcctcgtccattaggtcatttcattccaacaaccaatcaattcaagtaacacatatattaaaattggcacattagtccgaggagtaattatagagttttttttatccaaataatacaaataaattaattatttacaaaaaaatatatatctaaaattttatttacatgaatgatacatttttctattcaaagtgaaaaatctgtttttctcaaatcgatttctcctgttttttcttttcctagtttaaacgtttctttaatattttttaaatgatttcttaactttttttcttttctttttataaatttttttttgggattttttttaaaaaaattgtgctatattttatgttttgtctatattaattgtttatattttatgttttgtttaaattgaaaataatattattgtgcatatgttgttgttaactctttttttgcatattttttgttttatcattttttgaatagttgaaatcctttgtattttcattttatttgattattaaaataataattgaaataaaaaacgtatttaaccaacaaattaaattgaactaaaatatttaattaccaaatagatataaaattacaaacaatagaataaaatatttaaatttaaaacaatacaacaacatttttaaactacaaacgatatgacataaacttaacgttgttgagttgagcctatacggtggagacatttatttttgaatggtatgggatgcacatatggaatgttgttttgaatgtctccaatgcatagacgtcaagcattggattccctaatgtagtgacataaaaccaaagtgtctttgatgcactggagtgaaatattgaatttcctgacgaactaacataaaacaaaaatgtctctgatgcactagtgtaaagcaaaagtatttctgacgcactaacgtaaaacattggattccttgacatactgacgtaaaataaaaatgtacctgatgtattaacataaaacattagattccctaacgcaatgtaaaagcaaaagtgtcgctaacgtacttacgtaaaacattggatttcgtgacatactaacgtaaaccaaaagtgtctctagtaatggatttttaatatgtttttgtgtaatgtgtgctcttattgggaaggagtggggcctaagaataatcacccttttgaaaatgaatttagaatgctatcatgtcaatatatggagaaaaatacaaagttgaatcacatgttttacaaagcaatggcttatgttggtccaatagaagtgaaagggtactcaaattatataaaggatttgagggagtgtcaatagttgttgatgtagaataaatggaaactacaatctggaagatgttgatcctcatcaaaatgcgtgctctattgttgcataccgattatgatgaaagaagtgacttttctgttgaagtataaaacacgctagcctatcaacatggactttgcatgaagaatgaacatgcatttaatgcttcaagacttcagatgaaaagtagagtgaagaaaccaaccattgggagacaacgaatatttgaagatgaaggctataaatagaagaagctttgaagaaacaagatacgaaccatctacgcgaacatattctttcatttttttcttgtaaaactttttctgtaaatctttgtatagatactaagctctcaaaatactttgtatacctcaagagaaaagactatgagtgatgatgatttatccttctataagatgatcacaaatttagtcagtgtgcaaatctccaacaaatcttgttgatttgttaagaaccaacaatggcttggtaggataaaaaatattgggtttaagacaaacttgggtagagcttgcatgtgtaagagttaaaagtgatagtaaaaaatacttgtaactttgataagttagtgaaaacttggtgggttaccaagaactaaatgtagtcttgtgtctaagatgaaccaatataattctttgtgtgcttctctctattgctttaattgataaatgatttgaatttgtttttagatcttatatattattttcttttacaaagaaaattgtttttctcatcgtctcataaagtctgaatcaaaacttctctaagtgtttttaagtttatctgcatcagacgataaatgtgttttcagtcttaattttttttttaatttctaaagatacaattcaatccccattttgtgttatttacttctaaactacaaatatttgaaaaagttttgccaaaattattaattagcaagcactcatttttgcatgaaggtgtagagcatattggaagagattatgtttgaaagtgttccaagtggtgatgccattttactaaaggttagccaactacacgagagaccaatttatatttttgaacagttcaatatagaataaacaaatttctaatcacattttcttctttgtcattgttgatttcagtctatatgccataattggaggatgaagattgtataaagtttttaagaaattgtcaccaagctttaccacatggaaaagtgattgttttggactatataattccataggtctcgaattcaaataatacatctaaatatagttgtgttgtcgatagtcacatatttttagcac

SEQ ID NO: 2229 - DNA, 2757 bp, Glycine max
  Intron number 5 from transcript Glyma03g00600.3 (locus Gly ma03g00600) derived from phytozome v7.0 (chr-ID Gm03; pos 326813 to 329569 reverse strand)
ggtcaggtgccaggataaagaaggaagcctttcaggtatttatctctgtaaatggaatcttatccttcaaatgcatctaagtttgccaaagttgtataagcatcagaagctaaagtgtttagatttcagtgctctgttccctgaatggacatgtagttgtcaatcccaaatagtggggcagagggaccaacctcaaaactgctatagtggggatggcagttagccagatgaatgcaattttgaagattgtagatacaagctatataatttatattacccctatataaacgctcaaatataaaaagttacccaaagtgaaagatatattcacaataaataatcaaaagtcaaattcttaagctatacagtattcacacaagttagtaacaataagtctcaagtcaaataaatttaagcctccaagtggatgatatgagaactgtgtcaagggtaaccaatgaagttaaaaaagtcagaagactcagatctttgaccaatgaagatagggtagagtggtgagcaagtacaacagaatgaggatttagaaaagaaaaaaagggtgagtgaccgaacagagtcagagaaagggttgtacctttttctcacttctcagaagactttttgtgagaactgacagtagaggatgtgcaaactatcaacataacagtttgtgcaaaaccgagaagtaggtatgttttggcaaacacttggtgtgggtggttcttattgaaacaagtgagagagcagtgtatgttgtgtgaataaagcttcaaagaaggttttgaatgctgttcttatgaaaaaaagggatgaaatcatgaaaataatcccaaaagattgggcaaggggcaaagactttttttacctcctatttagctgtggctgcaacaactgtgaattgccatgattttgagcatgattgtgggtatgacacacggcacactaaccctctggtgatgcagtttctgtaacagggatcagctgcaatgcaacactacattgtgaaagcgctgctattgaattattgataaccatgaatgggaagtaaaagattggccattcagttaaccatgttttccaaaggccacgggaagtaaacatagtggttaaaacttaatagtgtgctatagtgatgtagcagtgtggagcagccagaggctgctaatctggactccagtggagagttgtgtcgcaggagtctcagctaccgctactgttgacctaggaaaatccattcactacacttattatttgtaggaaagtggtccttttttttcttttgatatttcagactttatttaaaagaaaggaagtgacccactctatttctgttgtgagaagttgagaatgattacttgactaaacagcagcactggtgaagagcacctccgtttccagcaaactcacagctccaatgtcagtttttgtagtttccaaatttttggtgaacatttaccttttttctgcccttctgttctgttctctccaagggagctctctgtccctttctttcctacaagctttctctgttctctgtccgatagaccatcacaagtctttcatttcactgttctgtgcttttccttttttcccccccttgtcttctaagttctaatgagttttgacctcgtcagtgttctctttttttttttttaatttttttatttcttgacctatgttgttaccaacttgtgtgtttagctcaagactatgattttttactattaattataaattataactgtattttaattttaggtaattttttattttttgagcatttatatatgtgtggtataaattttttaacttgttatatagtctgcaccatgtggctgccccgttggctttttcttggatgttaatttttaggtgagtcaaaatttaaaggttttggttggaggtgaggactgcaaagctttattgattgggacatgctgtatggtctatctggttgaagtgaaatataaggaatttcaaggagatgtattatcctctatgaagctcagatggcatggacatggtgatgcaagaaattcttaaaaatttgaaatacaatacaacatagatatgccaacatgcaacacagttgtagaaaatataattaaattagtgctaaatagtttaaagaaaaaaaaaattacagctgtatgtaatttgtttcaatggtcagtgaagatgacgcatcaaaagtcagtgaagatgtgaatagatgcaatatgtgagactagaggatgtaagacaagtgatattgcaagacacagaacagaaacaatatgtgtgaccgaagtggatcgactaataaattttaaaagaaaaaaaatgaaggatgccccctggataaataattgggattcatagcttatccttattttgttatcggacagaattttcattttgacatttctttcattttaaactctagtctaaacacattgtttcattctggggatttatttgatagatattctgtagattgggagagcatcatttttttatgtaaattactttccttgctggttataaacttgtatatttgtttgtttctttcttagaaaaaaagttatatccaactttactttttgtttgtttctttttctttaaataatttgtgtcaagaattgctatctggttcttttcacacatacctctttttatgcacgtgtgtgtataactgataattttcatgcttatatcttacttttttggggtaaaatcttaggctgcttccattcctgttgttttggtcgagaacag

SEQ ID NO: 2230 - DNA, 1908 bp, Glycine max
  Intron number 8 from transcript Glyma19g31030.1 (locus Gly ma19g31030) derived from phytozome v7.0 (chr-ID Gm19; pos 38747184 to 38749091 reverse strand)
gacgcattagggaattagctttcctcaacccaaaggtgaagttgttgatttaataatgtccatttgtgatgttgcatgcaacactaatttttctcattagatatggtcttaaatgtggttatttcatcatgacattttattcatgggttttcattacttcatgaatgtgttgattagtgaccgaatttcctttcatgaccagatggaacacttcttctctattggatataaaaatcattcatgagccttcacctaatagcacaagcctttgggagattgagtgatatggtatcagagtccctataaccaagtggttaattaaagttgaatttaagcataagataaggtggctctgtgcattttctatgcttccggcccacgagctcttgtgtgagggggagtgttgcacaataaaaaccattcatgagcctccacctaatattttacgcattcgggacacttaggtgattaacattcttcttttggagtgaattgtaaatatggcaattggataaaaaaaagtgttaaccgctggaactgtaatttgatgtattaagcaactcttgttaagttttctgatcctaaaatttcaattttttagtaaatagcttccagaatttttttcaatgtgattgaagggattaagttttagatttatcctttttcattatcttagacacaatgaagcactgtaggtacttacaatcgtttaaaattaaaactgtctcctttctccccatagtttagcatatggcccaattaatttgtttctttttcaaaaaaattaatagaaacagcattttatttgttactgaatttggagagaattatgaataattttaggcaatagcacaacaaatttttaatagataaatagtatacttgaattttggttttttaaaataaataatattaagcctagctcttcacttctaataaaatttcttgttgtattactcttaaattagatagacgtaagctatttggtgtcaacagaaatcattatcccttcgtatcctttcatatgtaacatttaatgcttggctattctttgaatctgcaggttatattccaatggctttagtagtgatttaaagggaaaaaatgtataaattaaaaatgattttaggaaactggtaacaacttgttcattaagctgatctttaagtcttgtagagttctaatgtcatatcaccttaaatcaagaaacaccattttttgtttgttgctttttgaagaacctgtcaatgccattggctcttgattatcaatacctttgctgactgttgtttgtctctgtaaatttgttgagttcctctggtagatgaaagaagctataagatattctactctacaatttagcatagttgagtcttccaggtctaatagatgaaagaagttatgaaatagaatttagaaacatcttttatttgatgtgtttgttaatatgaaattaagatgttttgtaattgatcagagttgagggcgagccctggcacagctttaaagttgtgccttggtgactggttggttatgggttcgaatatggaaacagcctctttgcatatgtaaaggtaaggttgtgtacaatgatcctcccctatactttcgcatagtgaggagccctctagcaatggggtacactagtgtttcttcttttttttttttggtaattgatcagagttcaagctttatctttatttatcgattaggttgaatattagtttttctagatcttttggctcacctaacaaaccagaccgagctgcctctagcattgtcactcaatcctcattgtgccacctataaatcaaagactttcagaagagcatttatctatctactttgcgtcttacaatgggttttctcaaccactgcagcttacaatcacgtttcggaaagaggaca

SEQ ID NO: 2231 - DNA, 1426 bp, Glycine max
  Intron number 3 from transcript Glyma09g36090.1 (locus Gly ma09g36090) derived from phytozome v7.0 (chr-ID Gm09; pos 41957835 to 41959260 reverse strand)
actaggcatcattaagccgccacaagagccagcaagtaaatagtttatgatcggagaaacaaggatggttcctaatgtatcttgtgaatggtgcattgtctttgagcctttgtagttacaaattgtaaaagcaattttgataatcttaccttgctagagtattttggtatgtatgtattgctttggtttgctcaattgtgaaactttagttgtcatagttgattgtttgatttctgaagtaactgagaaagctctattttatctattcaacaaaggtgattgtttcaacttccatttcacctattacatgatgctaggcttatatacacgttaatgacaagatttaatgaagtctggactgtgatgacaagaatgagccaatgagggatggttggcttgtgatgacaagaaggcttaagatgagttcctgtttgagaacttttactttggtctcgagattgaaatttgtaaaaaaaaaaatactccaccttaaatgtttttaaatatttttcatacttgtaaaataatccgttttgattttactacatagattactatccatcaactaaaataaaaaagtaatttaggtagtaaaatgaaaatgagctattttataggtatgaaaaacatatgtaaacaaaaaaaaaattgatgtagtttttagctttgtaaaattgtcaaatttgatttattttagttgttaatgtcattgagtaatggagtagagtaccggtagtaaaaatggactgaagagaattgacattatgcaaattttgaaactaaagttgatggtttaccgaggaattatatagtaaatgatattcgaaatttgaacataaataaaaagtgaaggtttgttcatttttgttttgttatgtacgttattgttggacagactaaaaagttctgattaatgaatatttatttagggtccttgttttaatgtttattcttggtcagattaatttattgggccgtaagaggccacacaatgaaaggcccataagtttcttttctagggatgataaaaaaacaaaacgttgttagaattgaatcctcaaccaagaacacgacgatgagttctgctgaaaattaaaaatcgaaataaatccgttaggaagttgttgaagtgggtgggacccaacgaagcagagatggaggctttgctgcaattcgcaccgatgcagagctccgtcgatgagggtttctggcaccgattgacgattctccaattcccttattcggttcgacctttaatttcattgtagctattcttcctttgttttcactttaagattctgatagaaagaataagcataattgtattttgcatttttcttacaatttatagaattgcaatgtgatgtgaattatacattggcttcatttatcttagaatgctctggtggcttgattgcaggttttt

SEQ ID NO: 2232 - DNA, 3987 bp, Glycine max
  Intron number 1 from transcript Glyma15g15930.2 (locus Gly ma15g15930) derived from phytozome v7.0 (chr-ID Gm15; pos 12267986 to 12271972)
aaggtaactttttttgtctgttcttttttctttttgtgcagggtattctagaattggtttgtttttttagttgattgcagtgtgtgtttgcttttttactgttttttgttggatggtgattgttttgaagtaaaagtagttatgatatatcctttttctcgcttgtcatgttgctgcttgaaagattaattgggagtgtgaggtgagttttctaaggatgagataagagaactagccttggtgattgctatccaggatttccagatttattctgtactcatttttggggtgtgttcaacttctttgcttgttcatgtggctattaaattgcactgaatatttaaaactctaattaggttgtatgctagtgaagtggtcatcacatttagctttaaagactggagttcatttgataatctaggtttgttaagatgcatcgtgcaaatgagttttcttaatctcatatgtctgcaactatggcgttcttcaataaggtctagtttgcttatctaaaatttagttaacaagagtaatgcctagtcctctagtttgctttttgttaggatattagaaactgtcacaattcgtttgaataggaaatgaaatttagaggaaagagaaagaaattgaaagggattttaagtggaaaaatgtgttgtttggattgatggaattaaggaaggaatgaaataagctaatttattatcggttgtttggttatattgaaaagtgaaggaaacaaataagaaataaatagaaaaagaatatttcaccctttttaaaaaggttaagtaagaagtgtcttcaaccaaaacaaagtagatgtattcagcaataaggaacagaacaagaaatctccagacacagttttacaaccaaagagaggacgaccatatcttctagcaattaagcagtcaatgcgtagctgcatttgcatacaccagaagaaagcacatacaaaacccaaccaatctgattatttacaagtatctagagtatctatgatgagtatttcagacttagttgggagctacagattacaaaactatcaattcttcaaaagcaacacaagtgaatcagaagcaacaaactcaacattttcaatctgtgcatgcaacaattcaagacaggtatcaaactatcaatccaaaacgaaataaaaaatgggcacccaaagctgcaaagaacaaatagaaaacatccaagccatccatgcaatagctcaacccgggttatcaatcaaaatccaaaattcttaatattagaaaactggattcaacacaaaagttcttgattaataaaagctgacaccaaaggcaacaaaaagggaacattttcaagctgttcatacaagaattcaacatgggtagggtatcacattaaacaattgggcaccctacaaaaaaggctatttttaaaataaaaagacatagaaaacaatgcaaaagaactaccttacggtcaacaagttttattttcatatgttcctgaagtggcacaattaaagcaaatataatcccccctacctgttgtgtatgagcagaggcccaagatccccgaaactgtgtatgtgggagagccctcttccttctgtgattcttatcaatatcccccaacggaagaggaggtggaatatgatagtatgaggttgccagagatttagcttctttttcagaggggttctaattctggtgcccaaattaacaaagtgttgtgtttggttggatggaggtgtttggaggagaaggggaaattttttcaatttgagtaaacattctccttatgtggggggattttataatggaagacataaaaggagattattatgtaacctttaattcaatcattccttattcatttataattactatgagtatgaacattttaaaattctctcaatttaggaatggaaattatccctcctgaccacttgtttctaacacttctgtccaaacataccattagtgttttagggtcttgtgacattagcagtcttacttgcctacattcacacatgaccaggatagagtcataatggtgttagtggtttgtacttagtaaattttattattttacacaatttctaaacacattttgtttcaataaagtgttaaagcattaccatccttcatggcctaagctcattactattctgcattgagttttaaaaaatctttgactcttttcccatgtgtccatgagtctttcatgttggctgtgcacattagtgactttcttcacttttccactgtgtttttcctctgctagtggtttctgtctttggctcttcaccttctttgttggtcaccaattgacacactaaccttctttgttggtcaccaatagaagtctcagcagaaaatctcagccatgaacctcccttgtctggttgcccttttgccatgctctggtacatggaggagcataagcctctcctttccgggtgatcaacacagtcagacaccttactccagatgtttcaggcaagtccctggccatagtttccagtttcagtcactcctttgtcatccttggaactgtttgactgtgtctccaccacaattcccctgtttggttttgtttcttctctggttggccttgttcctatgcgagatttctctgctcatctatctttggctcaatttttctctttggctaatgtgtgcctattatggggctgtttcctttcctgtttcttcatggtcactgtgttcttacctcttggccttgttttgttgttgtgttctcttctagccagaagttgtgatcaagttggctcaagttaagtcggatatgatttttaactctagaagtcgactgctcatgcatggctcagtatcgtttcatccatctattttttttcctggttgtgcatcattgcagacatcattttttgccatgcagcctctttagtattgcttaaattgcttctgctgttatctcttcatctgtcatttattgcttctctagtattgtttaaatgtgcttttatcttacaagctgctagcttagtaggtttcaggtggagtccttgaggggtaatactagattaggcttaaatgagcttgctttttttccagttgtactaaactagtacatgacctagatgaataatataaatagattttaggggttgcatctgatgcacaatttctctcaaaaagtttgttttgacacttctgttttcgttggtatttagtaatgatttatttggtgtcaagtataaggaaaagaagaggaagtgcttaagtggagattaaaagaaaaaaagaggggaatagttgtgattcttgtttcaggattgattggtttgatgttatacagacttaaaatggttcaaacattatttatttgataagcaaataaaaatgaaaaataattattatatggcatcaatgtttctttacaatttggttcttttgctagtgtgttgatatatgtttaaatagtgatgatatttatgttaagttcgataatgtaaaagggtaaagtcagaatgagaacgtggctacatcaagaggataaaatccctccgtccaaatccatccatggcatgatgctttgaaatctttaggtacaacggaagtgggaggatttttacacttcattggtttcatcccttgccttctcccctaatctctgatatcaagcataccacgaatcttttccctttttgggaactttgttttccctttataatttttattttctcttagtgttttgagtactagtcattccaattctacttcactactgtcctatgcttttgttttataatcatagtttgtagttctttgactagccatgaattgcaattctcattcctgcaccctctcaacaaaagtaacaagaatgaataaaaatcctcaaatcatattttaataagagtctttgatgcatagttcaggatcattttattacttttagtactttttgctgtactttttctcagttcttatgtccttcccttgcagcaaaagtgcctac

SEQ ID NO: 2233 - DNA, 998 bp, Glycine max
  Intron number 8 from transcript Glyma20g23280.1 (locus Gly ma20g23280) derived from phytozome v7.0 (chr-ID Gm20; pos 33176945 to 33177942)
attataaggtaattggtttattgtaaaatcagcagatgacttggtgacccagattaatatctgttgtttcaaattggttgcttttcacataaacgtcagtgtcactgattttgcaaaactttaggctgttgaaaaactttccacttttgttagtaggtgtctttgcttctcaactctatcacattctgatttatacatgaatttctttaattttgaacatttaaaaggcttttatatggttcttagttcttacctcaactcttgtcccttcaattttgtataaatttaatattcacaaccaattggtctcaatccctaaaagatattgtgtaaggcccaagtgcccaacaatgatttccttagcttcttagcattttccccatacatgtaaatgggcaaaattcaagttcatcactacttggtgttgaatttcaacatgtactgattattgagaaataactgtaaaatacacaagatcacagtctaagagactcaagaaaaagaaaaggaaagaaacaaatcaatatggaaggatattattattaaccaaatggccaaaaagtagttttttaaaatgatttgacatgtattgcatgtccttctctacaatgcttgagatcctctttgtcaaggctctggcacatcaaatcaccactccatactgtctttatatatatatatatatatatattgttcctaagcacatttcgttcaagatacatcatgtttttggcaccattctgcatagtgcatacttttgtcaatctgtacttcaacaagttgtggatgtcaattttaaaagctagaataaagttttgataagctgttttactttttttttattaaacaaatgaattaccaccaggatcagaccatgatgactgttaataaatgatattattgttttaaaactggcttccatggattggatgaataaagcagttgattaacactgatgtacagggggtggatccagtactttattccatccattttta

SEQ ID NO: 2234 - DNA, 677 bp, Glycine max
  Intron number 13 from transcript Glyma09g34860.1 (locus Gl yma09g34860) derived from phytozome v7.0 (chr-ID Gm09; pos 41163823 to 41164499)
acattgtacgatattgtctggtaattttcttctgtgatatttaacttttgctggtaattgatctcctcagtcaatacttattcattccttcaaagtttttaaagttagaacattgatttctttctccttcctcttcttgtttaggtgagggttcttaaatatttaggcttattgattgcctatctgtggatgtgtgaatacatacaaaacaacatattaaagtttcattttcatctttgatgatttcatgagcatatacattcagttttagtcctttctgtatgctgtactatgatcggactgagtgcctttctttcaccttttcattttcgtgattatggaagatgattatgcacattaagtcatagatttttcataaattaaattgatataatatctacaaataaagaagaaatgatgcataattatgttacccatttttaggacccttgtcttattcttagggattttactttcgggattttatgagttcctttgattaatcaggattaagaaccaagtatttagcataaatagaactctttggttagtattttgtatcatgtcacaatacataagaatattatttgaggtctcttttctctcttttcattcttacactttactttcaacaatatttgtaattttcactctctttaatgccagtccaaaagaca

SEQ ID NO: 2235 - DNA, 3072 bp, Glycine max
  Intron number 6 from transcript Glyma20g38860.1 (locus Gly ma20g38860) derived from phytozome v7.0 (chr-ID Gm20; pos 46373967 to 46377038)
tgttcgattttttgcagtgtacctttggatttcaggtctgtaaaccatgttttctgtgtggtgtcgtgtcaagattggtgtgattctttcaattgtacagaatatttttgggttctcaaacaaagttttctttatctctgctatgtagtgaaactatattgtcatatttattagaatatgctagttatggtgggttaatcttagtatttttttttgctcagcaaaaataaatatatcattaataatgaatagtacaagaggtactagggatacatatataggagtagatatatagctggttcacgtgtatacacagacccaagctaatatgtatgaaattcataattacagcatcaccccttccctcctagttactgaatgcttcctttatgttagaagaccattggttgaagtgtatggcaaagtccttctccatggatttgacccacgtccagagtacgagaattgcttcatccaatattttacttccatcaaatgaatgattctggaaaactattttatttctgtgattccagattatccatgttagagcaatccaccagcatttccatcttgtaagctgctttccttctgctgtccctgctgtatgctgcaggtagtggtccctagggttttgcggcagtgctgttgccaggttgacctaggagaacgactcccaccatagaggtagggacttgctgcagctgaaaaataaatgagcagcctcctcttcctaaagtccacatagtgggcacatcgagtcatttaccatcacctgccgtcttctaagattcatccttgttgatagtctatccatgattagcctccatgcaaacatagccgctttacttggaatttgtagcttccataggtccacgaaatcagagtcatggtttgcccccgttagctttctccttattaggtcatacccactttttgttgagtagctcccgctttgatcgtgcttccatatccaggtatcttccctatgaggctgaacttgctgctgtgaaatttccccaataaaagtgtccgccatttctactttggagtcaaatagatccctcctccaagtgagcttcgattcccatccattgttgttgatgctccccatttgcataatgtttgcgttttgttggcttgatatgtggtacaaccttgggaatttctccattagtggcataccattatcagtccaaggatcctcccagaatctaaacttttcacctccacccaccttccaagcggtttcccgtttgattactaggttttgctgctgctgatgatttcctcttatgccttcctccaatgccctccatccaccatactttgagttgattacttttgcccatagctcctcctgcttgtgaaagaggtcccaacgccatttcgccatcaaagctgaattgaatatcttgatgtctttaattccgaggccacctttgtcttttggttgacatactgtcttccaattgacccacgcaatcttcctatgctctgatcctcctcccgaaagaaatcttctctgaatggcttccaatttaactattatttttgaaggcatcctgaaaaaagagaaaaaataaataggaattgctgttaggactgcatttatgagagtcactcttccctaaaggatatgtgtctgtgtttccaattggctagttttctctcactttctgataagcaaagaaaaagtataccgttcattgaagttttctagcatcccgaccaactgaaatgcaatgcttccgaaccctatcactcctatttccagcagcatttttaggaggcacaggtacagaggagtttggaattggggttgaagtcattttaatgatggtgtagaacagagctgtgggtctgctgtaaacagaatcacacagatggtgtgtgtgctgcaaacagaatcacagagcctagagaagagtgcagtccacacagacagagaagaaagaaaactatcgcgtgagtggaagagacaagtcacaagtgtgcgatagttttctttttagttgaaaaagaaagagggcggtaatttttggttttttgctgaaggaagagcggtagtttttttttttttaggtggaaagggggcgtgagagtagttggatggagagggaatagtgaaattgggctttgggcttaagtaattagattttttttttggctgaagctactctggttgaaattgggttgcaaaaccttgacctgcaaaaacctccaaagtccaaacttactcgcaaaaagaactgtgcgtaagtctcaatcttccatgatgatcccgttgattgcgacccaactgcgatgccaaatcagagagggtggagaagatcataatcttgtacgatcttgcgctctagaatgtgattttgacttggttaagactcctcacaacattccaatttccgaactcattttattgaattagctgagatatgtgctgaatgaagctagtacaacagctattgtagttctcacttctcagtatcaccaagtccctactaaattggaagtctctatttaaatattcaccttgaatacaatactattttcaaatgggcaaatcatgcaaagtagagaggcaataatgaaaaaaattaaaatccttctagagtagaaaggaacatctcccacgtaaacaccccaaaaagatgatgcatgtataacaaccaaaggtaaccattgtttaattaaaaatctcctggaatagaatgggttaatggattctctccattggcattttcactggatgagattctggcccttaaataaattttgttaataaaatatgtttgattataaagtgaaagttttaaaaaataaatggtgagattatcacactttacaatctctcatttttcttcccacatgagaggatccttttccctagaatggattgtagatattcctagattggctcctcacccattttgataccatacttgctctaaatttaaatttattggtgccactgttttgtggttgaaagctgtttcatgcattgatattcttgccgagtcctttttattctgttgcttataattataacttgttgcttccagaaagaca

SEQ ID NO: 2236 - DNA, 1770 bp, Glycine max
  Intron number 1 from transcript Glyma10g37380.1 (locus Gly ma10g37380) derived from phytozome v7.0 (chr-ID Gm10; pos 45380553 to 45382322)
gaagtcacatttgataaatttccttattacttaaggtactttatttatagtttcattcattatcagtgtttccattttaaaatgaattctagtgtatttgcatttctcattaaaataatcctgacgggtcaaagtgttttcaagacatgaaacaatttcatgctaagtcttgtgaatttcatggcaattttctacgaatctcacagtaaatgtgttgttttctggcttcggtatatggttcacctctaatgtcttttctcagattttttgttgttgactttcacctcaccaccactactttgtcaacctcaatctttctttgatattctattgatagttctgctcgggttttcaatgtaaagttattttgagtatttattgaggaagacagatgagaagatacaaggtgatgccaatatcctcgcaagtatgttaagactgtaaatatatacaaaaagaatgaatgtgagtctagaaattcatatgttgcgattgaaattagtgtttcctaataaaaggacacttcggttgaatactaggtatttctgtgtgctatgacacttttttctagtttggtaatggcttaggttaagcatctccattcctgataccagcttcatcctcttattagaagatgcaaacttttctagttgtgcttttgtatactttttttaagttttcagttagtactcattgaaagtcatacaagctgacatgcatgggagaaattttttgcatagtccaagactgttgcatgacttgtatctgaagatccagattctgttcaaagttatacacttaaactcaaggcacaattcaagttctctagagttataaggctgacttggtggttggagggagaagcggggaggaagaggtcatgggttcaaaaccctcccactaacaaaaaactaacaaatctaacatctaacatttgcctataaaaaaacagttcaaactctctgctgtatttaatgttttaattggatgggtgcaatgctattggaatatgtgattttctccaccaagatcatacttttgttctaagaaagaagttaccaatgctcgtgggttagatgggtatttaggtagaagctgtaggttcaaatcatggcaaaaccaacttaatgtaccaaaaaaatgtcatgttatctcatagtcttcaaaactcaaaagttcctgttaattagatacttttgccaattttaaatttagcatgttatgcaacctttatcatagatgagataattatgttttactgctattatatggtctagttcacaggtaagtaagttgctgtatactaacttttaaggatttcccaggtataaaattatgataaataattattaactactgaaaaataaaatataaatcctttcatgtttggtggtgcatcttggattctattgaattcaaactccggcttcttgattttaagtcttattggttccaacaattgtaccttacacttgatcaatcaacttgttctgggtaaaaaatgagtttttagtaaggaaaaataagcttaacagcactgtagtttcctgaactaaggccaggcttcagcatggatctctatatttggatctgaaatcctgttacatgtggattcaatctaaccgtgcaggaatttgatgtgaataactgttttcctgattcatacatttgtcatgataaactccccctggattgtaccaccccttatgttagtgcatgttgattaaaatgacagtgaaagaatccgatttgtgttaacaagcactggat

SEQ ID NO: 2237 - DNA, 2646 bp, Glycine max
  Intron number 3 from transcript Glyma03g23740.1 (locus Gly ma03g23740) derived from phytozome v7.0 (chr-ID Gm03; pos 30372577 to 30375222)
ctgtcagaagtgttaactcatctcccactgcacaggtaagttgttgagcatctgttttatcacaatatcatgtaattattccctctgttgtttcttgtaataatttgaactggtgctctgaaagttcttcagactttatttcccagtttctatggaagttatctatagttttatagtcatcatgaatttttgagcttggtaattgcaaatgaatgattgtatagaatggtttttgtagtcatcatgaaatattttgcagaatcaaaaactcctctaattgaggtgcaatcttatgagttctttcccaattttattatgctttcatatttgtttacttatttgatttgattaggaatttggctaaggttacttatttaattgaggtgcaatcttttgacatcttactagattaccttcatgcataaatgactacaatatgttaaaaaataagtaatggctaaatttgtgtgtagtatcatcaatggaaagagattcagaatatatctaatcaattgtagatatgttttccacataattctagttttttttaattaatagaacttgttatacaaatatgcatcatttggatatttattaagaaaaagaagtttatttaaacgaaatacatcatacccaatctgtatcctaactcagttttgactttcattacacaccttctagatgttgaaaatatatctataatttattttgcattcaactttcttattaaaaaattcaaaatatggtctatgaaatcctttagttagcaagtcagctgtttgttgcacatcctccttctaacttttcttttatgatgttcctatcgatgtccacatgtttgctcttgtcatgctgtactagggtggtgtgcaagatgaaacattgattgttgcctgcctctttatgacaaatatagcttcgttggccttcaattgttcttttcctctttagtttttctagaaccctttcatccccaataattcacatatccccatgttcctttgagaaatcagtttgaaaaatcaatatttgttttagactatgcatcttccaatgtaaaaaagcatttcggtggccttaggttttcaatttcaaattctgattccaagcacttctacctttccatttcagtaagatcatctcccacgtgtatgataccagcttagacgatcaaaatagcaatttcctggctgatgaaattttacgaatagtgtgtgatctgtctgctcaagagtacctttgtttctttaaggacttgtatatctctcaaaccatgccttaggtgaccgtttcaaatgatagtatgatacaacaacttttcagtttacatacttcagaaccaaacctttatcaaaaccctgtggaggctccatgtagactctctcttcaagggcatttaggaatgcgttctagatatgtagatgttatattggacaatccagatttgcagcaatctagagaagcactatcagtactgagtttatctagaggtgtgaaggtttgtgtgaggggttgatgaccaatggaataagactaagaaggttgagttagaacggaatatgaatgaggggttttcttgtaatttcctaaacatgtgacagtgaaggatagaaagtgatggcagttccttcgtgataatcctgtttggaagtttgaaagtcccttgaattttaaattctttatttttgacagcagtgcttaatataattaacaccaatgacctactgcaagtttgttggccacataaggctatttccccttatatgtttgttatgttttgttgtcagctcagaatttgttattcatttgttcttatattttctgctgccactttatgaaatctttaattttggaattgttgggtattccctaggtcgttggactagtcttgccgactagcttaactgggtctggtagaactaaagaaactaaatttttgttgcaaatctttgctatactttcgtacatttagttggagcataatttttgcatttttaaggattttttttttttggattagtattgtctctaggataagttaggcacttggtttcttttggatataaaaccgttcatgagtcttcaccataataacttactgtgtgtttggatttaagttggaaatgcggtgcacatggttctatgcaaatccaacggataaaagtaagttgaaagtaaaagtaagggtggtgatgcttctgcaatcatacgtttgcctcaaacatacgtttgtaaccttctacccaaacacacttaagcttttgggttcatgacttggtagagattctatgatcaaaatggacacaattttgttaatttgttctgtgaatatagatgtaatggcgataaagagctttcacgtatgaggtctgggaactttgtggagtgtggcattgctgcaactgaaacaatggggacaaaattgcttgattccaaaaaattagagggatgaaaagtgattgaagagacattcactgtcttggtttgaccgagggttgtgctttggttccattaggtccttctttatatgcttgaaagttgaagatgcccagtgatcttgatcttgatgtttgataattaacttgtttatacagatatatattttttctatgaatattcctaattacttgctattgcctcagattg

SEQ ID NO: 2238 - DNA, 1078 bp, Glycine max
  Intron number 1 from transcript Glyma09g01950.1 (locus Gly ma09g01950) derived from phytozome v7.0 (chr-ID Gm09; pos 1278077 to 1279154)
ttatctcttcaaatacatcatcatcggtgacaccggtaattttcaatcactctgatctcgctttcaattccctcaattcaattccgattcgactttggcgtttcaattcttaaaccaatgatttgatgcataacatgatagttaaggagatttgattgtatttctctgctcttatgaagggttccaattctaatattctatcgtgtgtggtcacagttatgtgtttctccaaatatcattattatcttctaatgagttacatattgaaaaaataaaataaaaatatgataaaattgtgaatgctttttattctgtggttgtggtagtacctgcttctaaacactcctctgcttcacatgatttaactatactggactctttattcaagctgtgattacaatcaaggttgtcaaactctcaagttaactagtatactcatagagtgtatggttctaggtagagaaacgtcaaactcttttttggataaactctctgaatcaagaaccaagtttgaaatcaaattatttgaagaaattaactcctctttgaaatgttttcaccttaggaacttatatttttatgaatgatttggtaatttatgtagtttattcttatttagtactaatgtactatcacatcttattattgtggtttgctactttgctttattaagcagttgaaatgtttgattactgttgtgttaagggtattatgttatgcattacaaataggtttaaatattattttttataataggtaagctcttatgagtctacgagtttatgcaaattcttgagtttgacaaccttgaatcttgattacaattttatcttggaatagagttttctaatttaatgtatactttattgttgtttacattttgttaactaaaaatatgaaacattaaatgttagtacattatagtttgtttgttcctttgttctatcggtgtattttggttaccatgtatatagtagttcatgtggagaggactgagtctagctcttcttatttatttatttatttatttctggtttctgcaggagttggaaagtcttgtcttctacttcaattcacg

SEQ ID NO: 2239 - DNA, 2546 bp, Glycine max
  Intron number 1 from transcript Glyma20g10310.1 (locus Gly ma20g10310) derived from phytozome v7.0 (chr-ID Gm20; pos 14410938 to 14413483 reverse strand)
tggagtgaccactccccctgttagcacctgttccggtaagcttcaacatctcctcaatggttcttggtttagtttattatgtttgaaatttttattgttaaaacatttttttaatccataagaattgaacacggtattaaaatgtcaacaacactcacatatttaatttaatcaattaaactatatcccttatttattaaaccatggtttgaaattgtagatcatggaaaatataaaatgaatttctaaatagttctatgctagttgtttaaggtgaagttggattttgcttgtaagggtcatagtcagaccttgagagatgtactaaaaatattagcacttaagtttagccgaatagattttaatctttcatataacatagctaattaattttattttattttttatctttgttaatgatgtgatattattaccttattaataagggagaattttttgtaaaaaaaattaaatgattgatacaataatataagatctagttgtaaaaatagtgtaagatctaattgtgtttacaagattgataacaatttatttaattagagaaaaatcttgtatttaatttttacatgtaaaattttttatatcaacaacaattatgcatcataaacaaaattaatttctgaccccacatattaaaaaaacacccgtagtcttttatttagaaaaaaaatccatcaaaagattagaattttacacagatggataagtcaataaaaataattacatctgtagatctgataagttgggtgtgatgttctataaaacattgccatagtcataaagattttgtgcattaataatgtacaccgacgcaatcgatgtgagcctgtgagcctaccaattcttttaggatttttaggtcagattgaacagaggatagtactacttttaaatagttcataaaactaaagtatatttttttatgaaaaactaaagtatatttggagtaactttattttaacattgtgaatttttcttcatgtcaaatattactgcttattcttaaaaatttaaaactgttctgtactaaaatttataaagcttctctagtttgttacttcttcaaatggactagtacacgggattagtaaggagttaggacttatgtttcttatttcatcattttatttaaattctaagaaacttaattatggccatgtttataaacgaagaggtatagcaactttatggacgagaaaaaccatagcatcaatactttctaaaatatacacatgtgaccatgttataatttatttatatattaattacgattctgacaattacacaaatacttttttaaggtgtaatatttatacacatgatgatggagcttcaaagattacagagtaacttgttatttattaaaactagaagtatgaacaattaacattgtttgtaataattgacagagcattaactgaaaaagattagaagtaaataatttttattgaaaaaaaatattattaatacacccacactatattttttaatttattttcaacatgatatttaatagtattttttattatgtattctttaattaatatcctaaaaaaatgtttaggaagattctattttttttagttattttggtacaaatattcaaatacctataataatacattgatgatgtctaacttgattggttgaacatatacgtgagtgttgcaaaccctttaatattgtgttgaatttctataaataaaaagacatacttataatattttcaaatcataattaacgctacttaatttagaattacctttttcactttatcatttattatttttggttggttgttaatgacttataatttccagctcagaagtcgtttgtctgtgtaagctacccatattgacaataaattagccgtagaactaccacctctccacaatcaaccaaccataacaacactattgtaacatagtactgtgggagcaataaaaaccatgacaacaactccaatcctttatattaatgccacttcttttttttccatctttttttagtagatattagttctacatatttttatccttttttatattttatttgaaaaaaggctaatttctaactaaaaattgttattatgttgtagtgagatggtagtaaaaaaaatcagaactaaacttgtgcatttgaaattatatatgttgtatatattgtcgtgattacatccggatacatgaacgaattacttaaatttggatgcaactcatgcgtcaacagattatgcataattttgaaaaaaaaacttataacttcattcaatcatttgttttcaaactaattaattaatgatgccatttatatctaggaaaatatttgtttattttcaatcttaggtttatctacattatccaaagatcaattgttagacttgtcatgtctatattatttatgttctattgagcaaagaattttttttttttttgcatatgcatattgaaaactattttaattttgttttcttaatttctcattgttcgacagctgtgggagtccccgtgtccttgcctccatca

SEQ ID NO: 2240 - DNA, 534 bp, Glycine max
  Intron number 5 from transcript Glyma19g35630.1 (locus Gly ma19g35630) derived from phytozome v7.0 (chr-ID Gm19; pos 43150523 to 43151056)
agctttctcgtcgcctgcaggtcatccatctagtgctgtgcttctctgaccttctccataaacctgaaataaatttcaatgtagaaaatgataaacaaacaaacaaagaaataatgtctagaggagtgctagcaacatactccttttaacatatcttcttttattaaaacttatttgaaactacaaaaatcacgagtgaattaattaaataagaagtaaaatcctcaaaattctgtgatttctaataaattttagctaatggagtgataaaaaaaatgtattctaaagaatatgttatagtttgtgttgctaacatttttttaatgtaacaatgtgtttttgctgcaaatttcttccattgatcatattaataagagaaactacccaaaggtcctttcctttcatgatgataccatggattggaaactgagtatgtcctaattgactagccgttgagtaagtattattttactttttggtttctgatatttgtgtgcaggaagagggtgtgaatatcacagccaactcggtcca

SEQ ID NO: 2241 - DNA, 3838 bp, Glycine max
  Intron number 2 from transcript Glyma16g02410.1 (locus Gly ma16g02410) derived from phytozome v7.0 (chr-ID Gm16; pos 1986534 to 1990371 reverse strand)
acaggaaggattgttggattatagtcaaagggaaggtgagtttttgtgatctgaaattgagtttctgtcataaatttgattcctaatctgtttttcttagttgatctgtttttgtttattggatgaatctgatttgtgaataatccatagttgaattgcacattcatgactttatcatacttgatttgactaatcctgggggcttcaaaattcccccatgcatggtttgggagtgaggtggatggggttcaatttattcagaaaagccattaattgaatttgaattttatattaagttattaaaaaaaattaaaatttgtgtatgacatctaatttttaaaattttggtataaaaaataatccaaaattcttttatcaatttaatcccgaagtctgacatgtaggactgtaattatgtagtgatagggttataggaatgcctgaaaaagatgaaaatgacagtcattagtcattaccaaccctcaaataataatcatgaacaaggattttcatacaatgattctaaataggtgtctccccttatgataaatgttactccttccattctaaattgattgatgttttagcattaaaaaaatcatattggttaatgatgttttcaaacaaatatttaaacgtgtatttcaatgttgcaccctaataaatattgttgttttaaaacacttaataatatatttattgaaaataaaaataaagttaggatattggcccctaatagatactattgttgtgggtatttgtttttcttaatttgtatgaaaaaccttaaacacatggattaagaaaaacaaatacttaccgacaatggtatttaataagggtcaatttttattaaaaatgtttttactttctttatttcaataaaagcattgtatttataaaaaaacaatattactaaagagcaaaattggaagagatgttttaatatttcacttaaaacatcaatcaatgtgaaaaaaaatttgaatgctaaaacgtcaatcattttggaatggagggggcgtatttgattatattcaataatgaaatatactgaaagctagattaatcacagtgtttgcaatgggaatatgttatttaatgatttagagagttgtctaggcataattaaatgtcatatatataccatttgtaaaaactggattgcctttttttttttttatttccttctcattttgacactatagcatccacaaaaatactattagaattattgtattcataattttgttgagggatatgactatcaggattggagtacaaaaacactatctagtattaaccgttcagtcattcaacatgaattagttagcatgcgcctggttggtaaggagactatatttgatgcttgttgatcttgttatgatctatggctcctggctgttgagtcttttcccgaagtgacattgatgtgaaattatttattgaggaataggattatcctgtttaaataagtggaagttaaatgagttatttttcaagtgctcattacatattgtcataacactaactgagttaactaattcgtaaactaacatgtcatttcctatccaaaagaagattttactttcttttttggttgaaaacgaaccaaattttactttttagaacaagttgtttgtctgtagtgttggccactgcatatttattggcctgtatacttttttttttccttctaattattaaaagaaggaatgctattgaagagaagagaatacacacacactcgaaaagggaaagcaatgaaagaagaaaatcttcaaactacaattctaccaaatgaaacttagccaaaaaattcttactctccaggtttcctagacctttaatctcccaaagcttcatgagcacaacttatttagaggtggcgaatgggaatgatcacctttcctctcttcttataactttacatggtatcagatattgatgtctccatcaacaaagtacaaacacctctgcatccatcaacactccacccccttcaagcactcagaatctcaatcttctcaaatacctccactcctactcaatacctttcgcttgtgatttctaccaaaaaaaaatacgttgctaaaaactcttgatttcaattttcaaagattatcttctctggaaatcctcattcattcctgtccttacttaaagcctataatgttttcaatcctattgaaggctgccacaccaccacctctatctaatcagaatgatactaattctttccttcctagttatcagcaaaagaaaaatgatccttgttggtaacatcataaatgtcaatcatttatgtgaatggcaaccatgtcattgaatattctatttagactgtctttactcttagagagaaatatgaactcattggtggttagtttaggaaactttagggactggtaatgttatcgagcctataaagttatgatgatgctaccataaacaacattgttgaaataaatatctgacagtaaattgattagccaatcaaatggttgagctatttttttatatatttctttttacacattgtctgacaattgaacggttaataatactttgcactgctggaaggactagtagaaggggatataagaaaaactctactagaaagaataaggtagcttatgtttgagttaccgttgaagggatatccaagatacttttatcaaagtatttctttcataatttctctgtttttgatgtgttgaaaatcatactaccaatatttaaaggtatgtttgcttttgcgatcaaacattggtagcataaattctaacacatctaaatagagaaaatagagaaattacgaaggaaatactttgacgaaagtaccttggatatacctgcaatgtttacccaaacatatgctattctatttagtaaaaattttcttttattcccttttagcagccctttctgcagggcagaatattattaatccattcaattatgaaacagtgtgcaaaaagaaatatatataaaaaagaacagcttaactaaccatttgattggccagtcaatgcatttgaacggagaagttatagagggcttgctttgacaaaatgtcgtttgaggaattccaacggtaccccaaacaggctataaatggttaaacaaacataccatactaatttgtacctttatttctagatgtcaaatgcattcccctagttcttatccttctcttttcagttttataattaattgggtatcgaaacttaaggagatattcccttggatttttcttacaaatagtattggaatacaagtgtgaggtaaagtttcatattgaatagaagtgaaaaagttaagtaccatataagtaaggataggacccataaacttgaaccttaaggttttgggttaaaacgtggtgtcaaatttctttatgtggttgttcatggcttattagtgtaaatctccccgtgtttactcccctcaattccccaacaactggtatcagagccaggtttgacttggtgaccggatcagacgagtgagatgacggcaatggattcttaaccttggggatcccttgtatcgaaagtcttcttggcggcgtgtcccgtgggtatggaatactcatggatgataatgacttctactcgagagggagactacaaccatataagtgaggagagaacccataaacctgagccttaaagttttcggttaaagtatggtgtcaaatttccttatgtggttgttcatggctcattagtgtagatctccttgatatttactcccctcaaatagtaggattatatatacatcagaataatttgcctagcatagtaacatgcattccattgattgatgcaggtgt

SEQ ID NO: 2242 - DNA, 1987 bp, Glycine max
  Intron number 1 from transcript Glyma12g18240.1 (locus Gly ma12g18240) derived from phytozome v7.0 (chr-ID Gm12; pos 18816772 to 18818758 reverse strand)
tctattccctccgcggagaactgattcaccgccaggtaatcttatcgctgcccctccctccctgccttcatgcctttcttgttggttaagacttttagggagaattatgcctttccttaccccgttttagatctggcatcttgttggattaagactttttgggaaaattacgatttgagattgttcggttggatcgatgcgtttgtttgggtgatggattataggtttaaaggttgagattttgtagcttgttatatgtgtacttgtaatttgtacaatctgattgattgaatttctaaccaatggttataactattctttgtctttcgaagtgtcccctcgatttagagggataaaatcatggatttggctcatctgatgtgaagatatgctcttaaatggatatcagttgcagattgcgaataatggcgaaaactaatgatccactgtatcgtataagcggatagtgttagaggcaaacaatagaagtcgtatagcagttgaaatcagagttttaaatagagcgctgtagcagtgcggagcggcccctgccccctactagggctgctgtagcagagcagtttagtgtcgtggccatagtggaccaaatggcgagctgaatagtgggtgtagtgggtgctgtgttgattctgaaaaatttatctgaacagagatattagagcttgaacagctatttttaggattttaatttccaaaaatgaaatatatagatgtaataatagtgaaaatgataaataccacttggatttggaggaagatgacggttgatgattgataattcccatctagaaagcttgtatctgacatttgttggtatttactggtatgtgtttttttaagacatctatgactttttattgctaattatgaattatgaatgccattaattttgaacaatttttatcattttttagaatttatatgtatatagtatacattgtatagactataaaaaatttaaaaatagaagctatcctgctatatgctatctcactatagtgtttttggagccagccgctatgtgttgctctctgggatttaaaacaatttttgaaatgtatgatatatataaattatatatgtataaaaaattaacttaattcaaataaaagtaaaacacataaaaattagcataatattgactcaaaagttcaattggccaaatatgacaagagggtgcatgacacatgctgcaaccacaacgctcataacaactgcaatagcagacagagttgcaattgcagatccaaggaattctgcaacgcaatagcgctatagcagttacgtaacaaatctggaagataatgtgtaataataataatcattgattagaaaattaatagttgagaagtgtgatgaaatgaaatacatgtatgacaaactctgaagttagttacaatctcaatggttgattttccaaaatttaatatgccagttaattcagctagtaaactcctttgtagatgatcacaaggacattgaatcaatcttccttcaccccattcccctcctttaagaagtaaaaaatattttaatagtgctattttgtttgaaatgaatgtttttttttttttttttttgtattgtgaaaaatattatgaatgacttgttgaccaattaggataggaatagaggtaagtgaattaagagagaaagttttaagatagagaaatgttgtccagatagaaagatttgatacttttgtgtttcaaaaaatctgttttgtaccttttagcattttccaaaatatttattgctcgaaatcagggtttcacagatcacattctacaggcaaaagaaaaaatgaagtttaaaatataattaaatttttgggtgcaggtttaagattggaaaataggtaaggacgtaaggtgtaaaaatcagataattgaaagtctacatacatatttggccctttttttgcattatgttaattatatgttttatatcatttgcttctctgtag

SEQ ID NO: 2243 - DNA, 1683 bp, Glycine max
  Intron number 2 from transcript Glyma07g32380.2 (locus Gly ma07g32380) derived from phytozome v7.0 (chr-ID Gm07; pos 37285429 to 37287111)
ttccaagaggttagtgttttttacctttttgtggataaatcatctattttttgtgataatcatttttgcaggtctgtgtggataaattggttttggaagtttctgtgtttttattcagattattactttaacttaatatataaatcacagatgcttctgaaatgtttgatacgctaatggaagctgaaaaatattatcctgtgactttttgtctttcgaattcagacccgtggagatgtgatagattttatttattatttttttcactgaacatgaagtggggttgttttagtcctggcattcagagtgtaccaaactaagtccatctttctatgttatatttggattgaataatatatatgtgtgtgtgtgtgtgtttatttttcttttttaatttgatatcttgtttctcctttcttgttaatttaatttcgcctattattttatatagaagtcacatgattgatacattcaaacagaaatacacaatgcaaaacatgacaatatggggagagggtttaaaggagacaagaggaattatattagaaagggagatgaggagtaaattagacactagtcactgagcagggatacaggtgtccaatatcttgtcatcattatttcacaatatacctttatggtatgttggtgttcacacaactttttcttggctatccttaacattctgattggagttgtatgagttgcaaattgattcatgcaattttctgttaatcttcacccaattgatatggatcatatggagtatcttcttgttgtgggattgcacactaaattgatgtaataatgacagaattgcatgaatctcaattcttctgcaattttgttggtacaaatcttcaaagggtagtgggccaaacagccactgtggtgatgattgggtgtggacaaaattgtcagtgacacacctcagatttttggatccaagatggacagtgatagaaaagagatcagaagatacagctgaaaaaaaaatagggatttcttgctagcttttgttttagaagttaattagagaagagcatggagaaacctaataaataatgtgcataaaaataaggaaattatttgtttccagacttattttatagttttagtatgtaaaaaatatatagaattttaacgactgatcttcaatcttataattgatgattctttttgattcgcaattcagaaaatagatctaattcgtgagatgatcatcactgatccttaatgccttacacatggtaatcccaacccttcatatattgctgggtgaaaattgagctgttaattccaattaatttgtatctactaagcacttacttgaaagtgacaaaattggatccagcccttaatggagttctttcattcaaatttgttctttgttttacctattaaccaacattgaacctttaaaccttgtttcagtttatagactcagaaataaataaataaataagggtctgatggttaagtcattctttagagtttatgcttgtttgcttttaaagattgacatatttctccaaagggcagtatctgcttttacacattgtacttttatccagtattgcaatactggttgggtttcaatattggatttcatcttagattgtaataagtttcctggtttaactgtaaatcagggccaacagcaacattatttcccattggttg

SEQ ID NO: 2244 - DNA, 4764 bp, Glycine max
  Intron number 7 from transcript Glyma01g07020.1 (locus Gly ma01g07020) derived from phytozome v7.0 (chr-ID Gm01; pos 7565297 to 7570060)
gacagaatactgcgtccagaggtacactctcccacttatatttattgtcatgtttattggtattgtgatcaaagtggcaccttcattcctctttcaacagtttcattcttttgacatattctccagcatgatgaaaatttctaagtatttgactatttgactcatgtcatgcatcctcacttattcgtgtgatgcacaatctagattttttttttatttttttaatacaatcatgttgtgcaaagtatcacagaaaatgatacacaaaaaaaatcagaatttctttctaaggacgagtttcggattacaaagagttttctagagagaattgaaaaagaatcactttcaatctaaacagtagttgaactaattatactagtttttacaaatagacagctcactaattttagtagtttgttacaactgttttaactaccagctaagtttgttacaactgttttaactaccagcttaaatttgttagttatgtggaacaacttatcaacaattctccaccttggttacataactaaacaaggatcaaaatggttgctccctttttgacatcagactagctgacattacttcaaatttataaggtccaggcagtagaaaaacttgctgcttggtagaactttagtgatcatatcatagggattatgctcagtggagactttcttcaccaacatagctccttcagcaatagtttctctcacaaagtgtagcttcacatctacatgctttgtcctttcatgataaacctggttctttgaaaggtgaatagcactttggttatcacaatggacagtgatagcatgatcttgcagcttcagctctcgagctattccccttaaccacagtgcttcttttactacttctgtcaaagcaatatactctgcttcagttctagacaatgcaaccaccttctgaagactagctttccagctaattgcagttccaaatgcagtaaaaatatatcctgtgattgatttcctggtgtcaaggcagccagcataattagagtccacaaacccttctatggcagctgaactgtaactgttcttatcagctccaccataaaccagatccttcccaagtgaacctttgatgtatctcagaatccacttctaaggcttgccaatgcaccttccctggatttgacatgaacctactcaccaaactcactgagtatgctatattaggtcaagtagacaccatgacatacataaaagagcctactgcatttgcataaggaattttagccataaattccttgtctccttctgaactaggtgcttgatcattgctcagtttgaattgttgggatataggtagggttactagcttagctccagacattccaaacctgtccaacactttctttaagtatgactttgagataggaacaagtattcttgtttctgtcccatttgatctcaattcccaaaattttactagcagcacctaaatctttcatttcaaactcactcttatcattgttaactcactcttgtcattgcttgttagcaagatatcatcaacatacaacagtaagaaaacaaaggtattaggtgtgatgaatttgaagtaaacacaactgtcatacttacttctgttgaacttaattcttgacatgaaatcatcaaatctcttattccattgtctgggagattgttttagaccatacaaggatttgttcagcttacagacatgatcttccttgccttttgcttcatatcctttaggttgtctcatgtaaataacctctttcagctctccatacaaaaaagctgtcttcacatccatttgttctggctccaaatcaaactttgcaaccatagctaggagtatccttatagacctgtgctttacaattggtgagaaaacatcattgtaatcaatgccttctctctgtgtgaagcctctagcaactagcctctagcaactagtcctgttcaactcctggaatcccctctttcatcttgtagacccatttacaacttaataacttggcaccaactggtttcttcactaactcccatgtgtggttatcatggagtgatttcatttcctatagcttttccccgtttcaatttttccgtactcgccattgcaaccttgtagctttttggctcatcatcccaaacttcactagtagctacaagggagaaagccatcagatcagcataaccaaatttttcggttggtttcatctgtctcctggtcctatctcgagccaacaagtaatcatttgtctcatcttcaacatcaggttgagttccttctagacactcttcctcaagtggtatgttcttgtttactctaagctgtatcagtaggctccacctcaaacattgctttttttggagttagatctgattgtaccttgttagtatttgatgctgttttataggccatttcagactcattgaacaccacatctctacttataatgcatttattatgtccatattccagacaccacagcttatagcctttgacaccttctgcataccctataaacatgcacttcaaggcaacgcaaccaaacactctaagtctgtcataggttggaggatgaccagaccagacttcttctggtgttttcttgttcaaggctgtagatggacatctgtttatcaagaaacaagctgttgtcatagcttctgcccaaaaggtctatgggacagcacttgagagcttgcatctaaccctctcaagtatgattctattgaacctttctgctaggccattttgccggggtgttctagcaactgatttatgcctagcaattcccatcttcctgcaataatcactgaaaaaatcagaacagaattcaagaccattatctgtaaaaaacctcttgattttcctttcagtctgattctcaatcattgttttccaattcttgaaagtctcataaacctcatccttagttttaagaatgtgaatccataacttccttgagaaatcatctacacaagtcaggaagtatcttgcacctgaatgagatagagttctagagggtccccatagatcagcatgtatcaaatccaaggtgcctttagttccttgttgaccaactccaaactttgttctataggccttatcataagcacagtgttcacagaaattcagtttctccactttgtcaccatatagcagaccttgtttacaaagctccaccagacccctttcactcacatgccccaaccttctagtgacccagctattacctctccttccaatgagtacaagccatgctttctcacacccctcatgacaatccttgagtccttcataacctccaatgtgccattttcacctctgaatagataaccttttctgtctagtttatcaagagaaactagatttctcttaagattaggaacaaatctcacatcttggataatcttttcaatcccatcatacaattttaatccaattgatccaataccttaaattttacatggcttactgtttccaagtaacactgaccctccctgtagctcagtgaacttctcaaaccagggcttatttggtgtcatatggaacaaacacccagaatccataatccattttccatcagatttcccagagcttaccattaaagcttctgcagattcataaccatcttggactatcattgcatttcctccttcctttgatctatgagaattgtaaccattctgcctttcaggacaaaatctttgagtgtgaccttcctttttgcagtggtaacatcttatattaggaacatttccactatttccagactgcggctttgatttcttcttctcaagatggttgtctttcttggttcgtttccctccgactattaaaccttcaccactcacagaagccttttgctcatttctttcattcaattcctttgaattcagggctgattgaacctctaccaaggacaatgattctctcccattcaagagagtttctttaaaatgagagaaagactttggtaaagcacacaatagtaacagggcctgatcttcgtcatcaatagtcacatctatattttctagatcaagaatcagtttattgaagacatccaattgagattccatagttctatcttcttgcatcttgaatgaatataaggcttgtttaagataaagacgatttacagagatttggtcatgtacaaaccttccagtttcgaccaaatttcagctgttgtcttctccttcgagacctatcttagtaccttgtctccaagactcaagatgattgcattttgagccttatccatcaagatcttcttatccctttccttcagctttgcatcaagagcggtttcaccttgctaagcttcttcaagaccctgatgaacaggtaatgctctcatcttcaatcgccataaaccaaccaaaatcattttggcttgtgaatttttcaacctcatactttacaaagtatcacagaaaatgatacgcagaaaaaatcataatttctttctaaggacgagtttcagattaccaagagttttctagagagaattgaaaaagaatcactctcaatctaaacagtagttgaactaattatactggtttttacaaatggacagctcattaattttagtagtttgttacaattgtttttaactaccaactaagtttgttacaactgttttaactaccagcttaaatttgttagttatgtggaccaacttatcaacaaactaattgtctgtgtcaatgatctgtgaatcctaatactgacataacattgcatgacctggtaggg

SEQ ID NO: 2245 - DNA, 2229 bp, Glycine max
  Intron number 1 from transcript Glyma14g16700.1 (locus Gly ma14g16700) derived from phytozome v7.0 (chr-ID Gm14; pos 18182444 to 18184672)
acctaatcgccgatcgcgtcgccgtcgcgccgaaagttcgttgttgttctgtgaaattgccggttttaatttttcgttttgtgataattctgagaattagtaacaattattgtggtttttttttctgttaggtaacgttgctgtggttctttttttttcttttttcttttttataatttcgttgccgttttgtaggtgaagatagtcgttttggttgctgctgtgttttttgttttctggtgttcgaattgtgtgcaattttgaattctacttgttagttgtgtaatttgtttgttttctatcacttttgtgttctggagttaaaatgttttctaatgagttaagaagcgtttgcttttgtggtacgtagctgtacaatacgatgccgtgaattccaaggtttcggtttggtttagtttaatttacgaaaaccttgggtttctggcatgaattgttgtctttattggatgatctacggtggcattatgtaggtcgtaatatcataaaaattgagtaagaagcgaagccttgattcaaacggtggcatgagggttcgcttagttcgaaatgaactgcacaaggtgcagttcttctatcctgtgttccgtatttaatttttggattttgtaattgaaattatgattatgctaattctttatggttcagttcagattatgacattccacatcctcatattatgttggaaaagcttaaactaactttgtctattggtctgttatttgcaatgtcttaaaaatccgtgttcaatcagacaaactgtgaacccgttcaattatatttcaactcctgttgaatcatcagtttaactcgttttgaattatgatccaaacccctgttcagtctctgttcggtttttgaaacattggttttctgtgcattgtgcgaaccacagacctttagtggcttatgataacaatctaagcgaaaaataaggcacaagctagtttgcgattaaagtaataagatagtgggacacttggatggataggaaggatctgtataggtctctgcaagaaaatgttaggagactcgaggcaggtgaatgactatatagtttaggttgtacatagaaatctcttgcaggaaaatgcaatttgcatccaaaggggactacccagttgcagaaagctcctgctgcatggatactattactcttttgaagggaagaatggccaaacgacatatctctgccttacccatctcaatttgtctttgttcatcctctactgtgggaaaatgctttggaaccagttttgatgttgttaaagcttaatgtgggatatcccttttgtattattcacaggaaatatccatttgtttctttgccagtttatgttcagtgaaaaggctggcttgatgccactcccattggtagatgtcacatgaatactcagtactatcagtgccaacatttccatctttcttcttccagcctttgctttgtcttggttggtatagaagtgacaatccagccgcactcttaacgtggataatgatttcatttttgaatattgataacctagtcccctggagtagtgttaatattctttttggcagtgaacacacagtccactgtcaagttacctagttaatgaagtgaagggttataatttgatccaaaggaatctgccaaggtgcagatgatgtggagtttttatgttcttccttttggtaagtttcagttcttggaggagtcaaatgctgaactgcgttttaaggtaggcttgcccttcatggacaaaaaaatcaacacacatactatatttatattatatgggatgcatttgattgagtgatttattgctttcaccataggttggagtgtctattgattggatcagtatagttggatttggttcagagagttcttcaaggattcaagtgaccattcaatgctattggtttctatttactgcttgaggctgtcaagtaccccagtgccaccttatagtaatatgtggaattcttgtatatacactagttttgatgtgttctcctcttggagtagtgctgattggagctgcattaatcgattttgttgttgctgatttcaattggtctgcggcagtatagaagaaatcaacgatgcattggtgtttacctggcttgatggggtgactgaatatgcctttagaagttttaggattatttctaaatgtgttcctacatgcaggtccctaaagcttacttcctgcttctagatagttg

SEQ ID NO: 2246 - DNA, 1294 bp, Glycine max
  Intron number 7 from transcript Glyma10g34370.1 (locus Gly ma10g34370) derived from phytozome v7.0 (chr-ID Gm10; pos 42526421 to 42527714 reverse strand)
acattcaacacttgcgtgctgagataaggtttgtgttatgtaatgacatttttatatcatagctgtcaaagaaattatagggtttaaatttagcaggagtaaaaacaatgaaaggactaaaggaggctttgaatactgtgatattaaattggtatggtgtgtttgataatgtgatacaaaacctcgcgaggtatagtatattatataaatattttaataatatcctcatggataattcttatgctatgaaatccttctttaaaactataggtagaataattcctgcataagaaaatgtaactttgttttattttctaaatatatttacttcttacaactcatggatatatcaaaaaatcaatttaaaagttaccacatatataggagacatcaaatgagaaagcattttttttgttagaataagagtaatgaatattaggcaccattaccattagatcttatcacggagacttaaacattaaatcttgatcatccacgtatagtgtcacatatagtaacttcctcacaattatgtactgttatatgtcttcaggtatggttcaagtcatattctacttactcatttttatggcaataaatgctattttttatgagtgaggcaataatgtgtagtcctactcacattggggagctttttgggaataaaatcctggttttctgtctgcattttaagttagtttgttagtaatatttatcctaattctgtatgtgtaaatatgcaatcaaatatgaaggtgatgaaagtttgtttggttgttgatattgataatataaacctacaaaattgtgatgaattcttatgatacatttctttgaatgtcctatcacatgtaaactaaattctacatttccttttttcctctgctcaaacagatactagcttgatattttcataagtcataactccctgccaccccccaaatcaaaactgagaatgtttgtgaaattgttgcgaatatttttaagatttaggcattaggttgtgaatcatccaaaaactcaagtaattctttgtgtttttttgcataagactagttggtaatgtcacctttatattataattcctaatttcctagtacatacatgtaaaatttaattgtttctgctttatgtatatgttgtacattttgtgtaattactagcatttctatttactcatggcgtgtaactaaacagggatcatatattctgccttttacattatgttggctttgtttgtcatgttcttcttcacattataggatgatctaacatggatgtagcagggactttg

SEQ ID NO: 2247 - DNA, 3462 bp, Glycine max
  Intron number 2 from transcript Glyma19g41880.2 (locus Gly ma19g41880) derived from phytozome v7.0 (chr-ID Gm19; pos 48031941 to 48035402 reverse strand)
attgaaggccgttagccattaaaaaagaccgaatcgttgtgagttttattgttaacgtttctttgtttgttacatcaaaatcttcattgcgcagtggtattttattttttcctcgatttgtgtgactttagattaggaagaataaaggggataggaggaagcttaaccttgaattgcaagttacttaatatttgttctgttctactagacaacaaccttccatcgttgtggtgctgattctgtaatgttgaatctttctaagctctctcttgtcgagtgtttacctctgtatgtgcttaaaacttgttagaatttcaagcattttagtttgaagaaattgtctctaagggaatggagttgaatgatttcccctaacttaatttgaaatcagctggggattttagccactaaattgggttgtaggagatattggtagtggcctgaactttagtcaatggcttttcttaaaacctatttagtccacactgtttgtattggtccaaatttcccatatagagtacactgtatatgactgaaaaaactcatctgagaatctcacttttaagctagagatgccatttttggttctgtaagttgtacaatgggaggtgaagataaatgaatgagaaatgatacttgtactatcatttgtacaacaaaatatacaactaagagagagaaatagataaaagggaaaaaattgaatttaaattgtaataaatgataagattgaggagatacacacaaaatatgatgttgaataaattgttgtacaacttgtatgtctatcatatctctaaatgaattggttggttggaaattttatatacatttcttgatactggtcaagtgttcattatattaaatgttaacaaggaacatttatttgattagaaaaatgggaatatttgggacttgataagtggagtcttgcatttgatgccaagcatgggagatgtagagaaagtgtgttaggtgaaagggtgagtgtctcaagcaaaaaatcttgacatttttggatcaactggatgagagaatgaggatagtagatgttggttgcttgcacattgggcctagcagtacttgtgaagtattgcaggattgcatgagttgagtagtcttcaagattcactcgaggttgcttctcttccgccatgagtggtgtctcctccaagataagagagcaaggagggagcgaaactggttgaggttgaagagaagaagactctccttgtctagcttgcctttcttggtgcttttgtttcttcctttttgaattgtattttttgcaagtcttttcaatctccggatcacatggaactgatttccctcttcaagctttacctcgcatacaagaaacaatagatactagaagcacaagttagaacaaagagacaagaattgaaagctagaattttaaagataaagaatgaaaggcctaaatatggtcacacaaatgattgggcacgaggaacaaagtctctgacaacggcgtcaaaaacttgttaaccgattgacaagtgaaccaaatcacgcaagtagtaataaaatggtaagatctagtgttgtgtccatagagacttcgtttgtgctaaatagtttgtgtaaactaagttctaagcaatggaataaaatgagttgattgacttttaagataagagtgcataaatttaaagttcaagattaagcaaagacattaaaaactgtgcaaagttcaacgaggcaaaaacacaaacactttgagggcaagagataacttagtgctgaatttgtagaaatgttgggtgcttggcctaccaaatgaactcttgacgtaatgtgaatgatttttcaccaatcaatgttatttcaactattatcttaaccactaatttattctaataatgatctctcatgtgaaagagcctaaatccattgactgcactcctaattccttataaagttaaacaaagtgatttgattaagagcaagggtttataaaaaggctaataaacaccattccatccctagatatgagttaattagaaaccccttttagttcttagtgtaaaaacatttctcaatgatcattattactctataacatacatgcacatgggtgatcaaacctagaaaggaaacaatgatattgaaataacattaaatggatagttaagataattacatcacaggttttttggtatccaagtccccaacaataggtaagttaacttctcataggcatgagagacccaaaacaagaagaaaatacaagggaaaatgaagaacaatggcacccaaagagttcttagtcaaaaatgcacatgccctagagttctcccccctctttccaatgaaacaatgcttttaaataggcctaagagtgttgtactgttgttttggcataatggtttgtgtgcttagcccagctttcgcgctaagcgcgcatacaaaagcagcacttggctaagtgacagtacgccgagcatgaggttagcccaaatctttggcagtggttgttcagtgcgcatatggtgttgagcacacaccaagcttcaaatttgcctccagatgcttgccatatgtccttccaggctagctctgccgtgctaagcgggctgcctcatcaacccaagtattcttccttccttattgatgcatcaagctctttaaatcacaaccaaaactacattattcgtaagttttattcatagtgaactaagaactaagaaaaactgtaaaacttaaaaaaaggctcaaactaaacatcaattaaggaaaatttaagatgaagtgctgcgtgaaactaatgaaaaagtaatgattcacaacacttatcatagggactaaaataaaaaatcatgatatttttgcgaactaataacttatttaaacctaataaaattgatggagtagaaaacaaactttgtgaaattctcattgtgtgaaatgttatacaatgcaataagaacatgtttttttcatgattaattactgcaagaataatttttatttacaacttgtgtcaattaatctcaatccaaatttataggttaatttaaattaaattatttcataaatatgaaatgttataaaaggaaaggagttatatatgttttcgttctgtcccataatgctttctgctgcctattgcacattcagaaattgcttgtcaaaaactgtaatatcaaaaacatacacagtgatggagaataattaattgactaggaatttcttgaaatcatgatcaagtatcattcatttgtgaaggaaataactccttaaaatatattatgtgacgctgtcatatggcactatgttagagttaaaaccttgtctcgtggtagatgacgtgctacaaaagctttagtaatatgaaacttaccattaacatgaatttgtggcttgggaaatgtcatcattccatatgttatttttttccaaattgcaggcaaaagtggaagttttgtttggtatcaggtg

SEQ ID NO: 2248 - DNA, 3924 bp, Glycine max
  Intron number 4 from transcript Glyma16g31980.1 (locus Gly ma16g31980) derived from phytozome v7.0 (chr-ID Gm16; pos 35195606 to 35199529 reverse strand)
attgctgagagtgataagaacacttaaatcctcaggtagtatgttttacatattgttctgattttgcttcatttttccttctcttcctgataatactagcttagtctcttctcaatactcatagtcacagcaagtgaaaggttgctatataatttccttgtcgatcctcttgtaaccttgtttttgctatatttggctttggcacatgacaatttttaagtaactattactggggacagtctttttgttatacttgtaattttgatcatccttgaataacagaactgttgaaggggggaaaagatcaaaagactactaaaagaccacttgatagactgatgaatctgaagtttctttttttgttggtgtaatatgttgcatcattgcctagtcttaaggagagcctctgtggtagtggtgctagccttatggaaattatgtgtatcatgctcctaccgatgtaactaaattattatattagactatggagttgttgtatgaactcatgtcaaagttactatgatgagtatgtttattatttcttattgattactagtaattgagttactaaatgcatgtggtgagtttgtttaatatggatttgtttattatgtcttattaattgctgagaaatgcatgtgatgagagatgaatttgtttaatattaggattaggaaacgctatataggatgaatgggacataggactggagataatggaatcttagattatcaaaagaaaaactgcatggccacgagtaggaataagaaaaaatatttttaatgtagaattaagcagggtttcatgagtattatttgaatcttgaataaacaagttttataaggtaggttttagctctcttaaatcaagatattctttctttgaaacatatgatccatctttattttgatattttccttgagaccaaaatttttggtttcaagtcatacaaattacttgccttttgtgaatcttggaacaagtgttctattcaaattctttagaataacgtgaggtgcatagtgaaaaagcgaaaccgtgcttccaacacaaaatgtcccacaacacgtatgttattcagttcagagttttattatgtgtattgcaaaaatttaaaacccctgccaattacaacagatttgtatcttgggttctatatagtggagatggttcattttacttacttaatcttcgttgccagtgctactgcaatgaaatgagtccaaagtgtgtcatgaaatatgttgtgctgcacaatttcataacaacagtattggtacggatgtctatttcagatacaaatccaattcatttgtccctctgttttactgtccatcttagacatttcttaagcttaacatcagtccttatggctgttaccttgaacttccgaaatctctgcaattaccggcaagaaagtccttcagaaagtagaagctgaccaaaagattattccataaccgactcttgttgctgaatcaaaggggattagccgacaaattacttaattttctatgaatttttcatttatcacttaacaagtgaactttgcttatttctttttttaggatcggcgaatcaaatgatatttctgttccaaattttgtctcttctccctctgaatcacacttttcctgtgccttttacaaagtttatatttgttgaaaactttgtaaatttctgaatgttccttgcatcatgatgcaaaattctctgcatatataagtttgaatctggagtttatctgctgccagtacaaaattgtactttctactcccaatgctagttctctcacaatcatggatcattcctgtttcagttatcatgaactatcctccacatgcagcacttatatatcttatcctgtcatcataagccggctgcaagtgttggcaaatgtaaaagatattgacactctccttctggtatcctaaaattagttttaaggtttaaatataatttttgtttctacactttaatgtttttttatttttgtccctgaaaaaaattattttagtccttctaaaatgtgttctttttttcatccttgaaatattttagataatattttttttctttgtttaaaatattttttattgttcaaagcgctatttaaaatatttgaaagataaaaaacaaaataaacatattttagaaaaactaaaacaaaaaaaattacaaggaaaaataaaaaaaaaagttaaattggagggacaacaaatttacttaagtctagttttaaatggaagttaatttagtttgtttgtttttttcactttttattaggctcatatgatgtacgcattcttatgtcaaaagtttgcctatgttcaatcttgcattatttcttcactctcttctcttagtttacctcctaccacccattgatcaagccagggtaatgtttcttttccccctcccaccttcctatgaattgtatcttagaaccaattagtttgatatttctggcccacttccacattggttgatgaaatgcttaagtcgctagtatgttaattctgtacgcctgtacttaagtccatgatgaaaaatctgtgaaagaatgctggcagcagcttgtaggcgcgcgtgtatatatatatatatatatattagctggccattgtggtcatggttcctgtttctccgttttcttctctaattctttgtatctctcttttcctttcatctacatttccttttcagttgtctttatttttgtgttgtacaagtctctctatttctcctctgttgagcctttgttttgtcctctctgaacatatgctgtgaggcttctgatcttatcccttaagtctgtggattatgtacatttggtgaactttatttcttactacatgtttgtagtttgtattttatgatttttttattacattctgtagtttttctagtatactttttgtgtgtataattcttttttattttagctagccatcatgtttctactttagaccacaatgttatctgccatattttcatggcagacttttgacttgtcaccataagcaactagaatgggtgcttgaaaatagtaatttcatatatattatgcactaatatttacatccaagtgtcatacaataataaataatttttagttgcaagatatggttttgtcaacattactgacttggacttaattgcattaagcgagtatagtatctctgcattgctggcaaatgttcggtgtttctgatttctcagatttcaatatccatttcaatgcttggcacctatatgatagcttttgttttcaattcattctccactttgccaatttgatttatatgctgttatgccatccagaaaattcacatgtatttttggatttgttatgtataatctgtgcaaggtaataatcccggtgacttttacttttatgtatttagaggatacgataatgcttaagagttttatttagatgaaaagccaatgattatcaatctaaaatatttgaaggctagtaagatagtagtttacaagattacagttaactgattaagtgaacatatgtcttaaacttcctgtgttttggttcagtcttgcttgctgtattgtagctttagatattgaaatcactaaatgtaatcactcttaattagatgttgcaaattatgttgaagcttgagcacgttttggcataagtttgctagggacttcctttataacataccactttcctgattctagttttaacttgcacacttggtttagttctattgctaagttgagttgaagcataagaagatttactgagggcatgccattttttttaaattgacccacataatatgtacacccttttataaattggttttgactaatttaactcttgcttatttaggttcttgtccatacattgttgatccaggtactcaaaggatttgtgttgccgagcttagtgag

SEQ ID NO: 2249 - DNA, 1257 bp, Glycine max
  Intron number 4 from transcript Glyma08g42400.2 (locus Gly ma08g42400) derived from phytozome v7.0 (chr-ID Gm08; pos 42393170 to 42394426)
caaatcctgctctcaaagtaagtaacacaaactttggtcaagttcaagttactgaacttttgatctgctcgacagtgattcataaacaatgcaaaccttacctttgttatgaaaatatgttcttaattttatcttgtagaaacttgtatttttttaaatttctagtttttgcaaatcttttagctcatttcatttgattttttgtgagtattatatactcacataggtggttgttaagtattatttacagtaatgagctttgattctgttgatattaaagggatttaggtaggtaaggaggaagaaagaatagagattctgaataatattctcttgtatataatgacatgacctgttggatgtgatacaaaaacaaagctataatctctatttatacttatacaagactcctaatactaatgaaataaggaaacagattgtaaaatgtaaagaaatatggaagctactcctaagagattatttaagatacttggaaatattctaatatataaccatgatattatgagatatccctctagatattctaacagattctacacattgtgggagcccctgaagattttaggtgtctataaaattgaatcactgaaaattttagttacaaatcaaaactcagaattttgtaacaatttataaattaatattattttgctttatattatctgaacccccaaggtctgagttggtagctattgcctaagatgattgcactatttaagtttataatgagacaagtaatcaatagaactgcatcatatgttttgagtttgaacctttgttttttttttttggtgaatgaaccattatttacctcagctttgaaatacttaagaaaaacaaaaataggtgattcttttccagtcaatttctgcagtatttacttaattctgtcaaataatgctaagttgttcccttgaaaataatgatttattttagttgttatattgaaaaaattggtagacccaggtttacagtttgttgattctacctgccggcctctcttttagatttgatgctgttcattattttgataagtggttatcgtgggatattacattttcctacgtcttagttcaatatacatgtgagtgcagagtattactttattatttattaggatttaacatgttattgccttgttgtgtttaatttgattcagctttgactatttattttaaaacttttttgtattttaatgtagggtcttgatatctacaactcaaagcaagtgagaga

SEQ ID NO: 2250 - DNA, 3155 bp, Glycine max
  Intron number 1 from transcript Glyma19g32940.1 (locus Gly ma19g32940) derived from phytozome v7.0 (chr-ID Gm19; pos 40627614 to 40630768)
ctctctccaacaatccctctcgttcacactttcaggtctctctctctctctctcattatctctttattttaatgtattttattctcgattaaatatgaatgctatgcttctcttctcaccgcttcaatcgcaccttcttattttccaatttccctattctcgttcgatctaaccttttccgctcttcgtgcttcgaatgactgagtaaatctacgattctctgttcattcatttcatagatttcgcgtgattttggctattttttatttgcggccattccttacatgtagtggttgattttcaaacttttctcctcgatataactcttgtgcataaatgaacctggctgtttagcgctatctgcatatttccgtgacgcatctctatcggatctaaggaggaatctcctttttcctccgtgtcatttgttgtatttattgttctgtgctaatacttcagaaaatggctgcattgtgttcttctttgctgtattaagtgtttgtgttgtgaatctggaagcgattttgcgtgacgtaacttgcgtcttctactattctctttcagatctcattcactgttcctctttgatgtttttttttgcttactaagcctatttaatgatattctttacaaatagttagtggactatttggttggttggtgagttatgaatattcgtattctctaccacaagttgggttaaaaaatctctgcaactccacgaggatatgttttttattgtttagagaaaattactctttcttccttccttttcaaattacacgttttgcatcatttgttttgaaatatatactttatgaatataataagttatattgtgattatttttaaattgatgaatacttatgaatgtttgtcaatatttttttcttgccattaattaatcttgaacatgttattgatatctctgatctatattttgtcctgattttagtattttagaacgaagaataaaattttatattttttattatcaattttgagccatcaaaataattttcaaaaattattttaaccatcaaaattaattttgtcaacccatcctacaaggcgtttaacttaatcattatatttgcttgggtgaagtgagaaaacaaggaagaaaatattaaaaactagcagagaagttaaagataatttctcccttattatttagataaagagaaaatggaagaaaataaaataacactgcctattatctcatttgtttaaaaaacaatgaaagcatataactatataaaatacagtactataactgagccaagaacatattttgtcgtctgagtaactttttcttttgcttgttacgctttctccgccgatgcagaaggagtatatgtttgtgttttatgttttgaaagattcaatccccggttttaaagataatacagtatgttttatttaaaagaattagtagtttttttaatatgtttattattaggcgtgcagactactacaactaaccgcaataattttttaatattttcttcacaataaaattgttttcgttttttctaacggtttacgacacgtaatgggttttgaacttgagaacgtgcaaataatctaaactccttctggttgagtaacgaagtgaagaaccaattataatttgtaaatacttgagtaagagttcgtgcataaattggtttttatcagttttttccacaaaattatgatttcctgatatttaaaaataaataaataactatattccgtaagtcgtacacagttatattcagcaaataaattatatttaataattattatcttaaaagttacttaagaacttggtaaaaatatttttgtttgaaaaagtatatgataaaagtttacgataatgtaactcgtgcttagctgttcctaatttctgtaacaaaaaaaaaagtttcttatttgaaatttgtaaatttccgggtcatgttaagaaaatcttgtagacgaaaagccggcctattgcatgcaccgatcattgattactagatacggaaaacgactcaattaatttaatatgagatgcggaccgatcactagagatgcttcgttcaacatatttgatattgccaatattggccatccctctcatcattattgtttatttatttgtaacatcacatattcttgtgggtccgcttaggattaggtgtttgttgcaaaaaatacaaaaaaaaatctgtggaacaaggatcaacatatattgtttgtttaattgattgattgattagtttgcaagctgtattttataatttaatttaattcaacttttgttttttagttaaaattgtttttattttacttattctgaaaacaaatttattctacgcagtgaatcaaatgacaattttaaacacacaatatagcataatcgacaaatcaattttgagtttctttatcattttctttatttattgacatatttgcactttctgcaaagactctgactcgtggtagatatagggaaggttatagaagttagtgtagtgtcatatctagccatttttgcttattggaaaaagccttccctttgtttacagatctggataaggttgcatgcttatttttctcaactgtgaatggttatttctttgcattttttgttttgtttttggttatgggattaattttttaattacgaagaagcttttagagcatcacccgaatctaattcgttttggcttttgtgatcttgatgtaaatctatactaacttggtttgggcaagagaaattggtccttgctcaagtccattctaggacgaaaataaaaatataacagggtatagcagatctctattcgtatgtgggtaacgatagcatgtttctattgttctcttattcttcattggtcacgataacctgctaattatgccacgattgagatgaaaagtaacgaactagtaaaccatagtgagaagaacatttcgctactattgttgaaacgtttacaccaggcacttgagtatgatgcactatatttcaattaatgtaatttttcgctttgatgagaaacattctgattctgtgagtttagaaactattgctgataatccttgatttaagatttcagtcttgttcatgttcatttgaagtgttggtaataaaatgcactgatgtgtcatgtgcagattgtgtgaag

SEQ ID NO: 2251 - DNA, 2937 bp, Glycine max
  Intron number 1 from transcript Glyma04g03390.1 (locus Gly ma04g03390) derived from phytozome v7.0 (chr-ID Gm04; pos 2468650 to 2471586 reverse strand)
tttaatctcgggtaacgcattactggtttctctacagttcatatatgcttgattttagggtttatgaattgatttgatgccctggtagatatctgtgcttagaatttagattaaatgcaagtgttcatataacatttaacttgtggttctttaattccttctttactttgattcataatgaagtgaattgtttatgaaagttatcataagctgatttcctaaggggtagtggctatctgatatcaaatgtttcacaattgcatgagagttgtcaggtgtttgtattctgtttagaaaatgggaacatgacttgataaaatgacctgttcctggaactagctatttttctctatacgtgtttctttgaaaatattcaggaattcactttattaattttctctggatgtgtttctttgaatttattggggcgggtgtcctttgtgttatcttaattacacttgttgagtagttactctcgtaaagatagatattcattttcatcctgtgaaagcatgctgtattattttttttcttaaattaggtaaggtcttcactcttcataactcatggttacatatcacgatttctgtgttttttctttgttcaatacttcaatttctgttgagttgacaggttgctaaacagtataaccccttgaggcattttttggtgctccttttctctttctccaagtgaattggaaaacaaaaatagcttaagcttttccatctgtcatttggcaaaaacaaccgtgatagcctataactggctcttaagggatgattactttttatgctctgtttggtatgataaaatggtagggaaataaggaagagggagaagaaataggccagaaatagaaaaggaggtgtgtttgtagaggggagttggtgggggaacccacttatctctgacaataattgattatgttgtggcagtttttacgtgttttctggtgattttaaacctctgaaaacacataattgattatcaaaacattataatcggttatcataaaacaaaaattgattttgatcgtgtgttatcaaactttgataattgattcattttgaaaattgattaaataattatttttattcttttttttatttctctctttcctattctcttaaatcaaatatccctatttccagtctatttttctcacctatttccatttattttatttctctcttcttgatttccatccaccgattttctcacctattttttcccttcctaccaagcacaccgtttatgaatgagttcctttggctgatgacactttaaaggaaaagtgacgtggaatacatgatagcagatatctcatatgtatgaataatggcacatagctatctctgtctaataaggaacaaaattgttcctttgatgccttggtgatgtacgataacaagatacattacatgtgattaatatgcatccactttgttgcttctcatgttagctagttttgtatgcatagttttatatatcttttaatgtgatgattaaataacaatgacggagttagaatagtttttcatgccttttgaattgagggaagaaatcttggacatatctcacaaactgtatagagtgactgtattatatgaggaaggaaacacttgctgacactctcttgcattatcatatatggatttaagaagtgatgaaaacaagaatcttatagaaaagcatgctataacatttaagacagggaaggaggaagcaaaatcataaagaaaggcatactgtaacatttaaaaatagaactagtaccaccatgactttaggtggtgatagaaactacaagtgagatttgattatgtaaatatggaatagtcattatatgactttattgatttatggttttgggattgaaagaagtgctgtgggaatcaggctatcttcccatggaagaaaattaattaagagtagttcattgttgctgtgttcttcttgaaggggatgagtcaacactctccattacacacaatagaagatggcatcttgatttatcaatgaacttgaatttaaggcaatactgattcctatgtgtgtgtaaatcattttatttttaatagataaggcagtgaaaataatgtgattgcaacttgaaaggaattggtgcataatagatgcctgagccctcttgttcaattgtttttccgttgcaagtgtagtggtttcaattggaaactattgttaatttatccaaattataatgtagaatactataatgttttttttttttctcaagacaccttggctgattagtaagcgtcaagaggaactctgctttgttaggtcggtgtgctctttttggtggttgttgcaatgtgtgggccactattttcatttattaatctgatgtgatcattggacctttatggtgggtatatttttggacttttcatcggttcttctcaccatattttggaaattttcttttttgcctttagtatttagtttggtagtattggatcactcttgtatctgtttagtagctagaaacgttacctcaaacctatactagattattttgtttgtaaaagttgacttttggaatccttgccataataacattatgaagacaaaaaaaatgacatgaagttatttcttccattggttgtttgatatatctcctacgttggcgtgtatttttttaaaaataatttttggattaaacttatccatactatgttttgtccgtttgtttaggattatgttttatggttatggtgtgatcgttttgtacttggttgtgcttcattggtgccaactgtcaaatatttccttaaattttattgatgttaactatatgcaaaattcagttactgtgaagaagaggtatgtaaatttccaaggtataatacgtgtttcacttagctttcttgtttctgtcatactctatagggccgcctgtgcttggggaca

SEQ ID NO: 2252 - DNA, 6319 bp, Glycine max
  Intron number 2 from transcript Glyma15g19520.1 (locus Gly ma15g19520) derived from phytozome v7.0 (chr-ID Gm15; pos 16843791 to 16850109)
agtctcttcggtcttggaaacaggttcttcatccaagtttctctccttttcttccgtttcatctgttcattttagattctgtgtttttatgcatttgttttttttttaaaataaaaaattctttttatgtgtttttgttttaccctttgaggatgagctgggattttgatgttgaggttgcccttgatttgtttttagatgaatttttatcccctttgtttgatcttagtgttttcttaatatgtttgttacataattgtcttttgtgttctgttgaatgggatggttaatcatatgatagaactgtggcataatgattacctgaacatatgttggtaatatggctgtgaaattcgtttgcttcaatttgattattactttgtgttatagcaatgggaatttgtctcattctgaaactgctaatagaagatgatcaagtgattcaggacagagaattcaaatagaaatctaaataatgtaagcctgtaaggtttgtttggatcaaaggagggggtgaaggaattaaattgggggagaaaggaaggaattttggaaccaatcaagagtcgaaattccttctgtcgtttccattctcttccaaccaaatagtatgttaaatgtttttaaactgggtgtgtactaataggttttttactttttgtcgtgccaagaattaaattttggggctttgaaggatcctctgttgggtgggtagagctatgatctcatgtatgcatgtgtcattctcagctggtcatacttaacttgatgttacaaggatgcttttgacttagctgcgtctgcgcgctgtataggtggcttaaaaatgttgaatgatgaatatcatgccatcaaaatttaattgtgctattgaatttttcataacttttttggttatgtgaaatgggacataaaaaccagttttgtaacgttaatgagcatgtaatgctgccttcaacaataattgtttcaaaattagttgacaaaatttgaatccatacgcatttattgggcatagatcattagtagaaacaattgtatgagccaaatttgttagtgatattgtgactacagactgcaacaaaaagggcctaagggaggaagagaccaatgtcagcaggccaagagaaccatcaccaagcctatgcgtttgagagaatcaaaataaagtttgttagtagattctacaggaatataagttagttgttagtggattctgagtttgttaggatggtccatgtgctgtcatggtttttagcttgtcctttcctaatattccttatctgtatgaacagaggacctatatgcacacattgggtactcttgctatatatagtgaatgaattaataaaatggacaagcagaatttcagtactttatttccaggaggcccccttgtcctcgaattcagggaaccttgtagtgactctatcaattggtgttctcgttgccttccttcatggccgatctaacccacggcaaatccattgaccgcttaaaggaatctatcaaactcctttccacttctcaatcagacctggcttctaaagtcgattccatccttacccaacttgctacccttattcccacaccttcttctccaccccgcaaacaccacttgaaactagatgtttcccgttttaacggtgctgatcctatagggtggattttcaaaatttctcaattttttgagtttcatgacacacctaagcacaagcgcccgtttgttgcttccttttatatggatggtcttgccctcagttggtaccagtggatgtaccacaatgggctcataacctcttggctagccttattgcaggctttggagtctcgtttcgctccttcattttatgaggacccttgaggtgcccttttcaagctcacccagtgtggcacagtcacgaagtatctcactgacttagaacgtctggccaatcacgttgtcggcctccctcacccttttctactcagctgcttcattttgggtctccatccgggaatccgcctcaaagttcaagccttacaaccagtggccttaccataggctgtggcgcttgggaagttacaggtggaaaaattggaggactgtcgtcacttcaattgccctaaacctatcagcaacccccttccattacctctgcctccggcagagccacaacctccacccatatcatccgcaaccgctcctacctgttctcttgttccatcttctccagcagcacctcggccccgctatcgtcgtttatcccctgaagagatagctgactgtcacgagaagggtttatgctacaactgcgatgagaagtttggccccaatcaccgctacaaggctggtttcttccttctcatcgccgaggatgaaaccaaccaagaactgccacatccacagatcagttttaatgcgttgtccgaccatcccatctacgaggctcttcgtttgcaagactctatcaaccaccaccccattacgattttgatcaatggaggaagcacccataacttcctccagaccaaggtcgctaagttcttaggcctcccttcttgaacaactccagccttgtgggtcatggtgggtgacggcttcgtcatcgattgcctgcacctctgttccgttcccctttccattcaagggcaccattttgtggtcgacttccatgtactacccattagtggggctgatgtggtcttgggtgtccagtggcttaaggaactaagcccaattgtgaccgactatcaggctcttaccatgtcatttattagggatggcacccaagttgaaatccattcctaccccccttccccaccattggacatttcggcccaacaggtcaagcatctggtccagatccacgctgcctctgccttcttccacatccaattacttccaacacccaagcattctgtcaccctagactgtcctgaccaccccaaccctcacccctcatctctgctacacaaatttcaacatctattcactactcccaccggtctcccacctgatcgtcctacgaaccaccaaattcaccttcacccaatgcctctccgaccaatgttcgtccctgtcggtacccacattttcataaatgcgaaattgaatgttaggttgatgaattattgtgtgaatgccttatccagccaagtcggagcccctattcttctccattactcttggtgaagaagaaaggtggcacttggatttccaagccttgaatgcgataacgatccgtgacagattttccattccaaccatcgacgaattgcttgatgaattgggtggtgcttcgtggttctccaagcttgacttacgccaaggatttcaccagatttgtatgcatttggaagatataccaaagaccaccttttgaactcatcatagacactacgaatatagagtgatgctgtttgggctatgtaacgccccatccacgttttaggctaccatgaacacaacactagctccgttcattcgttggtttgtggtcattttcttcgatgatatccttgtctagagccattctttggcggaccatcttgaacacttggccagtgtcttctcgtctttaggagaacaaattctatctatgggattccaaatgcattattggccaacgtcatctagagtacattggtcatattatatctcagtctggagtggcgtcaaaaccctccaaaaagcaatgaccgattggcccatcccttcctttgttcgagctctttgcagattcctaggactcaaaggattctaccgcaagttcattaaagggtatgctgctattgcccatcctgtgaaccaattactccatatgggcttcttccaatggtcacctagtgctcaacaagcttttgattccttgaagagagccatgaccgaggcccttgttttggcccttctggattttgccttaccatttgttttggaaacagatgctttgggcgccactatgggtgttgtcctcatgcaatctaaccaccccatagcctttttcagcaagaacttctgtccacgctaagcttgcgcctccacttacattcgcgagttacatgctatcacttcagctgtgaagaaatggcggcaatatttattgggacaccctttcattattctcacggaccataagagcctcaaggatctcatgacgtcggtaatgcagacacttgaacaacaagtttatctctcaaaactcatgggatacgattatttgatccaatattgcattgaacgacataatgtggttgcgaacgccctttcccgttcggacggccagtgcttgatactttctgtccctcaattcgccttcctggacgagctccagcgcaacctatcttctagtgaggcattccacaatttggtccgcaatattaatgaccaccctacggaattttgcgattatcgcattcacgaaggactagttatttttaaggggtgtatctagatagaccctaccacaccctttcgcaccattttgttataggaatttcatcaaacatctgtcgcaggccatatgggtgttaccaaaacccttgctcgtttgctggaaaacttcttttggaagggaatgcgcaaggatgtcagaaattttgtagcacaatgcatcacttgccaatctacgaagtatgaaaccaaacgaccaactgatctgctccaaccattgccagttcccacagctgtttgggaggactttttccttgatttcatcacaggccttcctttatccaatggcaatacaattccgttattcttgttgttgttgaccgtttctctaaggcagctcatttcggtggtcttccaggccatttcacagctttcaaggttgctcaattattccttgaattggtctgcaaacaccacgagataccccgtagcatggtttatgatcgcgcccctgtctttattagcaaattttggcgtgtactcttcaagcttagcggcacctaactccgtatgagcactgcctatcaccctgaaaccgatgggcagacagagatccttaaccgtacgctggaacaataccttcgtgcctttgtgcattttaacctgtcgagatggggaaaattcgtcgcattagcagaatggtcttatgacaccgctgtgcattcagccacaggacagtccccttatcaaataatttatggtaaacctcctccatccattctccattatttgcttgggtcttccactattgaggccgttgaccagttgctttcggagtgccaagctatgctacgaactctccaccgaaagctcctcaaagctcaaactgctatgtaaatgcaagctgacaaaaagcgcagggatgtgtcctatagtattggtgactgggtttatgttcgtttgcgcccctatcgccaaacatcggtctccgggtcaacatatacctaactcgcgaaacgattttatgtcccgtatcaaataactgagcatacaccctcactccaaaattcatccggttttccactgtgtcttactcaaactgcatagaggtcccccgccagtccagcctgaagctctaccctccatattccatgatcatcatcccttgattcaaccactaaccatattataatctaaatgggaccatgattctactcctcccattcattgggttttggtttagtggttaggcctttcccctgaagatacaacgtgggaacgctgggacgatctttctcggacatttcaccttgaggacaaggtgattctcccaggggatggcaatgttagtgatattgtgactacagacagcaacaaaaatggcctaagggaggaagagaccaacgtcagcaggcccaagagaactatcaccaagcctatgcgtttcagagaatagaaataaagtttgttagtagattctataggaatatcagtttgttgttagtggattctgagtttgttaggatggtccatgtgctgtcatgaccgttagcatgtcctttcctaatattccttgtctgtacgaacagaggacctatatgcacacattgggtactcttgctatatatagtgaatgaatgaataaaatggacaagcagaatttcagtactttatttccaggaggcccccttgtccttgaattcagggaacattgtagtgactctatcaaaattgctccagtctgcaattttttccctgctactttttccgtaagtaaaatgaattgtctgattcgattaatccctcttttttttgttattttgtttgttcttttggctcgtagtgtggtatacttttgttttttttttctgtcgatgactactcatacattatcaaactttgatccatgcagaaaccaaaaaacatttcgtccaaaaaagagcgctc

SEQ ID NO: 2253 - DNA, 893 bp, Glycine max
  Intron number 14 from transcript Glyma10g31450.1 (locus Gl yma10g31450) derived from phytozome v7.0 (chr-ID Gm10; pos 39956568 to 39957460)
gaaggtaattatatctacgttttgtccattttcttcttgttcaatatatgcataaccttcatgtagtagcaacttactgcatcatataagcagcatgctcaaccttggccttatgactttctgtagttgaccatctccaaatctgattttaggcattcatcatcaactaggaaaggtactagtaaaatagttgaaagtttcaggggcagaaacttaggtggttaaaaaaatcatataatttagtaggtggttattaaaaaacccgtataatttagtttaattatatgatttgatctttttttttttttgtaaatttagaaactactgtattaaacactcatttagtcttatgaaaagttgttcaatttttagaattattacacctggataaagtcttatttctttttatttcctaccttaaaacacttccattctaccacctagcttccttatctctcaatccaaaaccttttgattctcctgagattggcttagcaaccttcttaaacatcttatcccaaatgagattagcactactttgtgattctcaattatcatcctctgtaattttcttcttaaaagtcaaatgtttatctcccttaagctgcctgtcactatttgattctttgattttttttgttttcagttgaacatcaaggattaagaacccatgttgtgtagttagactttctcttggaatcaccttgcacttgcaagctcttttataagtgcttagattatagtttcctatgagaatcttttcttctcatttttgcagttgcttttgccttttcttttctcctttatattttcatttacctttttcctttgtatatgaactctagccatttttttcctcatttattttatcaggtttggtggtagacagatac

SEQ ID NO: 2254 - DNA, 700 bp, Glycine max
  Intron number 2 from transcript Glyma19g33740.1 (locus Gly ma19g33740) derived from phytozome v7.0 (chr-ID Gm19; pos 41341244 to 41341943)
ggacattggtggaactttcagaagactgtcagaatgtaaggacttttttttttatctgtttttctgtttttattcttaacatttcaatctttgagtgtcaccttgttttggcattttagcaatgatgggaaagaaggcactaatcatgtgatactgatacagtttgtgcataaaaaaaaaggttttttagtgcatatttggattagcttatctgtgggaaacaattgcattgtttttggaagcttttggggagatcttaaaaatgaaagttttgttttccagaaaaaaaaaggtatttgccaaatatagtgagaatttcttttggtagatcgatattctttcctcttacaatagaacactgcaaaagatggacccttttattagctggaagaaggaatgaatttatattaacacagtgatatactagtgtagttagatattactagcaactattttcaatgcagtaaaagcttatataaagggactgggatctcttctggttcaaatgttttgcagtaaggttgaatatacaaaagcttgggcatagcctaaattacattgttaatagtttctaacaatatattttactctttatgtggttttgctatcattattgaatttataattatatgtgattttaattattggttcgtttcattacttaggggttgttacttccaaataggggaggaagtgaaga

SEQ ID NO: 2255 - DNA, 1438 bp, Glycine max
  Intron number 1 from transcript Glyma18g03420.1 (locus Gly ma18g03420) derived from phytozome v7.0 (chr-ID Gm18; pos 2313113 to 2314550)
gtcttttccatatcggtcgcttttgcaagtaactaactcaattaattgcccttaattattgttatgtttcaattttttttttctttcagaattaatcatgctcctaatcctatatcctaccacatcgcctgctgtaaaaaattaatgagttaaacaccaaatttagtgatagaaagttgactttctctagctaactatggggtaactaaatttcagtcacgaattttctaaagttcgggtattaattgaagtggtttaatatagtttgagtttttctttgaatatgtgtatccttattcgttggattatgtgacctaagattcgtggactgcgtgtttcgaacctgctttgttgttgatacttattaaatactgtgaatttggctgatggtggttgttctagttactgttttttggatttttcaatggttaactagcagcgccaggtgttattacctgttttgcctatcctccctgcctttattgctatgtttccgttccaattgtttggcagaaagtttttgttatatagcattcagcaataaattgtgctttcatctgttacgttgactcttgaggaatcataaattaatgaggagcgtacaccccccctcccccccccaaaaaaaaaagaatgatagagaaaataatagatgtaggtgggaggacaagacctactagatctgaaaagagtgaagaagtaatgaactctggtagatctctgaagactgtaccgagttgatatgaagccctagcttggcaagtccatctacgcagaaattctcctctctctagctagcaatgtcgaaaatatctctcccagtctctagcaaaaaagaggtcgaaatgatgtgataaaaaatgaagaaacattcttttaaaaaaatagaagtaaaatgagatgaatgagaaagtagagagatatattaataatgactactaattattggtgtatacggtggcagatgtagctgttttaattttgttttagtcccaacgtccagcaatgcttttctattttctcttgcagaattccaaacgattaaatgatttgaatttcatacttctgaagtttcaaatcttcaaattgagagaattttctagggattaatcattcattgactttgagtaagtctaaagaatatgaagttcttatgtttattgactaaaaatgtggtgatcagtttctgttacttgtagcataacttttatttttcatcgtattttttttaaataaaatttatatgatatgatgataataggcatgtttatttgtaggggaaaattctaaacatattagaactttcatgtacattgatctgagactttgtttcttggaagctagaatttatgcctacagttaattaaattattgtggctctcagtaaatttttctttttggcaggagtttaagagtcttgtttttggaggaaagctca

SEQ ID NO: 2256 - DNA, 1886 bp, Glycine max
  Intron number 3 from transcript Glyma17g36100.1 (locus Gly ma17g36100) derived from phytozome v7.0 (chr-ID Gm17; pos 40102762 to 40104647 reverse strand)
ggaacaaggtatgcttagttgcttgcacattcaaatgtttatgttttatgttatttttgccttacttgaatcaagcaaaggtgacatcatgtgactagtaattattaattaatgaacattaaaataattgcttagcaaacaaacttcttctctttctgtttctggtttttccataaaagttttgcgcattgtaacacgttaaagcatacattcgcaaacataaaaagaccagacacattgcttcgcgcgccaggtaggggtcgaacctacgactttctgcttaggaaacagacgctctatccactgagctacaggcgcccatatattgtttcaagacaaataatttattatttatatgtaatattgtaagtagtcttgtgttgtaggtaaagtttgtgaattagttgatacctcacatcaagcatagctaacaactttttaaaattgtttcacaagacatgaatatcaacgcagaccatcaggtagatctttaccaaatattttaatatatatcttccccatgaagcaaggttgtttagccttttaggtagcatttctgttcaaatgaagataagggttagagtatttataaattaatatatatttattttcttttacgtctttcttttattttattttttctatatagtatttcttttctaattaatatatctgtttgacaaaatttcatactcaattttcccgtacgttaagcaaagttatccattcttttaatcttaaattttgatcatcattagcaattgtccggtgaaatatatccaatcaaacagtgtagttatttcttcgtttgttactctgaaacacatgaactaatgtttagagttgtgcaaacgataaacgaaacatgtactaaccgttaatcatattgtattcagtttactgaggaagtttttgttgattgcatgtccacaagttattctgtttgagagagagtaaagaacggtcaaaattatagtacaagcttcttaattttagaattttttttttgcatatcaattgataaccactacataattttaatagacgtgaactaaccacttggatggctacctcagtctttcttctcctaaaaagtaatgttagttgtctatatattgacttgtcataataatagtttacttctagtttagcatgaatcttgttttttatttttctcaatgcatgcttgttataatatcttcaatttccttgtgtaccagaagtatcgtgttttaagaaacccttgccttgcattacaatcaaagttagttaccatttagctttcaacttttcctgcactgagtattttataaaatcataataagattttacttatgaccgtatcaaaggctcaatcatgcattctctcgtaggaaataaggaaattaaatggcctacatatacaatatttttttctacactagctattttcgtataagcaaactacgtatattacgtgaatattgaggaactaaaaatctgaaattgtgaaatttgtgtccctaaaaaattagtttcaaacacaattatgaaatttgagaaactaaattcccataattgtaatacttgaagatccgactgacacacttgaaatatgaaaaatttaattaaaaagaatgcatttgtgatatctagatattcaattgaaacaattacaacttatgatatttgagtaacattaaattgattcaaaaggataaaaaaatgtgataggaggagaaaatctgcttaaatataacaataatattataataataaattatttggtggatcaatatgtaactaaacctacaaaaaatgtttaaaaagtagctaattaatatgttaatttaaattttgtttaatgtttcaggaatcgacaaggtgtacgacacgtggaacctgga

SEQ ID NO: 2257 - DNA, 4190 bp, Glycine max
  Intron number 13 from transcript Glyma08g00510.1 (locus Gl yma08g00510) derived from phytozome v7.0 (chr-ID Gm08; pos 211602 to 215791 reverse strand)
ttgaaggaacaaccaatctgccaccttcacaaacggtatgcaatgatggttgaaaatttgttgctactatatcattctaaattgcaattgtgcttacttaatacatcgttggcctatctcaatcttgcaagtcttgttatagatttaaaattttcatagagctgggcatgtcaaaatagtgaaggatatttgtccttaaatcgtgatcatcttttaatgaaattttatcgacttaagtttactaggagcaatgaatattagagaaattaaggatgttctttttttatggataaggcagcatttcataattgtaagagtattgcatattgcatctttagagaaatgaaggattattttcaaatgtttgatgtaccttcaattgtgtacacacaatttatgttatgactttgggttcaattccttggtgggtggtttagtcaattcctctttgttgccacaatcatccaaacaatatttgcatgcaatattggtgaatagaatacaaacgattttctctgaaagccatgcggcttcttttacattaactatctcccatttcttaaaaatattttatattattaatattattgcttaaacttagttaaattcctatttgaatttagttttctaatttttgaattttaacaccatataaaattaatagacatagagataatgtgttttgattcaatttttttttttgtaatttcctctttaattttaaaaagcactctgtttaatttattcctatctaataaaatagaattctcattatttgcaatgaataaatttctcatcatacttttcttaagatatgttatttcaccattgttaaacaatattgatatgtttctcctatattttttttttattatttatatttttaaatttatgtaaaatttaaaagtacccatgcattaacttgttagttttatatttctttcagataagggatctgcttggagattatgtagatgataattaacattaataaagttcaattacatggtgccatgatgtttatgaaaatttcaatgattttgctatgtctaatagaacatagttggctttttttaccatgttggcacagttcgagttcaatttttattagactagttgaaacttttgcatttattattaaattagagcaagtccttcatttgtggattggtaatgataagtcatagttggtattaatgaatattgtgaaaaaatacattttatacatgtcatagttgaaaattttaaatatatattatattacaaaagttgtacacaaaaaatgacaacctaaccctttattatatcatgagttgtccatgatctacaacttgcctagattatttatttaattagataattggtaagctttttaaattttaaaaaacataaaaaccaaaagttatttaaattgtatgtcatttgacttgcttaatttttaatttacaacaactccgcaagtcatacacgacatatacaacatacgtatttcttaattttgtatgtaagtcttaaaaacccttaactaatgcagaatcatttgtaaagaaaatgcttagttctacttctgctaaaatgtcattgctttcccttcctgtagaatgaagtttcattttctttctcctgcttactgggtgtctactcaatgagattaaattatttctatttttgggtgttgtcatctaatgctgtagaatgaaaaacaagatcaagatatcaaaagtgaaaatactaattcataggatgcttttcgaccccatctatttaatcaacacaacacaattacaaaataagacttactatagtggcatttagcttccaactacaaaggtttcaaccagtgttattaaacctggttcgacttggtcgataggactggaaaccgggcttgtagccgggtcagtttagttacttgatcattttatgttatcaactcagtgtcacgttatcaaacaggtcccgaactggactaaactggtgtattcacttggacaggactgtatggaaaccagttgaatcactcccctctggttttttcacgttctcataggctgaattctgtgtcccaaactgtctcaagtgattcgaccagtgatccccattgattcagtatctttactgagtcaatgaccagttcagttaactatggtttcaaccaattatagaagaatttgcgacaattgaattcatcaacgatatacctaaaaatgaactttttgatatctggccataactcctcttctatcaactaacctatcctgctagatattttgtcaactacttcaaaaaaaattctgatttttgtagctaaaatttggataaaatcatacttgtgagcatcaacacccttttaattcataagtttcaactgcctacacttcttgtgaagtattcacaatttctcctcacaatatctcaatcacaaaacatttttgttttctctagactgccacattttgatcccagtgttttaaatcctgtatagtggtgactagctctgaatgctataatgggatcggattgcaggatagctgctgtactatatacatataaattctcaaaatgataaaaattactcaaaattcatgacataataggcgtctcaaacagaacatacaagtaaatactaacagaagtcaaatacaaaattcctagataggattcatcaattatcattttctaaatctaaatcttctttatcattttcactactattacagttgtagatttcatttttggaagttgaaatcccaaaaaataaccccctaaaaaagccatagcatttttgttcggagggttttttccgaaatcaacacatactgctgctatccctatcatatcctgtctgctacagctgctattcagcccactaattggtctgctatactaatcctctctgctatggaagccactgtagtggccaagggccgctccattctactgaactgctataggacactatttaaagccctgttttaatcaacaacttgtgtttacacgataaaaaatgagagcatttttgaaaagatgatggtgcagatttttctgcattggactgaagatttaatatttgctttctcttttttgtcttttgcccaaatatcaggtggatggtgtgaacatttaactgtcaaaattgactgttaaattggataggaagggaaaattacaatgaattgtgttaaattatggtatattatgcttaatttaatatgtaaggatgaaagtgcaactagagtaataattcaaagattagggtataaaatgcttttcttaccttaaattttgaaatattacaaaactatgtaagtcatctatgccataatagattatataatttttataattctaaaagttatgcaatgtgtatgacatatgcagctgacttaaaaattatgtaagttgtatatgccatatacgatttatgtaaatttttatttaaatatcttttcaatttgaaaacttattatttaattatttaattaaatatgtaacactgtccaagtgtcatatattatggattcatgataaaataaaattaagttgtcatttttcatgtatacaacttttgtaatttaatttaattatggaagacttgcacaaaatatattttcctcattaatcatcaagaccgttataaatttccttacaaaattcatagatggtagagtaataaattccagacttgcactagtttggatattatactagtataattaaaaaaggcagatataattacttaactatttattagtaatatgccaactgccttttgttcatatgattgtctggttccttgctgagcttaaatatctgtgtgtgtgaataatattagggtgagccttggtgataaggtagccttgtgaactagaggttcaaatcctggaagcattctttctgtttgtggggtaagacagcatacattttccctccatagacctcactaggtgggagccttgtgctatgggtcatccggtcatcctgtatgtatgaataaaatgctgagtgggatttgtgcatttgatatcattgttcctttatgaaatttaagttgccttggttttaaaaatacccatttatggtaaagtatggttttatactagcttgtgcacaagttgtacgtgtaaacatgctctacttcagagttttaattgtttaaatttatttcttatttcttttgaatcaggtaa

SEQ ID NO: 2258 - DNA, 1736 bp, Glycine max
  Intron number 4 from transcript Glyma09g27630.2 (locus Gly ma09g27630) derived from phytozome v7.0 (chr-ID Gm09; pos 34512942 to 34514677)
actgcaactgtaaaattggcggtcgcagatttcaggtgatgctccgcatttcaaaatcatatgtaacttttttctattaggctggtactttgaatctttagctttagaaattcattaatatgcttgcttttcatcttaagtgaagtgaaatcaattatgttcggagaaatgtccacttaaaaaaaattgaaatactcatttacctcagaataatttttattcattaaaaaacgattagtgaggacattgtggctttacattgacaatatgatgtacatcatactaacatatagttttgatgatttaaaaatcgaaataactccacaacttttatactaacgtacagtctaatttttagtaagcaaaatcatattaaaagaattaattttaacacgtataacacatgtttctcattagtatgtgacactgatgataggtataacatttcaaaaagaaggaaaaaaatatttaagatgttataactttgtatgcttcctgtgacaatcttcattttgtcggtgagtttgcaccccaaacaatgatttgtgctgttatgacagttttacattaagaattagtacacattaggtaaataaattcttacatatgtttttttaggatagttcttacatatgttaatatatattccgttgtgatagatatcatgcttggaaatatcttatagtaatcctcttatatagcttttgctaaaatgtgcttaaaattcctgtagaatatagtcaaatttaagatttaatctttcaataaagaaatttgttgatttttttcataaattttattttatttttaaaccgtctgcatcatcacgtttgttgatgagcgtatagtatacatacacgtacatttcaatatatatgttacatcttacttcaaaataataattaatatgatataaccagatatgtgtcacatcattaataattaaatgatgatatgggttactttaaaaaattaaaatttatgaagataaaaaaaacaatatatatatacccctgaaaatacaataggtcaggaccctctattgctttcttctatgaagtctctctatttctctctaattattctttatctctctgtcatttggcttcctctctctaatgttcctgtccttctccttttatttgttttggcttttaaagagagaagggctagagaggatcgagctagtttccctaggtgaatgcataaactatggtcaatcaattgaatgtaacgagtttaataaatttccaacatgcacgaatcatgagtggccagttgaatacttgagtcttgagaaagaactaacgctctagacttcaagcagaagtcgcaaacattgtattctgtggtgtggtacgtagttacagaatgcatctaacttgagaaaagattgagtgcaactagctattgtagaatatatatttgttctcaaatttggttgatgaatataccaatattattttggtggtcgataatttacttacccatattaggattgataccatttgagatattggcttaaatgagaatatctgaatatgattaaatggtcagaaattcaagttttaaaggcccgcattctttgaaaggcaaagtttaaagccctactatgatcgagaatatcggacttaattatgaatataatacaaaatttcttaaggtttatcatgtttacttttttggtctggtatttcatttacatgatactgatgcaggtccccagatctctgcta

SEQ ID NO: 2259 - DNA, 2189 bp, Glycine max
  Intron number 2 from transcript Glyma02g07280.1 (locus Gly ma02g07280) derived from phytozome v7.0 (chr-ID Gm02; pos 5788343 to 5790531 reverse strand)
cagctgccattgttggtatcctgctcttcagtttcttgatatctatagcatatttgtttgagcatttaccaattaccatagatgatatttttctttagatgtcattttctaccaccaaattaagtgtttttcattctatttctctcctccatatttcaattactagcctgttaacatggaaaaattttatgccatacctttaagaattgtcttttgtattcgcagtctcaattgtgataatttttgttccacatttctttcaatttgaacctttaaaagtaacatcttgagccaaatctgattaataatattacttgaagatgtttttttgggtgttgaacgggaggctcatagcaaaccttacaagaaaaagagaataagagaataggaaagagatggagcacattgcgagcatttgaacttggcactcacaattcacgtccttcaaccttaattaagggggaatttttaattttaaaatattaagaatagaatgcaatctaacttaattaatgataaatgactacggttatatatgtactttagaagtggcttatctgtttgatatacatcacgtgtatcttttcagggagataatctttatattagttagtttagtcgatatgataaataaagggtgtcataaacaacctatactattaagatatcattgaaaaataaaacattaactttaccacaatttctttatatttgtgcaacccaaccttcaaggaaagtactttgatttttgacaagattttcattctcataattctctgtacgtcttgaccaaaataaatcatacaattatcaacataacaattaattttcttagcattaacaataacaacacatttttatgcaaataaataatttccactaagcaacattttacaagtgtaacatctggaagcaatctttttacatagaaatgtgtttttcttttcaatcatggcagtttttttactatcacaattgataaattagatcaaactgaaattatttaaaaaagtctaatatttatccattttttacttctttttatttcattttctctattttttctcaaatgaaacgaagcattaagatgaataaaaaaacggaataattgactttgataatttaacccataaataaaaaaaattgaatcattcatattggagccaaatccaaatccaaaaaaagtgaaacaaaatttgtaacaatactaggaaaaaacgttccgaaaattgaacctggaagaaaaagtgcatgtttagtttgcggttaaaattaatgtgatttgtgttccaatgtagattcaatatataaaaacaaaaataagagtctagatcctttagcaaaaaaagtatttttgctttaaaaagtaattttcacctaattttaattagagtagcattttttttttttttttacctttccacacaagcaaaacaaaagtcaaactgaagaaaccgaagggaagggggcgtttattgatctttcgtagatacgaccaagtagtcagtttactgcagcctgattggtgtactttccaaaccgtatggaactagaaatactctcagcaattgacacctctttggcttaatgatatcacatcacatattcatccacccgaaattttttttaccaaattctttttttcttggcctgcaagagtaatttaacctgtgacaaatttgaaatttcagccatcttcagtgaaataaggcactgtaacatagaagaagtgatcaactccttatgaaattacttcaatattgtatccataaaagtaaattccatgtgtatattattagaaactgcaacttggtagatctttctttcctccatgttgtagaagtcgtcaaaaggttcaaactgccacgaagattcgcgcgaagacatttttgtctggttcatgttcgggatataaaacccgccagagatgaaaactgtttccttctaaaaacagaacaactaacacaccacaataccttctaaatttttccatttctctctttacttgttttctttgaacaaattaaactctttttcaccgaaacagtgtgtgcgtgcgtgagttcctagtacctgactttgattcaaaacattaaacagtgtcattgatctctatcattgttccattccttttgatggctccctcgaattcagacaccctgggtcgccattctctgattccgagctat

SEQ ID NO: 2260 - DNA, 861 bp, Glycine max
  Intron number 1 from transcript Glyma07g19060.1 (locus Gly ma07g19060) derived from phytozome v7.0 (chr-ID Gm07; pos 18975471 to 18976331 reverse strand)
agtgtgaatctgccattaacgagcagataaagtgagcatttctatgttccccatctagtttttttttttgtttttttgttaaattagtttcttttgttgtttaatataagcagatcaggcattttttcagcttttctaaagtgtggatttttactttgttgagtgaaaaagtacttttacttgtactttatttaaaaatatatcatgttatgagtacatatagcataaatcattgatgtttcaaaaagattagccatttaactactttttggattttgttcttttattttgagttttgatatatgaatagagtaaataatctcctttttttttttttcgattttgatatatgaataaagtaagtaacttgatgaaaaaaagggataagtaaattgatctaaagttggttttattctctatattttaaagacggtgttatggtccttggatttcttgaaaatgtggtggattttaagtcaaaacggagtagtctggacgaaatccaccacattttcagaaccaatttttattaaattttcagggacttcaaaatatattttactcttggaaagaaattactattgatatttgaagacattcgtaatttgtgtgtaaatgtattattattattatttgacaattgattttctagtcaatttctggaactagttagtttcagtgagttgttatagaggagagctagatccttatttccctccctattaatattaatatagcactacgatctacaattattactttacaaagaaagtaaatttatacttttttttgcatgcatctaataatggtcctctgctaagagctttacctcttatattgtgtgtcacagtgtggaataca

SEQ ID NO: 2261 - DNA, 533 bp, Glycine max
  Intron number 1 from transcript Glyma08g14640.1 (locus Gly ma08g14640) derived from phytozome v7.0 (chr-ID Gm08; pos 10668752 to 10669284 reverse strand)
agaaaaagtttctcaggtacacagatgcatacatttagttgtgacacaaacacaatttttacattctctgaaattgaatcaacacacttaattgctttaattacaatttttttacaatataatattattaataacaatacatatatccaaaattacggctttagtttacattgaaaatatggtgggtcaactctagattttggatccaacttgtacagttccgcgtacctatcaaacaagacgaaatcttcttcatgctatcatgtattattttggtagcttacctaacaacaatgaaattttggtaattggtaagatgttttctaatcaggggaagagcgtaacgaagaaaatcaaattttgttgtttgatgtggaccttaaactcaaactctttgtctcatctaacatattgtacacccattgcaattatagctttgtcaggacgtgataacatgataaagtaaaccataattttaatttcttatcttactcacagaaagggagagtagtcctgggatcgaaggcctgaat

SEQ ID NO: 2262 - DNA, 1361 bp, Glycine max
  Intron number 1 from transcript Glyma10g34050.1 (locus Gly ma10g34050) derived from phytozome v7.0 (chr-ID Gm10; pos 42238073 to 42239433)
ctgtcactcaacttgggggtgccagtagtaagtcatttttgtgccctttcatctaatttcattcatgttttcttgctctgctgtagtactaattgtgatggacacggaccccattctgtgaaatttatatataaccattcgtttatgctttgttagcttaatatgatacgagattgtttctatgctgttgggattcgtgcagaggttttagttgttgttctctacaaaggccataaattatggaagcagggaaaggaggggcctttccgttcttgtctcaattctgaactatagtgaaatgtgttgggaaatgcagctttggctgaattagttgggggggggggtttctccaaataatttgtgtaagcatgcattgatttgtggcctgaaaggaaaatattctgtaattactactaatttgtgactgtgtatgatcagtgtgctttaaattgcggcgcaattaagcgctcaatattaatgaaagctgtctgtaactactcaacattaatccattacaaagcaagccctaattttttattcatttcttaacaagatgaaattcgtcgattattttttagtcattagagtattaaacttattatgaggctcttctgattgtgtcttcattttcatgattgcctgatgatttgcctcattctggtagtttgtcgtcatactaattctgtatatatttagttttgcagtatatgcatgttttcattcactgatgttatgatgcttttggtaatgtaattttcttctgagaagaaagttgactttattaaggatcggaaaacattagttagcatttacatagcataatgccttgacccaggatagagtgcaggagaaagccttcagtaattggcacctcaaccttagttctgttgttggagaagaaaaagttcttcatgtgtgtatgcctttagaattttctaaagatcatggggatttagtcgtgtcattattcttgattcattttcttgtgtttaagattggcttttgacttagattgtgatttaaaagctggtaattggtataaacttcaatgcatgtcgcagcagtttgaaggcattcaaaataacattggaaaagtagaaaagacaaaagttagaaattgaatgacatttaatattttctcactttatagtggggttatttgtgatttgtgaatattttctaggaaattcctataaaaatgagtaatattattatgttagcaatatctacctttgcctctacctctaatttttgggccatcctccatcttatcaactcttctgctgggagcttccgttggtcttcttctaacagttatatcattaaacttattatttgcagaagccactccaaaagcgata

SEQ ID NO: 2263 - DNA, 1446 bp, Glycine max
  Intron number 1 from transcript Glyma08g41560.2 (locus Gly ma08g41560) derived from phytozome v7.0 (chr-ID Gm08; pos 41523764 to 41525209 reverse strand)
ctttgttgcaacaagttggattgggactctgtaaggtctttttctcaattttcaattttacctctgaatagaaataatagatgatgaaattatatggccaatttgatttcttcttgttttctttcccatattttaacagaaggagaatgggttaagaatgtaaatgctgcctgagaaaattaggttagggacttcaatagatgagtgactctatggttgtctaaaatgaaaataaacttgtttttttctttttctttcatgaaatatatggtgagacagcacaaactttttatttatattctgagtattatttggtcaagctaactatgctaaactaacaatatttctaagggaatgaacttctaatttatgttcagattaatcatctaaaattctcatcttttaatctaaggtagatctgttttctcttatctaattatatttgtgaattgtgactgatatgttggtttaattttttaaactcgtgttgtgttaagctagtgttaaatggctagaaagtagaatcaatgctaatgccttctcttatcacttgataccaattccattaatgtctatcctggtctgatcatgtggcttccaagttattctttcaagtgtggtgatctcaaatctcaatgcttttctcagtctaggttgttcaagagaaattcaatgttctaccagcaccatgatttgtttgatagaaagcaagctcacattggttgagaaaagacatatcaggttttaattgcaggccagtcaataaagttttattacaaattaggcccaattctaagtatttcctctgttttaccagtctttgctttctggtccataagtggggttacacaactgaaaatgaagcacaacttggcctacaaagaagccaaaacatagcagatttaaaagttaatgtcatattaaattctctgttcatcgatatcagtttgtatttaaagttgacggtattttgtaaacaatccatctattttacagctgcgatgtttcaaacttactgcataaatatcaatcaaaggtagatgccagacagtcagtagtttgatgtcgaagaaatattaatctgaatttgaagtttaggagtataggtttctatccgcactagtatagtctatgtaatttgtagtttagattcactattctttttttagactttttttttatatctgatagtttattgagcttatgttatgttcaaatggaccatcagcttagaccaagtcaaaagcaatttccaaggatcacagaacacctcaaaatcatattagctttgaactttgagctatttgatttcatattagacagatttataaatttcaatgaataatagctagggcaagtgtcaaaaatgcattgtaacgtaaaagctttttcatttcttcaactgtagcattttggtagttgcaggtacagaactacgaaatcata

SEQ ID NO: 2264 - DNA, 4800 bp, Glycine max
  Intron number 1 from transcript Glyma06g02380.1 (locus Gly ma06g02380) derived from phytozome v7.0 (chr-ID Gm06; pos 1584326 to 1589125 reverse strand)
atcgtgattatcttctctctccaactggggctcaggttctctattcttacaactttctctagttttgtaagagttataaaattattcagagagtccttcgggtaataactgaaaataaatactagtatacagtatgtataaacaaaaaaaaaaagaaggttaatcgtatatactatgtagtatgcttctatgggttctatcgtttagttcaagtttcgtctgagatggtggccactggtcagttttcgtcctatatattatcttgatcttcgtatgttttaatatttatatgctttgtatattttatcagatttgctcatgatcctctctctaacaagttttgaacttagtcacagataataacaaaattttcatatagtattttaattaatgataatataatactcgatcaagtaaataatatgattatgtacatcgtaatttgtttgattctcctttaactttcttttatttggagctctttgctgtggcttatggtgtagtttttggtcaggagttagtcttgcaaaatgttagaattgcttattttttaaaaaacttgtctggtgggttcctgctgcggtagccggtggcgggtgagcatatattatatatgttcaatcgcgttttcttgtaactaccaaaagaaaatgtcatttttaattactcttatatcggtgaaaatttattcatataattaaggtagatgagctaaataatttagtccaattgattaaacatgattcgtgacatatttaaactttccagtgtctattttttatttctaatatcaaatttatttttaagacaaatattatattaagcctaggttgctcttagtgaagacccagaactatgtcagttgttttcctagagagattgtaataggtaataaaaagtttatcgatttatctatttatacgttttataaattagaacttaattaaaagcatttgcaaccccaaaattatgaagggtattggacctagctgtaggaaagcctatcttccaccttaaaaatcaagttctagggtttaaaaacgaaattaacatattaatcttatttaaaggatgtaacttctcaatatgaaatagctacctctggttatgatatatgtggtcagctgcaaacccgcatgcagaatatgcttcttttttttttctctaagtatgaatcggatgggtaaaattcacttcgtttgacctttattagtatttgagaaccaataacggcaagtaagaaccagacacatccgatggagtattttacccgcccaaataaacggggtagctagcaagcgaggtagggtatacataagttgtgagagaaacaggtttgtattgtaatggctgtctaatggggcttgtcctctataagcttttgatatagtaggctattcctttactctttaattttatgaaaccatccccaagaaactaagcttacgattctgatgagttgtaccatctttaacactattactctacgaaagagagagatggttaaattggaaaaagaagctgtttatacaaaccatcaaagaaatcttctttaggttaaagataaagatactgtcaatggagtgttgtaactgtaaattgtaattgtagtactcataaaaagtgggtctcacactataataatctactgtaacttattaaatactacatattaaccagtccttctaatagtcaattggttaagtcactgttctttgtatttaaggttaactgtctttaaagttgctcaactaataaatcgtgaaccacatcatatatatatcgaaaataattacatttttttaagagtaataatatttgaacatctttttattttgaatatctctttaatatcttttatttttatttatctctcttttcctatcatttatatcacctattacacctattatctatttttactttctctctttagatgttgactagcataaggtgagttcatatatacttttcctttttttttaacgaaggaagatgatttatttcccagcattctgttaaatgtattgagacacctaccaaacctgttgttaaaagcaaaaaatgaaattaaagatgaatggtgatgatattcttgttagctacggagttgtttgattagttagatcatagatgcaaaacattcaggagctacacatgtccaatattttgtagtcactttcagtgtgtcatggaggaccaagcattgcaaccaaaggacaagtatcacctaaacggttcctgtagcctagtcctagctattacgctttgcgttatacacgtggcccattatcccctacaaaaaaacagtgggccatttcggtggccagtccttttcataatttcggatagcactggattctcttctgttcttatgtacccttcttagttgcttttatacctttgtcggtgttattcaatttgttcaatcttttttaagtatgtctgaattctgattaagagagagcaacgcatttatttgtttattagttggtactagtaaataaattaaatttgagtttcactgaatacagtagtaatttgatgttgctttaaaccgaaccgaattatggacaccgacagtaacttgaagatcatgaggttacaatttacaaataaaaggtactagttgacaaaatgagtaagggagttgtttttacaaataatttttctcatagggtccattttaaaagtatttttgggagggtcttttttttggggtattttgctagtagggtcggcgggttcctttatttttagggtattccgtcaataggattggcgagttcctttatacagtaaagcagccattggagatggcgtaaagtggcaaatttggaggccacgtggcttattccatcattcgtaatggcaaaatgtgtttttgtacaatttttttttgaacttgaaacgggtataacttttgataggaatgtccatttgaaacccataatatgtcaaaatgctcgaaattgaatgagaaatcccccttgggaatacgccacgtggcctccaaatttgccgctttatgccatctccaatgacggaacctttgactgctttactacataaaagaaccagttagttctattggtggaataccctaaaaataaaagaacctgcgagccctattgacggaatacccaaaaaaaagacccttcccaaaaatactttcaaaacggacactctaaaaaaaattgtttataaaaataatctccttacatcattttgccactagtagtatttagtggaattcacttcacctaaattctatcaataataaaagttaagtgaaagaatattgtgtcaggactaagagaaaatgtgttgtttttcttttatcagccaaggagaaatgtgttatgtgctgttaacttgttatcttgcccttttgattaatctagaatcttgaactttgttcatgtatctttgacacctcagacacatggtcatcgctggaaggcagccgtacggtgtctggcacggttttggtctctggtatgccagtgacacttacgaaaacgtatccacgtgatgtcctttttttcttttttaagaattttcgtgggaggcttattttggatatggcctgggcctggttcagtgttaaactgatgaagtcccttaaaagtatatttagtttagtttaatgatgatattaatgtggaaaataattttatatcttcatttaataataaatgatcaaattatcggtgatatatgatttttaaaataattaatataaaaattaataattttattatgcatgatgagttgtggttggatgatgatataaattttttatagagttacagtataattctttttctctatttatttttagttagaagaggttagcttttgatttatttacttaaaaagtatttttatgctttatatactaatctatttaaatttttttattatggtatcttaaaattatatacttacttatccattgagacacacacacacacacacacatatatatatatatatatatatatatatatatatatatattatgtcatcatatttttaaaaattattattaaaataatcttctaaggtaggttaatttttttaacaaaattaggcaaagtctaaataggtcaaagttgtgaactttaacatgtggtgtggcccatttttaccctagttgctgctgtccacaggagctggttttgctgtttggaatttggatgcatcaaattaagaaaaatttaacgaatatatgatacatttaataacactatttattataaattcatgccgttatgttgtggcttatcataaaaaaaaccactacttttatggcgcatttagtaagaaaatttaacgaatatacgatgcatttaataacactatttatagtaaaattcataccattatgttgtggcctatcataaaaatcattctctaataccgggtctaatttagatatgaatttgatttttttatgaaattgattgatttgatatctttaggatcgaaattaattgatgatgctatttttaagaattaaattaattgataattatcgaaataaaaaactatttttttataatattaatagacaaataagttacctataaaaaatagatgcaaacaaatgcggtaagaactgaaacatgtacacttttgaattcacgttacattagcactttttttttttttttgctgacttgttgaaaaaccacttaattacattgatataatgatagttgctatttggttaagtttaagttgtaaattgtggatgcaggtgaaagtttctgatcttgaagggagagtagtggg

SEQ ID NO: 2265 - DNA, 496 bp, Glycine max
  Intron number 3 from transcript Glyma02g42300.1 (locus Gly ma02g42300) derived from phytozome v7.0 (chr-ID Gm02; pos 47369782 to 47370277)
tgcaggtgatgtttggcttagttagcttccattttaaatttgatcatatatatatatatatatgttgccaaagtttgttcaatatatatttttctgtcattgtttgatatcctgtattcttatagaacattgctaaacaggttgttactcatggacataatgcactcaagaagttatcttatgaaattgatttcattatcttatttactcataatgcgtacaagagcatttctttttagttacaatcaagtgtccttgataagttcatgtctttgcaatttgtcaaaactatatccttaaaaccagacttagttttggtagtcttattacatcaattgttgtttgccgctataatcataactattccttcatgtactcaattttagtttgagtatacaaaattgaaaaatgacgaaattgtgtcatttggagttgggaccattatgtgatagttttcttatctcttattctttgggctttatgattaaagcagaat

SEQ ID NO: 2266 - DNA, 5944 bp, Glycine max
  Intron number 1 from transcript Glyma09g28210.1 (locus Gly ma09g28210) derived from phytozome v7.0 (chr-ID Gm09; pos 35217736 to 35223679 reverse strand)
ctgcggcctcggtttcggccttggccttctcggaggttaattcttcaaccctatgctctgtacccttcacttgcttcaatttcgcatagttgttaactttttatgtgatggtcctatttcgattggaaaaaacaatttgggagataactctttttagatgaatcattatgtgtcatagacctgtagtttcttctagtatgtgaaagtttgtgtgcaaaaagttagctttatcactcccttcttcagagaggggggactcagaagaaaaggactgtttggactttggattgagaaatcgttttctatttccaattttagttgcaattttttgaaaacgaaaaataatgtaaaaacaaagtctcgagattgaggcctgagtatgttgctgtgttgaatacttgcggggggggggactttgtcgcccttaatgatcttagttggcttgagtagaattattttccttccaaggaggatatatgtggttagtactaaaaaaaataaggtgacaattttgtaaataaagatgaaaacagaaatactaatggggaggttgagttacttacaatgtggaaaactcaggtttaaaactttgcgaagtatccacatttagtatccaacaatgccttgaataggattgcctccaaaggagaatacctgtgaggaaaaaaaatgtaaagagaaaacattttcgacctttatagacctttatctgtcattggaattcaagtttgcagttaaaagattgaaatctcaaaaacctgtagtgtttatttttatatctggctgttgacaaattaatgatgatgatgaaggactctctggagagagaagtctaagtgatgaattgggagacaagggaagtgctaacaaggaattgacgttttgattttggagatcctggcattaagttcttgaatggggatgaccacttttggaaatcattggtgggactgggacttataaattattcttacctataaatgaatgaaaagggggttctcccccaattgctcagttggacattatgattgttttactgtatgttgggcttttcctcccctcctggaccaaaagtggactgaatgtcaacctttaatgcattacaagtcattgataaactacagtttataacattaaaaaatcctcttttgatagtcatatctgttaaatagttaaatttccctaagagtgtgtttggatgagacaatttaaaattctaaagaatttcaaatgcttcaatttaaattctttcattttcaaaattgtgtttggataaagaaattaaatttcttcattttcaaaatttcgtattttgataaaatagtcaaatgcattcttttttaaaatttatctttgaataaaacaattttttgaataaaataattgttttttcattaataaagtctatgtactatttttcgagtgtggtattccaataaatatgtactattttaatcactttcaattaaaaatatattaattcaactatttaaatcattattccatttacagcccactacaaagctctataagcttacagggcagaactatttagttgataaaatgacatatattaaatgtgatcttagaaccaccacagcataaaaaatatacaaatcaaaattcacaaggtttttttgacaataaaatctgaggtatgcatgtacagtttcaccttggaatgctatttaaaagcctacaaataaaacttgttttctgcaaaagtcattggccaggaatgcaattacacagaaaaacttggactgaagcaaaatctagtcacaaaataaatccaacttccaaaatttctgattgcctttgctttagcataggaatgccttcacatcttttctgcagaagaaaacagaatgttaagtgctacactgttttatcagttgaaatgtaattgtaattcaagctacaggctccaataaaaactagactgtttatagtttattcacttttactgcatgtacttgcaattcaaagagaaatatattgatcgaaactggatcagacagagaaaaaaaaaacataacttctttatttattgtgtttaactctacaaaaattccctcaataatccgaattcaatgtcacccataatgactgactcttcttaactcctcttcttatttatagacagttaccgatctactaacataaacccacccataatgtgcctaataagttgcaggctatttccccttctttttaacataactgtatttctttgactaacataactaattactagcatgacttactgacctatcatatatccaataaaaacaccaaggttttcaaaatgttcacatgaacctaattgcaggatgaaggcaagaatccgttctggaacagcaatgggatgtgcatgagtgagcactatagaaaatatcattgaattgtgcacaataagccaaaatttccctgcagtttcatgctttggtctatttacatttatgaactacataacacaggcagagcaacagtgagtctcacattctcatgaataaaatgacattagcattgtcagattacagagtcaatccaaagaaactgatccttgcctaaaattaagattgtataactacttacacaagtcaaccatagccacaagcatttcctgaataatgacacatctataggaagtataaattcaaattattctttggatgatttccattttatctttgactgaacctaacatcaattgcttagtcaaatgagtgtatctatctcttgtttcatcacacaactaatccaaaggatgcacctttattactatgtctattccaacacactgaaccatagagcatggcaagacataataaagacaatggaaagttaccttcattcctgtgctgaatgttctcatgatcatctaaagtcaatattttcttcttcaaaatttctatagaatctaacctcatcataattatccttaacttaagcaaaatattatagaatcaccgaccctggatatcaatatgctacttgtttaggtttctcctcttcaagtatgtgaaatggagtaaaggaactccatagcaggaggcattaatttcagaaacagttgaagaataaggatgggaaggattttaatataattttgtcataaaggctttgatatgttaaaaactagcccaaaccaaatgtttaaactttctatattggaatagtgggggcttaatattggttttatatctagctatctacattggaatagtggttgttacttgtcagtatatccaaaatcaaaattctccttggtagaatcaagattcaagaaatccagagtttagtactcacaaagcacaatataacatttacattcactagagaggaatataaagttataaaaaaagactggtatacagagatgacttgcagggtgcagaaaagaatttcactgcacagaaaacttcacattctccgagtccttacctactcaaactctgtaataatgctgtctaactccatctatttacaacccctctttctcaatttctttcccatgatttcaaaattataataaccatttttcatgcactgaagttgtttctacgcttatacaagctaaagcttgcactggaaactgtcaaaagacagcatgaaaacctattagccaccagaactacattgatatcataaactcaatagtaccaagtctatcaagtcttcttatcttcacattgatgaacaattttttcataaaactcattcaatatcatcattaagcataatctgtcaattatttttctcttcctctttcatgcatattcacaaacacatggtgctcaccaccaagctcaaccccaaacagaaataaaaatttcacacagaaatagaacccaagccctctcccacatctccaatagtggaagaaaatttatttaaaattcagatccagataacacgacaatgagaacaaagcataaatcacaagttaacgaaataaaaaagaaaccctagataatggagatgagaaaccaaccttgtatgaagagtgtgcaatctgaatcaagagagaatgaaggtcgtagcccccatgagagtgtgtgatctgaacgaggttatagccaccgagagtgtgcgatttgagcgaaggttgtcttgattgtgagagagtgagaacgagggtctctaagtcgtaagggagagtgtgtgggtggagaggaatgagctacagcgagtgaggtgtaggtcgagagtgacaagcgagactgagcgtagagaggagagagggaggaccgagttgcagaaattgaaattctctcatttttgcgataatttcaatttatttgttttctattgattaaaattccttgttaaaataacataaatttaatttctctttgaattatttatccaaacatgtaatttcaacttgaagtatttcaattacatggttaaaatgaattactctgttaaaagtcaccatcctgagagtgtgtttggatgagacaatttaaaattctaaagaatttaaaattctgagaatttcaaatgcttcaatttaaattccttcattttttaaattctgtgcttggataaaaaattaaatttcttctgcaaaacgacgttgagaaaacgacgaggaggccctcctccggatccccggcgcgatcctcaacctcatcgacaaggactacagcgttgagctggcgtgcggcgacttctccgtgatctgcctccggcagggcgacaatgttgtcgccatgtacgcgcacgtcgtcgacgagatccaatggccgctcgcgaaggacgccatcaccgtgaaagtcgacgattcgcactacttcttctccttccgcatttccaagggttccgatcccgaccaagagagaagatatgcttagctacggcttaacgatcgcgtcgaaggggcaggaggaattactgaaggaactagacgcggttttggagaactgcaattgtttctccgtgcagagtgtttcggaaaatgtgaagaagaaaggggaggtgctggatggttccgtggcaagggaggtttcgccgaaggatttggagtcggggaagaagaaggagatgatggaggggcggtgcgtggcgtattggacgacggtgagccggtaagaactctcggctcagggatttggaagttcaagagagaagagagaaaccatagagagagaaaagttcatgagtgaggagtgcctctgtccagaaattttcaaattcactctcttgaaaattgaatttgaaattctattatttcaactaactaaaatcccttttaaaattttaaaattttgaatttcttttattaaaatatccaaacagttacttttaataaaaaagaatttaattccctataaaaaaatacattacctagttaaattaccttatccaaacacactctgagagagttgtgcaggattttggtaaattttggtgctcgatagttggtttgatctttatggtataaaccatacatttacagccatgacaaggaatctctaaattattttgtttaagaaaagactttgttgaagtccttactctgctttatgccttctgacaaatctttgttaacttttgacaaatggttgtttattcctttgtggaattggtgaaaaactgaaaatattcctaaaatctaaaatggtataatagtgagatgtagtgtgctacttttgatcttcttgtcttgaccttgttgtagatttctcttctgtttctcttctgcatggttgtaagcttctggatgccttttccaatgctgctaacaataattgggatcgtcccttgctcaatagtagcagggagatgtagtttatcctgcttaatgatctggttcatgttttaatcttcaagtgtgaacatacttcctgcatcgttttatgcttcatagaatctcacgcaaaatatttgtttgactccaggagtgggtgttggccctggaattcctggattccaa

SEQ ID NO: 2267 - DNA, 4792 bp, Glycine max
  Intron number 1 from transcript Glyma07g11090.1 (locus Gly ma07g11090) derived from phytozome v7.0 (chr-ID Gm07; pos 9310910 to 9315701 reverse strand)
agggaaaggtgactgatttcactcaatttacttcatgctttagctttcctagttttctaacgttttctagtgatttgtgttagttttggctcagagaaattgaacacatttttttattttctaaaagtatttattccaactgaaactatcactactacaaataacatcttttaagtcggttctataggattttttaagacggttttgaaccgtcttagaacgcagtgtcgtaatatggtactgtacttacaacgatggttgttgaaccgttgtagatagtagaattttttaagacggttattcaataaccgtcttagaatgtttcattttcaaagacagttttaatgacaaaccgtccttgtaactattactttttacaacggttatattaacaaccgtcttagaatccaatagatattaaggcggttttcagcccacccgtctcaaaatgttgtccataacatgcaaaatttaagacggttatttaataaccgtcttaaaaagttcaacattctaaatcggttaaaaatgaaccgtcgtagcatgtttcaaaaaaaaattatttatttattaaccaaatgaacaatctaacctcatgaattgaaggataccacttagattactgcatgttattgcataaaataatcaccttaatccaaatggaaagaatcacatatttatcatcagacttaaaacattcaacgaaccatataaaaaatagaaattagttatataaattacaaatagcagcttaaattttaagcttgtgtcatgtcctgaacaatttcatttcatttgtcaacaaatgaagaatcaaacaagagctaataagtatctagaaaccttcaatagagtaacaagccaaattcaaagaataaatgacaagcccaaatcatcaagtagtatttaaggctaaatccacaatttagattaagttggtaataagtgtatatttacagaactaatgcaacttaccctagaaaataggtgaagcctttctaccgcaacaaacaggttggacagcagacaacaaagcagtggtagatgacttccctaagagaagaagtcacaaacagtttagtacgtcactattgcatacaaaattcatatgaagttcaacatctggaagtaaaaattataaggcataaaaagcaatctaaagcctacaacaaatcttagaaggcatgatttatagcaaatctcatgtttaattgtttagaataatttgatgttctcccaatgaactgttgttcaaatcatgcaaaccataaatcaaactaccatacagtatgtgcagttcaactctttgaatgccaaatcaaaccacaaatcaaaccacgaataaaacaattattattactttgtaaataaatctaaatcaattaaactcattactttttaaatcaatatataatctaatttaatgtttattaaagaggaaatttgagagtgtcaaaattgaatgttgatagaaatgagagatgagagataaattattattttaaaattgaaacataaattactataatatcttaaaattaaacttattaatccaaatgaatttattaattttttggcgaaatatttatgatgttgattgctaatgcacttataaatgtgtgtgcctatgaacattctcatatatatatatatatatatatatatatatatatatatatatatatatatatatataactttgatctatgtgaataatgtatcaaataattatttattaatataaaatttaataaaaatgatctacataaaatgaactttaagataaaaattatttaattaaaatttattaaataatgcaataattggtataaattacatatgacaaatttcatctcacctaataactatatattatcttaaaatacaaagagaaaaaataaatcaaattacaattgttgcatctgttctcatttataggaaaaaataactaatttcttacttaataaaaaagttagttatttttattaaattatgtaaattttaattaaaaagtaaatatttttgttaaatagtatacaagtaaaaaaggggtgcaaatagcaactcccgttttgtagtcacattgttctagtggacctttaaagttctatctacctttattgaatcttttttttggtcctgttggttaaccggtaagatttatttctacttatttttttcaatccacacactcttttattttattttttcaattcacacactcctattcttatgtttaggagaaaattatgtaagcaaaatgcactggaagagactaatatttcaaacataccattttgtatattcttttaacaatggcaaaataagcttcatttatttataaattaattagtaatgtgaaaatatttccaattaaccataagaatataaccgcaattcatattttgcatgccagacacaataattttagatcccctacatccactacctagagaaattaaaaggctcattaacaagttagtgtatttaagatttatttgatcttttagcaaatttaacgttttattaaataaaatgagaaagtcaaaaagtcaaaaactaaaataaaagtcaatggcataacaactgtatcaaaaaacacagataataaatgaagtaagacatacctttcctatccttcaaaagagaattgtatggagcaatttgaacatatctccattcttccttctagataacttaaatgccactaaagcaaaagatgcaagagtcataaagttttagctgttctgaagaagaagaaacatgcatccacacttcacaaataaagcatacgattacctcaccttgaaaattgaagtggtcaaccttttatatatatatatatatatatatatatatataaacactaccacaatcaccttaatggtagggccctagtcataataatatattatattaaaataattattcatctctttcattatttaaagagtacaagtctttttttttttattaaaatgtcagaattttgatgtgcaaatataaaaatcttaagtatatccaacactttctttttgctgttttattattttctttcttctattctaatcttattcttttgtcataatttcctatttttattaggtttctaattactacaattttggtttttttcttatggttgtttgtttcgaaataggatttctcctaagcttaaagatctcttacactagactataaaagtgtattatgttcttattgttattttcgataagacgtgatttatataaaattctctaattactattttaagaataattaaaaaaaagatgtttaagtatttttcttaaatctaaaaaataattctctgaatatatatatatatatatatatatatatatatatatatatatatatatatatataaacacattatatcataaaaacatgcagtctcaaagcttatacaagtggatgcaaactttctaacttgtttttctttttttaaaaatcaaacaggtcccttaagaacaaagtttaaccaagttttcaagttatacttgtgttgtatctattaagcacataaaatgaatgaccaagaaagtcaaattacttgtttttgcatctgaaaccatcgcggtccataataatcatattgttgtccatagcccgtatgtgctcaaggcaattacaaaacacaacattgataattcagccaacatttctgtacaaaagcaattcgaattggtacaaaagcaaggcaatatctaaacctgcctctctgggcacaatattaacaaaatcaattcaccactataatattcatcaacatcaacatgaaggtaacaaaataaaaaagaataagcacatgcacaattataatgacttgaaatttacccgcggagcttgtaaaacccgaccctcaacttcagtaaagttggggcttatagagatcccacaattatgtagcattggttcagaaccataattgctacttttaagtgcctgcaataatagaaataatataaggtaaacccagcaaaatatacaagaatccaattatgcaaaaatggacaaaaagacacttacatcagattttttaatgtcctcttggcctattcaagaaaataaataaaagatgaaattattgtatataacagttaatcaagcactatgatcaattggtcattgaattagcttacctttgcccagtcaagtgaaaaagggtctctcacattttgattggatattaagaagtccacaacaggcccaggggtaattatcatcgtggttgagacatctaaacaaattgtaagaaagaattaagaaatattatgagtaaccaatatagtgtccaaggcaaacaacagatcgaacctatgttcaaagacaatccactttgtgtagttctaaagctagaatggaaacccctgcatccaattacacctcctcctacattagccaaattcttggggtcattgtgaaagaagattgcctcacaagcaaacaacttctgtaaaatgacattattttatattccaacataacaggcacacaaaggaaagttgacacaaaggaaagcaaacagcttatgtttgttgttgttccttcaatctcactcgcgctgggtctcttgcatccctgtacatcaataattattcaaacttacttagatcaggacaccaaaaacaaacactgacagtgactgaaagtagatctgagaaattgaggggaagctgaacctttcgataagtggtgccatcctcttccacgatccaaccaacttcggcgcatagagctttcacgacctcgttgttgtcacagtgcttca

SEQ ID NO: 2268 - DNA, 1005 bp, Glycine max
  Intron number 4 from transcript Glyma05g26490.1 (locus Gly ma05g26490) derived from phytozome v7.0 (chr-ID Gm05; pos 32441854 to 32442858 reverse strand)
aaatcttgaggaatctcatcccaagccccacaaaggtatacaccatctattctatgatttttctaactaacaaataacatgctacatcttttttttctggttcattatgtttttaatccctaatagaacactttccctttttagtttctaacaaattgtcttcttttgatctcttattcatgaaaacattgttatcaaactctcgagtttacaagttcatttaccctctttgagttgattcgtgagtaaactctttttttagtagatttttgatagattttataaattttaagtaaactcggtagactctcgagtttaccaccgagtcaacaagtcagcaagttaaaaaaattaaaccaaaatataagtcattttgggttattttctatttgtttagtgttcaacatactttcatttagtgtgttattctcaaataaaaaaattctcagctttaataacatcaaactcttgttctctactaatatcaaaccctcgattagaattatctatcactactataacatctacaagttactatctagtaatgatgcgttactagactgtttatttaagtattgtgaaatttatgatttactattttgttttattatattgttgaaatgtttaattggtatgttatttatagatagtttgttattaattttatacgaagtggactcttacgagtcaagtccacgagtcgagtttatgaaactctcacgagtctacgtaaactctcgaatttgataactttcatgaaaatatgtcagatagagtccttgtccttcacaaaaatttattttttggggtttcttgtttatgaaaatatgataacttctataaatggaagaccaaaagatttatttttgaagaattaaaagtgaacaatgttctatctacatggactaaaaatatattttaactttttttttctatggatcaactgatgaagcttattggttgggtttggtttaacacagattgatagagcatctgtggtggggg

SEQ ID NO: 2269 - DNA, 578 bp, Glycine max
  Intron number 2 from transcript Glyma05g24130.1 (locus Gly ma05g24130) derived from phytozome v7.0 (chr-ID Gm05; pos 30159024 to 30159601 reverse strand)
cggcgatattcaaagaatttttctcgctcctcaaggtctctctctcaaattttcggattactcttttgtttagatgcaaatttgattgtggtgtgttaaaaatcagatacctttgattatatgtctcgctgatttattccatagacaaacgtttttgtttttaattaaattttaaagtttactactatgaaattggtatttgacatttttaaattggtagaatagcatagcaaccccacatgtctaacgctgtagtgtcaaaatcactctagatatatgacttttaaaataattttaggcagtgtaaaaaaagcctttaaatgatcatggtgattgtatgaatgtaaaattgaaaagaaaaaaaaaaaaaagttcaacgacctacttaaaaatttgttaaatgttcaaggacccagtgacccacaaagtaattaaacctaattattataaaagttaacaattttatcatacatgaccaagtgcctttacattgttatagcattctatggttgagattttttttattatttgaattttttgcagattcttctgtccaagtgcctgctaagaggtcacgt

SEQ ID NO: 2270 - DNA, 1199 bp, Glycine max
  Intron number 4 from transcript Glyma18g49130.1 (locus Gly ma18g49130) derived from phytozome v7.0 (chr-ID Gm18; pos 58513708 to 58514906)
atactaccagaatttccctttctccagctattcaggtatcttcatatcctttgacaaatactactaaataatgtccattgattaccctttgtccaacttttctggtatcttaatatttttaaacaaatgataattaatatacttaatcacactcatcttttctgacaacaccccataaaaatgggataattatagggtggtctagtgagttttggaactcctatgatccactaattttgcttgtttgggtaaccgtttacgagagttgatcttgctttgaaagtgaggtggaagaaggaaatttttttgttactttttgatgagttaaaagtaattatgatattttgaaacgatgatccataaacttaattggtgagtgaataattttaatatttatttattaagaaaaagacttaaatatatttttacttttgataagttagtgtttttttttgtccggtaaatttatttatttattttaaattttagttgctataaatggacattttttcaattttgatttttataagtttttttcgtcaaaatattcttataagtttgtgttttaatttttttaattttagtctcttttagatttcaattttttatttatattcttcatatgttggtgcttatgagaatcaaaaattaaaaagaatataaacttaaaaggaactaaaaatgaattaaatttttacaaggactaaaattaattaaaacaatatatcttccaaggactataattataaaaaaaaatacaaatttacaaagtctaaaaatgaataaattttttagaaggactaaaattaaaaaaaatacaaattttcataaaccgaaaacatatttttaagactaggagaaaatagtctatatattgacggttgctggaaaattatcttaattgcaaaattcatggtctgccttaatcatttggctgttagcctgtgttgatgtataattttaaaaacattaaataattcatttaccaataaaaatcagtgtatcattagtagtccaaaacttgtagattatcactctataataatccaatttttcaatcgtatgcacaaggtagctagtttccaaagccatatattatatatcgccctttattggcataaatgtattattcagtattttggcggctcatttctctttacctacatacaatgatttgaatcttttggaaatttcagtag

SEQ ID NO: 2271 - DNA, 2148 bp, Glycine max
  Intron number 2 from transcript Glyma07g02150.1 (locus Gly ma07g02150) derived from phytozome v7.0 (chr-ID Gm07; pos 1496648 to 1498795)
tctctgttgggtttggttcctccatctctttcctggtactttcttttcagattcctttctgccttttctcttctgaattctgttaaacatcataagatcactgttatgttcaatggttcagattgacttagtttgttagacacacatcactggtataaataggaatatctttgtaataattcatcatcttttatcatattaatacaatgagatatttccatggtagttgtctcttatacttgaactctatgagctttggcttcattaagttggaataacttgcgtctcatctcaaatttctgataaattcacaattctagtgttcagtttaaggagcttcacttgtccttttcccatccaattattctcaaagtagtaataaggaaaaatcaattggttttttagtagtgcggaacaaaatgcaccgaaaacttttttacttctcatgacacaaaagtggctttatgcaccctacggtttcacaaaaaacagctgagacaattggagaatttatgtagttttttcttcattgttgctatctctaagtaagctttgctttgcagggaagcggttactttttttgtggctttatgcactctacagtttaaaagaaaaaaaaaaacagatgtgataattgaaaaatgtttgtagttttcatctatgttgctatctttaagttagctttgctctgggggaagtggttacttttttttgtagctttatgctctccacgttttttttaagaaaaaaaaaccgagataattggaaaatgtttgtagttttcttccatgttgctatttctaagtaagctttctatgcacggaagtgtaacttattgatagaaataactaattgttttttctattctttctgttggcggagggaggattttctgagataattagccaatatagagttgatcacctttttgttaaaagttaagtaccacaagagcagaattcatctaatgaagctatggatatgtataggattttaaattacgattgtgatcataattactgttttgcacgatctttaatattgtggaaaactgtggatatccaaaaactgacacaacagccaaaattgcgtttgtgtaccaatgtaccattaaaggaaactcttcctaaaggaaaatattatttgttacgaaaacagatttcgttataagtgcacgacaattgatctttgtgaattctcctatagtcctataacatgtttttcaaatattttaatcaatattaaaaaattaccaccgtccattttactttcgtgaaattcgtgtggttttcatttcataataaatagaactactctttcttaaaaccataaacacatttgattgcatcgagttgattggatatcaaaacctgtgattctgttgtctttagtcttcacgaaagtaaaccataatcctttggagataagatgtaatgggaatgatccatctaaggtccatctcttctgaatactatataaatctataaggaagtaaatacttttacagcaagaaaagttaagaaatatctagttctttttttttttttgaagaaagaaatatttagttctgttgcacattagttatgaacaaacctcatggcaattactagtcctctgaaaattcattggttattggcatgatctgtgtagttgtcccttgctcttagttccagtctaaaagttgtaagttgtacatgatctgagatttgtttatacttttactgatgaaacaagaacgaatagtgcaactttattagcgactagaaattactttctttatataatattgaagtgtctaatcgatgattattccactggacctcctttatatatttgtataaacagaaatgtgaagccaaaagccatttcacatatgataaaatataaattcacaactatatgatcttttcaacgtataagtgacatatatggagataaataagctatcctgaatcctgatgcacgaaatacaagacaatattaacatttttatatttttaatgcactaacagtctaacactaaatacaaacctgtttcacattcttctctgttatctgtaaaacttggtcagacttcacggttacaagacattcaaaatagttaaaatgagttaattttattataactttttattttgctaacaggga

SEQ ID NO: 2272 - DNA, 3573 bp, Glycine max
  Intron number 5 from transcript Glyma11g09570.1 (locus Gly ma11g09570) derived from phytozome v7.0 (chr-ID Gm11; pos 6840562 to 6844134)
ctatccttgcccacacagaacctactgaggttagttgctcatttaattgaacaattgtttttcaaatttacaacttagtctttgactttgtatgtgacaccctctaccttatacatatatgtactaataaaaggaaaaaaaatcataattaattaaaagtttttaaaacacatttaaaaaaaatcctttcaacagagtaaaaggttcacattcactttcttttacatcatattcaaatttgtccaaataaataataaagtcatctcggctcgaataaggctgtctaagacttcatacaattaatatagaaacctatattccaatgtcacatcctatcagagcatcgtgtcccgacgtccttcagcacaaggttccttaaagtaatttacctaatcatctgttcttccgaacacaatttaagatcatcacaggatccaaacccaaagaacacacagggagtgagttatcacattcctaactaattgagagaaataagataacatgtaagtataaatatcatataaacaaaataaaacttatttaaacataattcacgtcatttcaccattttgtcactcaacatcacaacacaacacatctcattcatttttacaacatttacgtactcaaggattaaaacacaatatcacctagtcaatcaatatcgataaatacacaagcgttatgcaacatatacactaagactcaatattatatgcaatgtggtaccatgtcagtgaaaaacatcgttaggcgcctaggagtacatgacaagacaaaccaaacactagtaagttaggttactttcactaggtaaaattatagggagaccagtcaggatcatattgttttgtgagaatgctctaaccatgtgggatcgacacaggcttataggagcactcaaatcgagtgtatttaccctcaaggcctacactccgaagagtccgtcagagcttcttcctcctgattcgggtccaatccagaaaacattttagcacacagattctatttataaactatctatgaactgtacaaaacacacaactcctcaattgtttttaaaatagttttatctcgattaaactcgtcgggtccctatagtggttctcatcacaatactcgtcgtccttaaagggtcttagcattaactcgtcgcccttaaaaggtcttatagtcgtgcgattgtacaattcatagttcataactcaatatatacaacatctcaatcacatacatactcaatgtatcacatacactcaatctcaatcacaatgatataatctcaatttaacacgttatcacacctcatgaatcatatacactttacctatgaactatgcaatacacgcaactactcaattgtttttaaaatcattttaactcgtcgggttttcacagtgggtcccatcacaatactcgtcgcccttaaaggatcttacaattgtatgattgcacaattcatagctcacaactaattatacatgtattttacatcaaaaacataaaaacatcaagaacactcaaatttatcaatcaattctcataagaacatcaattagtacgtaaaacataacaatattgtatttataatcttaaaggaaaaattataattcaataaacatcccaaaataaacctcaatttaattctttaaggatccatacacatgttcattcaaactccaattgcgataaaatcatcccttacctctaagcgggctcacgtgtgtattgcgacagtgatagcggcatctctaatgattttctgagatttctcaagttttttctctaattgctctaatagggtttccaaacgttaaaaagaaggaaaagagattgaagccttcattccactgtgcgatgagtatttctccctccacagacattattttgcaaatcccaacagtgaagatgtgtggaaatgaatcgcgaaccacatatcaaaattttacgacaatccaacggttaacaaatccgggatcgtagttttaccgagacagttttgggtttctgcgagaaaagaaaaggctacgatgcaaagtgtatttctctcagctccaacatgatttcgaaatttccaatagtgagaatgttcgaaaatgaattccaaacctggtgctcaaatttcacaacgatccaacggtgaatgagtccaagatcatcgtttttctgagacaagtttgatggtatgcggaaaaaagagagaattttgggatgaggagaggagaaaacaaaattgagaaaaagaggaggtattgtctgtgtgaaaactgacctaatgctatttataggtagggtactcacaacctaatatttattatatttatttatttttattattttatagaaagaaactattttatttcctatcaaatgaataaccctttttattttctctcaaatcattattttaataaagttatttctccttattcatttaattacaaaaacctcatcatttttttaaaactctatttatttataaataacaatttttttttttaaattagtttacgaaaaatgggatgttacattttgggttggtacacttgtgtgtcggtagagtttagtttcattttttgttgacaagttaactaatttgaaaatggatgttctaggtattctcttatttctaaactcttctattaaataattaatacattgttctccaagtccattacaatatttgaagctacggaattgcaatatacttatcgtaacttgcttataaaatgaatataactcgtgtcactgtgagatggcttacttgtgatcacaaactggtgttcacaaatgttgagaattacatttgcaaaaatgtcatttctgcctatcttactttaatctcaatcccagtctctaattagttcaagatctctgggacataatttcacgtgcagccaattgttgaatatgtgataatttaagcaagcaattaagaatttaaatttggtaatttggtatcctgctgtttctaattatatattttcatactattcaagggataatgcttcctatacatcacactacactatccatagtccattcatttctattacttcattgatagattcctgccctatcatttacaagttatgcccatctctgatgagagtggatttctgtgagcttgttttacttttgcttgccatagctgaaaatgaaaatgttgtagagagagattttacctggaaagcttttttgagtgaaataatcaaaacggaatatgcattaatttggatgaaaaggttagttaagaacttggaaaggaaacactatcccttacagatgatggggagaaaatgtgaattcaggaagattttgaaaattcaaccttagctaggcaattttagattgccttcaggttttctaaaatccatagacaattttagcatacctcccgccaatgttctttattgtgctcattttgttgctgggaactgcatttttatatttatgtcgtgcaaattgtagtcttgatgcaatgaagatgtgtattactatgcttatgctaaaaagatgatataatattgacatgttttatggtattgttcggcaaatgatgcagcccctaaa

SEQ ID NO: 2273 - DNA, 1188 bp, Glycine max
  Intron number 5 from transcript Glyma12g10040.1 (locus Gly ma12g10040) derived from phytozome v7.0 (chr-ID Gm12; pos 7865233 to 7866420)
atacacttcttagttcgattaaagcaagaggtacttaactgttttttctttttgctacagaagggtaatataaggttgcttaatttacagtaaaatactctgttgcgtttactcttgaaattgaagtgctgggtacctgaggatagtcatgttaaaaagctatgctcgatctttaaattatcagtcagctttgttccattaagctattagaaaatcataatattagtgtgcttcgtgtatattgtgtggtttcttctttatggaagttttatttttgggtaataaacagggctaaagccctaggaagaaactacaaaggatttatggaagtattttggatagggattttcatcagattagattgatatgatgaaccaaacaattcaaatcaaaccaattaaattgattcagattggcttaattaattagttattttctctttgaattcaaagtaaaccaaccaattttaattaggtgggttctcggatttatcatttttaaacccgataacttggatcgactattctttaacattttagattttagtgcttattaaaagagtaaaagggtagttgtatattcattttagtatttaggtgagatatcaatatttagggatattattgggggggggggggggaattgatgctttcttagttttttcaaaaggataaatatttgagacaaattaatatataatacccaaagaaccatataatatgagtaggagggagtattgcacaatcacttccaacgaatatatatatatatatataattgtttatttaataggttgcttcaatagtaacgtaaaacattacgggacttatttggataagcttttctaaaaatatttctaggagaaaaaactgacatgagttttttcataagctaaaataaactctccattaactaatttatagacttcctctcatcttttagaaaatttatatgagagaatttttacaaattagttaatgattaataaatggagaacttatttaacttacagagaattttatttttttcttctcattctaaagaaatttatccagaggcctacatcatctatggatcagatgcaaattccatgtttattgcacttgtcaatcaattaatggtacatggttttcctgttttattgttcattcagacttggaaccaccacggctacgaccgaaaacttca

SEQ ID NO: 2274 - DNA, 1895 bp, Glycine max
  Intron number 1 from transcript Glyma02g01560.1 (locus Gly ma02g01560) derived from phytozome v7.0 (chr-ID Gm02; pos 1113627 to 1115521 reverse strand)
gaatcgcctctttttaacccaacttagcgctcccagtaagcttctatctctttacctttaactaaatattttcatagttttttttttcttcatataaagtttaatttacatgtcctatgttatagaaaaatcaatggcttattagatataaaagtctaacgaataaccacctgaatgttagaaatgattaatgtattaaagttgaaggttgaataattgagtattaaaaggatttgatcttgaaaaaaataattttagatcagtttttatttattttttctgttaaattagttaaaatttcttttctcttataaacccgaagaaggattataaaaaaaaaagttattgaagatggatagattgtgattaaaatgatatcgctaataatcattgacatcatgagcagtgatctccatcagggtaatgagggcaattaccccacacaagtaattaaactctttaatttgcgacagatattatgcccaaaacgagtaattattagttttcttggatcaaaaaaataaatgcatgtttgcattattttcttaaaataaataattgctttttgtttatactttttttcaaaaaggttgataaaatataaataagcaattgtttttctataacaaaagcacaaagcacgctcttgcccacaagtagtttctgcttcatactattttttaatgtcgtttggaatttaataaaaaatatatggtttggattgttgcatgatgaaactgaacggtatcagattctcgtttgtaagggccaattccatgagaattcgtgttatgtctttatttactttttttattcaatcatatatatctgcacttcacgcacatgtagattttttttaagttagacacgcaacatgtactatcaacatcttttacagttaccttttcatgtgaatagatcttaatctgttaaagtatttatggctgcataccgtgcatttaattttgaactgcacggaatcctctatctagattctagatgtggatgattgaaataaatgctaaccttttgagtttttataaaaaaaatttcttccaaatattttaatatcaggaaactatttgtagaataagttgtttttgaacctagataaaaggtaaaagttttactcttctactattatataagagagaaaaactaaaattctattgatcgagtatgattttttcttctatcataaagctgttaaaaatctgtgtatgagcatacctaaacaaagtaattgggaatccccgtggaaaataatgtgtcatagttggtacttggtaggtacgacagttaaacgatattaaaataatccatggaggattgggtgttacgtgacacctaaagtgagaaaaagaaagaaacataagtataatagctgatataatagagttgggtgttaaaaagacataataagtattaatgaagtgtttatatatcattactactaatggacggtaagacggatataattatgaatttgtgataataaatttgagtttttttacccaaatctttcaacattcgatctataccaccaaattagtttgttcgttcagttcactatctgatattcatatcaacgccacaaaacttgtctgcacatgcacgtgttattcatgtgtgcaagaaggatgtaagaaagaaaaaaacatatgaatggttgtcaattgcaccgtgaccccaaatcccaatgtattagttatgaactatgcatgtcaataataaacaaagggaaatggcctacctacgtcagtaactctattaattgcatgtcctattatctcgttggctcataacatggggtatagcttttcaaattgtgttagcttagacatacaactggtgggccttttgtgacaatatcaattttccattggatgcaggtg

SEQ ID NO: 2275 - DNA, 3230 bp, Glycine max
  Intron number 5 from transcript Glyma20g21660.1 (locus Gly ma20g21660) derived from phytozome v7.0 (chr-ID Gm20; pos 31110541 to 31113770)
aatctgataataaaagctcaagttcaagtcattaggtattctatttatgatatattattttatttgtaatcctacaaatattctctagcatcttgtatacttttaactggtcatgaaggttgtttgacttcatttgctacttagataggagaatatttgaatgctctgtgattcaaattgtttgggtgattagttattttcaatatgctttattggaaatttgaaacttgaaagcccgcaagatatctctgaggttgtaaccttggattccatttgagattttgcaactctgcagtattttccatgatcttcttttgacaaaggtttaaacttggtgtttgtcttcatctactaaattttgaggatggctagtttctccaggtctatgtagtgttcatctttggcttttttgcctaaaggttgtgctataaccttttccaagtaccttggaggaggtcttgttctatgttcaatgaatttctatgcttgctccactattccactcctctccaatcagatgttgtgatattgaattattcatgataactttttttgtttggtcaaggtagaattatcatggaattcattgatttccttatttttgagctattaatatttccaatttctgattttccaccaatatgatttgtgttggttttgttaaattattggattgtaagtaataaatgtagtgcaagttggctgtttgctcctttatctttggagtttacttgtttaatggttagaaaatagttaaatttaaatgttattttttgacatagtaataatgactagtgtgaaatgataaattccgtgtaacaattgtcaaaaaggctgtaccatgtataagatatttgcatgtattgtgtctatcagtctgtgtaagatattttttgttttttctaaaatacctgaagttcttttagcagaaagaagattctgaaaaggtaatgactaattttcttaataatgactttagtagttgatggcagctaatcttgcacttatgcacttctggctatcgggccaaagtggaatctgacatctgtcaagtcagtattttgtagacaatatcacacctatagcagctgcagctctgaacagggtagaccattctttgccattgcccaccctttcttttagggagttttttgtgattcaaccccctttttttttgcatgagcttttaggtttgaatccctacatccattgaaataacccagctgcaccaccctctgttttcacctcaatgctctacctatgtgttttccaactaccttgcagcagccctagtgctttttgatcaaacccatccttttcctggcagccccagcctcagttttatggtcttgtctgcttgacttttgatgttattggccattctattatgccttagattgatggtgattgtgtgtctaaactatgattatcaatcacttataatggatattttagtaattttttatttttagcatttatatgtttagtataaattatttatcttgtatccataatcttccttataatggccattgttgaaatcctacatcaactatagatatgaccaaagtagagcttataaagggcctgggcaattcttgactcataggctggtttttagggtttagttaggcccagaccaaattcaagatggtattagagcctagcataaatttgatattgggccaccttcaactgccgaaaatgtaattgggcttgtgactttcctggtgcaatctaccggatcttgtggtttattcagtgcgatataaaaatgatagtcctacaatctccacgctttggaactccaacccttggtgtgaggggtacatgttaagatagctcatcaactatagatatagccaaagtagagcttataaaggtttggacaatcctcacctagtgatatagcttttggggttgagtttcacccggaccaaattcaagagcctcctcaccattcactgttcttctgtagtgcttttggtatttactctaagtagtcaaaagtgctgtgattgcagtgaaaaatggacattggttgcagattccgaccttgcgtgacacaatactttggaacggcatgggtttgggattgcgtctgaagcagcctcattttgtggtgagatcacggctgttctgtgaatatggaggcatgattacatgatcggattagaattttgactttgtcactttgtctgaccattccagaatttatattctttcttttttaatatttttctctctttttaatcatttaaacccatttggttacctaaccccttattaattaaactttcccattttccaatttttactaagttactttattaagttgcaaaaagtgaacgtacactcatttaatattaattagacttttctgtttttccattttttttatctttaatcttttttatcatttaaacccatttggttacctaccctcttattagtttaacttttccgttttccaattttacaaattgacccggttaagttgcaaaaagtgaacttacacttaatattagacttttccatttttcatttttttgctatcttgttttatttttatttaatcttttatcctatttaataatatgaaattagaaaatgtctgaccaaaattgtaaaggccagtgttaagatatttaagtgtttgtatttcagtatgtttgagatatttttggattttagcaaaatttgtacagtatttcggtatgtttgagatatttttgaattttagcaaaatttgtacattgttttggcagaataaaatcattttaaaatgtcataccattttcagactatgttaaaaacagagattatttttattgttcataggtttgaagtcatgacatctccaaaatgtatttattttccttgtgaaaaagtcattattttgctagaaaaggtttatcattcaaatgggtcaatagagaatgattttcatgtctttatgtctatgaattgttctgcacaatctgggtagaaagctaatagcagaagtgcaaagtacgttggctaatgtttgttgattcatctggttgtttgtcatgctctgaggctgtactgtcttgtggtttttaaaataaatgtagttttcttaacatttacccctttctaacttgtgttgctgaccctgtttgctttggagcttttggttcatatgtgtgtaaccatttttgttgtgtgcagggaaaaagctgacaggccttttcgttgccttgatt

SEQ ID NO: 2276 - DNA, 743 bp, Glycine max
  Intron number 1 from transcript Glyma05g08830.1 (locus Gly ma05g08830) derived from phytozome v7.0 (chr-ID Gm05; pos 8715676 to 8716418 reverse strand)
tgtatgtgattgtgattgattgcctttttattttcttctgaattttatgggtaaggtaatgatacattgagtagtgcccgttgttaattaaccctgctgccaaataacagattactaaattgaagtcataaggttggtttcaatccctcctactaacagaattaataaaaaaaaaaaggattattagagtagacaaaacaaaagcatgaatactaactaactaactatcagtctattattcttaaggagaacatgtcctgcatactctctctttccctacaatcttttcttggccatccatgtatggttgtaggaccaagaacaagattaactttatgtatgtgtgtacatgtatatagtttgatatattttacttgcagccacaaatatgtaatgtaattaataatgttgattttggctttttgttctactcatgttgttgattggttgtaaagggcaaatttttattcttctcaatttactcagtttgcactattatggctaccaaattgttgaagattttgtagtagatcattttcatcacatttttaatttacttttagatctatgtagttaacttggacagttgttaatttttctaactaatctgatatgttgcctttgtctcatattgagcatctgtcttgagatcaggtagtttgagatataaatttgcacaacttgctaacagaaaagctgtttaatcaataaaagctgtcttgtaattttacagagagaaagag

SEQ ID NO: 2277 - DNA, 1308 bp, Glycine max
  Intron number 3 from transcript Glyma02g02160.1 (locus Gly ma02g02160) derived from phytozome v7.0 (chr-ID Gm02; pos 1543369 to 1544676)
agaggtaatacatattctttcacgatttactatttttctttctttaccatattttctcctctcttttttttacggttagttattgcttttcacttattatatattgcattattctacgtgttaaatgatggtatatcaataacaccaattaaactcttggtccaaggataaaacatctaaaactaaagctttagagccactgataacaaaatattttcttttaattttttgtaaaacaaaaaatgtcttgtatgataaaaaaaaatggcagatatgttgataatatagctcttacatttaaattaaaaaattctcttaaaatttattttaggtcttatttactgctggatcaatcctggtactcaccaaactgtcattgaactattttatcacctttattgttgatggattaaggaagattttaaaagatgaaacttaattatttaagttcacgaaagtagtttataatgttcctataaattcttctatatttttttttcaacaagcttaaggttaagcttatgaacaaataattttttggtaaataaattttaattaaatgagtgcttgattaatctatttatccaaacatgttttaaaaaattaagtttgtacatcaacttaagtgggttggtgctaaatatttaaagaatattttgtcgctcatagtgatcctatttacctatttagattgaaataattgcttccaagatattatagtctctcatttttaattaagaatctaatctcaagatacatataaaatcaaaataagatttaattttgttatatgattttatggggtatggaaggaattaaaaaatgcaattttttcattgtatggaatgtactttatccgaactcatgtataaatagtctaaactcatatataaatgaaaaaatgatcttatatatttgacttaaatataggtaaatctaactaattttatcatatttaatgttatcattcataaaatatctttcctttaattttaattttattttcaataatttttttattcatgatataagttctaatgaaagacattttagtaataattttattttttgcttgagatcaataagattaaatgatatcaattaactttattaattaatataaaattaattatttttgtttatatacgaatagagaatgaatatatatatataaagtacatgacattaatttcctgtgacaagtatattttttgtgattttagtacttataaattattagtagtgtcgcattgaatataatacatggtaaaaccttgtatgatttattgtgtgcttcatgcctttagc

SEQ ID NO: 2278 - DNA, 604 bp, Glycine max
  Intron number 5 from transcript Glyma02g44930.1 (locus Gly ma02g44930) derived from phytozome v7.0 (chr-ID Gm02; pos 49375009 to 49375612 reverse strand)
gctggagaaactgaacttcagcttcagcgacgaaggtatgactgacatttaattttttaaatacatttattctaaagtgatatatttctggttttcccaacaaatctcatggtttccttataaacctgtgttgttttcaaagtttaattttcactttctaattgcatcaagctgttgcgaatttttgctgtaattttgcttagtgcaagtaatatttccaaggggggaatgttgagaaaaatgttatgctttgggttatgttactttaatctgcacagaattaaagtttaaccccactacgcacaggtctcacggactgccattagatacatcaattacaagttgtattggtagtttggtacaagttatgtggtgcttgcaaactacaatgcttgcagtctcatttgagattaaactgttgttggtatatataatatagtcttgctggatatttttgtctgtactccagtctatgaaataggatctactcattggtgcgctatcaaacaatttttatgatgattttttattatgcataattgggtcactgaagtgtgaaatacccttagaatcctagagaggagaaattatctattatctcaaa

SEQ ID NO: 2279 - DNA, 1846 bp, Glycine max
  Intron number 8 from transcript Glyma05g32700.1 (locus Gly ma05g32700) derived from phytozome v7.0 (chr-ID Gm05; pos 37557704 to 37559549)
ataacattactcaacgcttatttgataactttcaggtacttgactgatgtatgatcaagtatgtgttcaagtttgtgtgagcttgtaactagtgtttagtattgtttaaatgttcgggattagacggcaaagggaaaagaaatacttataagttataattagactctgaaatcttgataactgttgtatataacactgatcgcatacccctatctgtgccaatagtctaggtcaaatacaaattatacaactaataaaaatgccctgccagacaacactatgtactgacacaatgacaacaaggttgttacttcaacttgactttaaaataagtcacacataatatgtgttatgcattgtccaatcatatatcacatggcttattttgttacatcagatgattaagtttaattttttgttttttgcaattaaagtctaaggatctttttgcaaatttgatttttatcttatttttaatttaatgtattttaaaaagatactttattccctaatcaattcttaatcttcctcattctaaacccaatcctttgctgcgttctatccatctttcccaccctttggtttgttgaactttctgggagtaatcataatcatcagagccgtggttattagatgttggatgagaatgttagggggcttgaaatcattaggcttttcccctattgttgcgttgtcttgaaatcatcagcataatattgtactcttgtgaaaatcagttattacacagcttgtgcttgaaactggtattgaataatattcattgttttgcctttaaaaaaaagtactcataatcgtcaccgctgaaaaagttattttgtctcaaacagacgttgcggtgacgagtacgtgttgactgtccctcaacgaatcacaagctctattagagtagttttttagaattaggaagattaagaacctagggaagattaggaattaattagagattaaagtgtttttttaaaataaaataaattaaaagtacaaagaataaaaatatcaaatttacaaaaagatcaataggttttaattgcaaaaaataaaaaattaaattaaattatctgatgtgataaaataaattatgtgatattatatgattagacaatacataacacactcgagcagcttattttaaagttgcattgaagtaacagcctaaaaacaataatactcttttacatgggatacgttaatgatctaactcttcccctcaagatgatgctaaaacaaacaaatttgtctatcaaagaaagtcacaaaaacatacttgactacatgagggcgtgtaatgggcttcagaaacaatatttgtggaattcatattttaaattaccaccttttaatactgaaccatttatgatgtcatgagttttattattagtaggtttaaatatgtttttgatttttaataaatctttgatttttgtgtttgttttctaataaatttttattttgggtcaagtctctaataaaacaataattttatttttatatttgatattttgttttagtcactgatagttaattttgtatttgttccttaataaattagcaaattttattttaattccaactaataataaatgattttttttataagagagtaaacacaaaatttgctaatttattatggattaaaaataaatattaaggaccaataataaaattgttgttttattaaaaaatacatacaaaaatctaatatttattagagatgaaaaatatatttgagccttattaataatataataatgatatattagctactatatgtttccttcttgccccttcagtttgtgaatttcacaaagattacgtctgagaacaa

SEQ ID NO: 2280 - DNA, 8993 bp, Glycine max
  Intron number 1 from transcript Glyma13g04030.1 (locus Gly ma13g04030) derived from phytozome v7.0 (chr-ID Gm13; pos 4305952 to 4314944)
gctgcagaggtatgtagaattgtaacttttaatgttttgtcatttatattatgctaatgtttagccaagttatttaataagcttatccacatagccgattgaatataactttcattgatgacatggagaggactcacacactaaagatggtatggtcaatgctatatattaatagaatataatactattgttgtcaatgtaaaatatctataaatacggaaggctcatgactcatggaagctatacattgttctctggatttttgatgtgtttggtttaggtctgctagaatcagagagtcagagagaaaattaaaaaactggaagtttgtattattgctatcatgattcctgtgatttggatcctgtgattcaaacccctgtggttgagacatgtaagcttttttgttatcatgattcatcattcatggatagtgccccctccctggatatattttgattcattcttcttgatgctttcaaatcatagtttgcctcttgtacaatgaaattttctttgggtgattttgatcgtataagctttgtgaatttgttgtggttaaatcattgcaatttactaacatttcactacttttggcattttttggctgtaacattaaactttatggtcttgtgtgatgccattttaatggataattattagtagtacgacatatctccacttttttattcagtcacagatggaaccttgttttctgatatttcttatcaagagcttatcaggttatatgatgattctgtcgattatatactgtaatgattaatatgttatttgacagtaaaacttggccattctttcattgggttgaagagcctttttaggttcttactcctctcaattccaaccgctaaatgccaattaaaagctttaacgtgttcttactaatgataagatgaagtagttagaaaacataaaatacaagtgtttagtacatgaatttttaacttttttgagaaaaggaaactatatctgttgattatattctatgaaggacatgtactcgaaaattgtgttggattcaattggaatccatcactcaccaacagagagaagaaggttgagaagaattgagaggaactgaatctttattgatgaatgaattgattacagttacagctcattttctgaagtatatattctatgactccaggtgtaattctgttacacctataacaaactcaaaacagaaaaatagtatataaactgaaatgcactatatcaattaatatctatctgtgatgctatcaggtgctactagcaccatgtgactttatttgaattacccaaaatacaacaaattggaggtgtagatgtttggggtgcgggtctgtaccctgtacataccaattattttatcagtatgtggtttgggtgttgttgagggtatgagtatatgagtatgacttggtgagacttggggtacaacttggccaaagttatgacatttgtatttgtgatggtgagagtgcatcttctcggtgttgctcctgtgcatttgtgaggtgtctgtgtatgactgtcggtgacagtaagttgtgcttaggtgtctgcgtttgttccaatttgcaccttgctgtcttttatgcaatttggtaatgctttattatataattttttttattgatgtaactaaacttaaacttttgaaaatatagtatctgataccgtttcagccctcccttatccatgcaatgtagaatatattattgaagatattgtcttacatattctattgatatactactgtaacgacaaataagttattggttagtacagctatgtcattctttgtaaagagtctagtttgaggtgcttacttctcttaactctgacagccaaatgccaaataaaagcttttgagggtgttaaattatggaagatttcaaagatttgaaactttttctacattttgagaatgagatcgttggattgcttggtttgcaaaactatcttctgtcactatccctgttttgttctctaagaggaaaatgtgatttcaatcataaaatatggtcaactgtcctggtttttcagcaattcattaattccattcatactaaattccatgatgaaaccatcaccaaattttttcactgttatggaaggtaagggatgggtattattttgacctccccactattatggatactgacttgttgactactctttgttattttttttccgcttatatttcctttttatagattctttctaactgttttaattaaaggagatgggcctgggttggcgaactctgcttccatattaaactgcaaaagctgataattttctcattctgttctctaataatattctgagtatctcttgtaattaaattctattataagcagaaattatgttcattcaaatatacagcattaagataacatctataatttgatgtcatatgttttgttttttggtttaacatttatatacctgatatctgtcttgtgttttttttatttttatttttaattgcaaataaaatgcaaattaatgtataagctaaactagtatactggttttctcataaatggttttttttgttgcaaataaaatgcaaattaatggtgaaattattccttagaaaacagagaatgcggatataacaaaaacactgaaaagagaaaacatttctgcatttaattcttgacctagtaagaaaacaatttattacaaaatgtactctttggtttacaccctttatccctaacactagtttggatgagaggggaaacaaggaagaaaaaaataagcagaaaataaataaggaggatagaaataaatggaaatagagtacaaaaaatgtgttgtttggattgatagaaataaggaaagaagtagagtaagttctcacctacttgctcctcaagctaaagtattatcttcaaaacaaaccctcccacccaaaaagtaagagaatggaaattcagcagcattagtaggtaggggtctatccagcaaaaaaaatgaattaaatcgatcttctgtttgtatgtaagtttaatttataagtcaccaaaaaaatataaatttaatttatttacttagtaatacactgactatttctatttttgacaaatatagaatacacatacttattattgcttaagttacagcaacgaagttatgaatctagttacaattgatcttaatttttgaagtagcaatataagttaaaataatatttccatatattactttaacttatatcagtggtcaatctctatgcacttaagcatgttctgtgtctatcagtgagatcattgagcaattacagctatatacataattcactggagaactgtgaatgaagtacgtaatatgcagcataaagttttagaaattattgtgaattaatcttgttagtttttttttttttttttcattttccaaatcatagttgtttcttttgaagacaatctctgtaaatgttgaaaactttggtagtattaactgttagtatagcattaaaatctgatgcctttgtgaaaattttcaaaatccccaagtttgaatggagaaatgtggaagaggaaatataattaagtaaaatatgtagctctataactgaactgcaataaaacctgtttgtgaatgttgtgttatgtggatggatactatggtcatattgccattacggccatgatagtgtagcacaaatgcagaaagaggcacttgaagctctgagttttagtgagttgaaaagtagactcacttagcttaattttattgcctttaacacacatacatatatacacaatacaaggcttaatgataagacagcttgatgggacattacaatgctgtcttctgaaacaagctaaacataaaatagaagcaagcatgtatacacataatttaacactccccctcaagctggagcatataaatcatatgcaccaagcttggaacatataaactgaatcctagttccccttaaggacttagtcaaaatgtctgctggctgatcattagaattgatgaactcagtggtaatctccttggacaataatttttctcgaatgaagtgacaatcaatctctatgtgcttggtcctctcatgaaagactggatttgatccaatgtggagggctgcctgattgtcacaaaataacttcattcgtgtaacttcacaaaacttcaattcttgaagaagttgcttaatccacataagttcacatgtgaccaaagtcatagatcggtactcagcctctgcgctggatcgagcaacaacagtttgtttcttgcttttccaagagataagatttcctccaatgaaaacacagtagcctgaagtagatttcctatcaataggacaaccagcccaatctgcatcacaatatccagatacttgcgtattacccttgtcttcatatagtaatccttgaccaggagctctctttacatatctaagaatacgcataacaacattccaatgatcgacatgaggactctgcataaactgactaaccacaccaacaacaaaggagatatcaggtcttgtaatggtgagataaataagttttcccacaagtctcctatatctctcagggttaggataaatatcactctgatctgccatgagcttcaaatttggatccatagggctatcaatcggtctgcaattttgcatgcctatctcctccagaatgtcaagggcatacttcctctgtgaaatcacaacaccatctcctgactgagccacctcaataccaagaaagtacttcaaatatcccaggtctttggtctggaaatgactgaataaatgctcctttagctggacaatcttagtagcatcattccctgtaataactatatcatcaacatatactatcaaataaacatattttccaggggatgattgacaataaaaaacagaatgataagcttcactccgtttcaacccaaaaagttgaacaatatgactgaatttaccaaaccaagcccgaggagattgcttcaacccatagagagatcgacgcagcttacacacaagaccatactccccctgagcaacaaacctaggaggttgctccgtataaatatcctcctcaaggtcaccatgaagaaagacatttttaatatcaagttgatgaagaggccaatggcgcatggcagccatagcaagaaacagacgaacaatagtaatcttagctaccggagagaaagtgtcacaataatcaagaccatatatctgagtgtagcctttagctactaatctggccttaagccgatcaatcttaccattaggcccaactttaactgcgtagacccacctacaacccacagtcttcttgccaggaggaagagaaacaagttttcaagtaccattatgctcaaaagcctgcatttcatcaatcatagcctgtcgccatccaggatgactaagtgcctcatgagtattagaaggaacaaaatgtgaagatagagagaaaacaaaggaagaatatgaaggagataaacgatgataactcagaaagttatagataggatgaggattacgagtggtgcgagtaccttttcgaatgacaatgggccagtctgaatcagacgaaggtgagggagcaggatccatggcttgaggattgattgaagaagaatgagaatcatgaggagaagcttcgggtactctagaaccaactgtctgtgtccggtgttcatatgtaataagaggtggagaagcaacttcagtcggatgtggtggagaaagtgaaacttcactgacattttggtttgagacacctaggggacaaggagagggaataggaagtacattctggatggaagaagaatggtctatagatggtgagaaaaagggtgtatcttcaaagaaggttacatctgcagacatatagtatcgtctggtagatggagagtaacatttgtaacccttttgaagacgagaataacctaaaaagacacacttgattgcccgggcagaaagtttgtctaaaccaggagagagatcatggacaaaacaagtacaaccaaacactttaggtggaacatggaataaaggatcatgagggaaaataattgagtgagggatttgattttcgaggaaagatgaaggcattttattcattaagaaacaagcagtaagcaccgcatccccccaatggtgtgtaggaacatgagatgctaacattagtgagcgtgcgatgccaagaagatgatgatttttttttcctgcgataccattttgttgtggtgtatggagacaagtagattgatgtagaatggcttttgaagataaaagggaagtaaaatcatgagagaaatactctttggcattatcacttctgaaaattttaattgttttccaaattggttttcaacctcatttaggaaggacacaaagatagacaaaagttctgatctgtctttcattaaatagacccaagtacatctagagaattcatcaataaaggttacaaaatatcgaaaaccaaaagatgtaacacggcttggtccccaaatatcagaatgaatggtagagaaagctgaattacatctttgaacagtttgtgggaatgatgacctaacatgttttcctagttgacaagactcacactctaggactcgaagattcttcagactagggaccatcattttcagctttggtaaacttgggtgacctagacgatcatgcaaaagtttgggatttgaagttgcagaacaggaaacagaaacattggatttcaagtagtaaagttctcgtgattcacgtccttctccaatcagtcgacccgtgccatgtccctgaataacaaaagaattagcggtaaaggttactgagcaatttaatgaacgagttaactgactcaatgaaattagattataaggacactgaggaataaacaaaacagaatccaactttaatgaggatgataaagggacttgaccacttccttgagctgcaactttggaaccattggctacagtaacaaggtgagaaatttttgaaaaagaaatggatgtaaaagaggacttattaccagaaatatgatcagaggcacctgaatcaagaatccaaggactgggaccgtcaatagattgagaaatacatgccgtcgaataacatggtacaaaggaagatgaggcctgactgctggatttctcagatttcagcttcaaatactcttggtactcttcatcatagaacttggactctgatttctctgtccgagctaccttggctactctgtcagggaagccatgtagagaataacaattctcttgagttggcctatcctcttgcaatatgagcattgaggacgtccacctcttccactgcgacctcctctactgttacggcctccccctctcccacgggttgcaaccatggctgacatttccatcgtgtcagctggattttcttctttcagcgcatggggcacccgaatcagcctagtgatgagagaatccatcgatggtacttgatctccagtaagaacttgatcacgcacgtgatcaaaatttgaatgaagactcctcaagataagaaccatatagaacttatccagcttcttattcacttcttccagcgaatcagccacaagaaacctctttaactcttccactgcagcccgagctttacctatgtgtgcaatcatgtcgtgactggtttgtttgagggctgtgaccttcatagtagcatcaaacaaactctgaatatcattggcaaagatttctcaggccttcttccaaaaagaacaacatgttttgaacgatctaaggatctccaaaacatctgtctcgaccgattgccataagacagcacatagctgataatccagcttctcccactcagattttctgtcacttggaacagtatcaatacctttttccaagtgatcatggtgtccttggccaagaaaccacaactcaaccgaagcagactaggacaaatagttcttccagtttagtttcgcagtcgtgatagtcgaagttccagaaaaagagaagacaggtccagcagaagtcattttgatcaatgacagaaaccctaatagaaaaaaggtagaactaagcacaagctaccacacaagcttgtcgaaacgaaaaaccaacacttggaaagcacccaggagccgctgacgaagctgccggagcaactcggacaagattccgatgacggcacggtggtgcgtggactacacgcgtcggacaacacccgaagctgtaacggtgcgtggaggcgcgtggaagctccgatgacggagcgatttgcagggttttggtcgcacttttccgacgatcctaaccctgatgtcgccagagataatgacggcggtggacggtggaacccgttctgatgccaacttgaagctctgagttttagtgagttgaaaagtagactcacttagcttaattttattgcctttaacacacatacatatatacacaatacaaggcataatgataagacagcttgatgggacattacaatgctgtcttctgaaacaagctaaacataaaatagaagcaagcatgtatacacataatttaacagaggctacacactattgtagctctaattgaaaatcatatttatctgtctgagaaaaaaattcaagtactagaattttttgtctactgaagctcagttctgataattgctggcagcaagtttgaccaaagccagtgtgggatattttggggacactagctaagcagacttcttgtcacattctaaggttaggttgcacacatgcacagagtataagagggtgtaggggaaaaaaaggaagggaaaggatagacagagaattcaattttaagttgcaaagtactaactacatagtgactatagtacccttctctacagattctttcttaattctgtctattaagtattttgtgtcattgaggtcaacatattttttcattttctttttgggttttcagtatttgattttgtgttcattccttttgtttgtttcagttgccaggacgtacggata

SEQ ID NO: 2281 - DNA, 1375 bp, Glycine max
  Intron number 2 from transcript Glyma19g00980.1 (locus Gly ma19g00980) derived from phytozome v7.0 (chr-ID Gm19; pos 647943 to 649317 reverse strand)
catttacagaccccgctggtttatctggctacacagtaagcaattataccttttttttttttttaaatgcaaatattctctagagttaaaaattaatttctcttgagatactgaatgtacaaaattatttatcaacttatcatatcatgctgggatataacttttcttatttgactaattttctcttctcaatgtgacatctcaccctcctggaatgtccaaaaccttgtttcattgacaaatagttgctctttgggaaaatctctttacttttaacctttatagtcattttagtttggtcacaccaaccccaatggatgaataacttgttgcataatagtgttataaatgtttgagtgcatgatattgattgacataaattattctttttaaaaagcattattagacggttgaaaaatgataagatatttgagggaaaatgttgtaattaaatggtggtattttttctgttaaaaaaaaatggtagcagtttttggcttaagctttttttttttatcgctaaacatatgttatctctttggcttaacactaattttaaaaggcattatatttttaaatcatttaagctgaatttttccttttctttttatataatcttagtaaaaggggaaggtaaacacgagggatgtatttgcataaggttgttttgatccattccacggtgaaatttattcaaataaatttagtagagtttataaaatcaggataaactacatttataaacttaattaaggagttattatcaacatactcctgctttctcttccataatttccattcaattttcatttcatttctctttctttcccattacaacacttaccatgcctgtcactttatttcctttccatgctccctttattgatgacaccttttatctcctctcagtagctactagctagcattattgaacattgcaaaatcaaataagtcatcattagctgtagttgcatcattacctgtttgattggccccctcacgtgttacataatactgtgtgtagggatgtttgtagaatttttcttttctaaagaaaagtagacatataatatgcagatgagtttcttaatcttttatttcaatacaaaattagtacgtgttttagtagagcaaaacttgtaaatccaataataatatgcggaaaatttataagttacattattaatttattatgcacatcatgtgatcaaagttacattttctatcatttcaactattggatcatgctatgctttatgtgtgtttagtttaattattgtgacaatgacaataataatattatctagaagagaaaagttacttgtattattgtatagcatctaagcaattgcttctgtctgatatccagaaatcc

SEQ ID NO: 2282 - DNA, 2028 bp, Glycine max
  Intron number 6 from transcript Glyma10g34710.1 (locus Gly ma10g34710) derived from phytozome v7.0 (chr-ID Gm10; pos 42878851 to 42880878)
tggtaagtttcaagtttctcttgataacaattgttgatcatataatgagcttctattctgtctaatttcattgttaacttggagctgcttcttactattgaaatatgactttatcattccccaccttttcttgatcatatgatgagcttctattctgtctattgtgtttgtgatgttggttacaaggttgtcaagctctcgagttaactagtaaactcttacgtgtttacaattctaggtggaggaaacgagttaactcgctgtcatacttttttatggatgaaaccgggtaaactctttaaactcgggtaaactctttaaactcgtgtaaactctcgagtcaagagagtttgaaatcaaaatgtaatttttgcctccaattggccccacaatattagtgttttactatggctcaattgtttgatcatttatgtagtttaatcttatttgatattaatgtactataacactattattgtggtttgctactttgctttattgtggagttgaaatgtcaaattattgttgccttgagagcatatatgtcattaaaagaatttttaatattattaactcgttgggttgagtttatgagtcgagtttacaaaagctacacgagtttacgtagattctcgagtttgacaaccttggttggttaattttccacaacatttttctgatttatgaaactgactcttttaaagacattatctgcctgcaatattctcgggcaatgacttttatttatttaatgaaaaatttaggagaccaactttagatcgggttttattttggaactaagttgttcttacattaaaactcaatagagattctaaatttattttgtaagttacagatttaattccctgtttggttaaaattcatctattgtagttaatcttatgatttttttggggagagtgagaggtgggactagggttttaaataaccactcttgtcaaatagttacagttccttatattggcattgtgatcaagaggtatcctgagttatttttatcgatacataaactagatgaagttttatttgttcctcaatttatacctagcacccagcctacgaatattaattgcaaaaaagatgaaacaatttacaacacagattgaaggtatttgacatggttgaacattaagaaaccaatcttccatattctgaaagtcaattatatagttgtgatataagctgtactcatcctgacttctgtaatctaaattcctttttaagctggtaaaaacaaaggtatactataaaaaagttcaacatgatgtgtagtaaggaattatgatcactatagcatatatgtggttataaaaaagttctctatgcacattctaacattgcttagaatgtttgctattggtttgtcagactgtaggaaatggtgtatttagttacttcatgtaaagtacagggaatgagatgtcataaataatctttaaagggtccttctaataaagctaagaatgaattaatgtatctgtaaagaaacagatgcgtataaagggaaattggcacaaacagtaaggcatatttacacagtgacactaatgtaaacattgatattggtacaaaattgaaggatacaagaagacaagtatctagagtaggttgtcttccatgaaatacttcaattgatacagatactaataaatacagcatcctggagtcagcacatatattcaaacagtttttatctacagaactgaaaataataaatagtcattttcccatgtgtttctatcacatctgcatgcatctatgaaagtaagctgtattttctttggtctattcctccaacaatgaggattggtcaagatggcttaggaaaacaagtcgttaaatatgtgtaatcggggatatatactgtctatgtttgatttgctcacagtatggttttgtgctgttttgtgttactttggtcgcattccttgcaaatttcactgtttgacagtgattgatactcctcaaactttttgttactaactttatttcaattaccttcaggtg

SEQ ID NO: 2283 - DNA, 1488 bp, Glycine max
  Intron number 2 from transcript Glyma02g37460.1 (locus Gly ma02g37460) derived from phytozome v7.0 (chr-ID Gm02; pos 42767098 to 42768585 reverse strand)
tgcttgaggctattattattgtcactccatttgaggtttgagtattttattttgttttatatgcaatcagtaattattctagtttctgtagcctgttattaagttacatgtgaagtaagtaatcaagcaaaagaaatcctcgaggaaaaattcataccataacacttttttcttctgaaataaattggtagtattctttgcatttgttagttttggatcagactcagaatttcaagaaataatatcccattgagattttgaaatacttttcgattggcatgtaattatttgctttattgtaattatgctttgttgttgaatataaatttgtagtactcaacatttcccttcaaccaaatttttctgctaatatttgttgactacttgactagacatttttggtttgggtttctgctttctagttatactaatttgtaaatttatgatgtttatttacttcagctgttatatttttagtagtatagcaatgctctgatatttatggtttgattgaagtcttcagtcttagttgttatattaaattagttgaccattatcacctagtctgtaagtcctgttatgtaagcagtccagctctagaaaaagtatcttcttcacgtgcttttagcattttggtcattcaaagatttcttttatgctgatcaggtggggtgtttgtggtatttggaataaccaagtggtgggacctcaatgaatatataggttgacttttgttcattagttattttagacttttctagtgactagtgtatagtaagtttggattaataaaatcagctaatagttgattcaattggtaggatcaaatagcactgatgaaaaggtgttaggtttgattacagctactgaactgatattggtagatcatttgtaacttgtaagcaccattgtaaagccttactatagtaaggcttgtagcatatcctgagtccccggacctaaacctttatgcataaacagttaaataaaataaaatcttgtgattactttaattagccacatcagattatatttttactgtcaaatttatctcaattaagcttgaagcaaaaggttatctttaagataacgaaaatagtatcgatctctagtttcacttctctccttttgactgttacacctggcaggaacacttaccttaaaggcttaaacctttaattagctgggaaataataaatcataagattttttaagtgacagatcttaaaaatttgcttgttcaaacaaatttatcttgttgagagctgttgcttgctttctagttgcctaaagtgattgcactaatgaataacagtttttttttcaatcattactatgaaagtatccaattagtgtggctattcagcatataacatatctaacatagcaaacatgtgtgcatagtttgttcgtggcatgtggaggttaaagtttgtattatgtcttactgcaggtggtgaagataagattgcagcagcagagaggtct

SEQ ID NO: 2284 - DNA, 9812 bp, Glycine max
  Intron number 2 from transcript Glyma18g09750.1 (locus Gly ma18g09750) derived from phytozome v7.0 (chr-ID Gm18; pos 8625136 to 8634947)
ttgcagaatattgtaggaaatcatcatttgttgaggtgcataagctagaaaaacctttaactgaagaagaatcattgaaattgttctgtaagaaggcatttcagtatagttccgatggagattgtccagtaaaggtgattggtgtaataatcattgtaatgggtaaaaaaagagaaaaatttgaggaggaaaatgcaagaaaataaaaatattaaatactgcaactaatatatttttagagctacactactaaataaataaaaattgcgatgcgatataggattcatgaaaaaaaaaataatagtttaagcaacatgccccacttgcatccaaaagtctcttttatcacctattattgaaaaaaaaagtgaattaaaaatttgataaaggattatccaagggggaagattttgacttaagtgaacttaacacagatgaaccaattactaacgaggattaatagatttcaagagcttagcaagaaactaaattctctcgtggagggaagacaaagagaagtgaaatttatttattttagtcaacttttagaataatatttattttcattttttattacattcttgggtctatttttggacatgtaatggactgctagcttctttattgttatttttaagtcttttaattattagattagttattggaccttaggcataatttaggattattagtaggagttattaaaagactcccactttgttggtaattttgatgaaaacttcatattagacacatttaaaagaatgtctatcttggttcttatgcgaaatattaagttcttataaaaaaaattattctttatgacgaatcatcctcagcttatcaatctttcaagattgtggtgttgttctttccatctctttctctaagtccgctttatccttttattttccccaatttcatagagccccaaattggttatctagtttgttgatgctaaaaattgtatccgtcaatcaaggttccatcaaaattataattcccttttttgtattccacctttcagagatccttagatctaccaacattagtcatcattttctgatgagaatactgaaactggccaaatacaggctaaaggcccaagtggagaaggacgaaggcccaagtggagaaggacaaagcctccgagcggagaaggatgaaggcctagagacagagacactatcaagactattaattgttgcttaaggcccaaactaatttgaaggcccaagttatatatgttttttagttataatttttatttattgtaattttggcccaaactgtttagaaggcccatgtctattttatctttttgttcagatacactataagtattggtttttgttttcaataaaaagaaacttttggcattttcataaaatttggtgagagcttctctctgggttccttgttgaaccaatttcagacttatcaaggtaatcattgtctaccctgacttatcttccttcactggaagtggcgtcatccaaatctctgtagcctatatcaaacgatccgctcctagtcaggatcacatcatcttccttgacatttcttacacctacaaccacctagattcaaagaagaaaaagagaaagagaaaaaggaaagaaaagaagatcaatcatggatggtgaagttgagaggttcatcaaggtatggctcacaaccatctcatgtctatgctattgttattacatagcttctagaataccaaaaggcttcatgaggcttctctccctccttgtggcgtccccaaaataatgactggattaatagtaataatttaaataacaaaaaccatggtaaattttttttcctttttctttttcatttctttctcttttctcaataattaatttcagaagggaaaatcatcactatagagtcctgaatgaccagttcacaactctattcggagtcatttctttctgatcactcataacctctaaatatgttgctttttcaaaaggaaaggtatgtcagccattactttaggtcgtcacgtgaaaacaataaaatataatatggtcggtaaactcctttgcaaatgaagtttgctaatgctttcttttcaaataacaagattaaacataaatacattcatcatttaaagctatccaaaatatgggagtttttacaaaatacatagtgtcatccagagcaaaagtatccactgtagtagcttcagtcacatgtatacaatcatcaaattcctttacaataggtctacccatacaaaaacaaaagagtaaacctaatagtcagcactagatacacccaccctcaaaagtatacaaaactagtatgaggagctgtctactatgatgaagagcctccactgatcgccatctctctagggccactatcctccgtagagtctgcctcagatgccgacatgacgtcctcgggagaatccacctcaaggagtgggtcctcgtcgccctctagaaagtcaagagcatccacagcaggctcaggaggtagctcctctgggtcttcctcagatgacgtcacctcgatcacttggactggctccactagacgatatggtgtaggcgtgggtaatatccactccacagtgcgctgaagcatacgcgcgggttcatctggatgcaccaatgaggtagccgtgaatcgaatcgtaccccgaaatcggcaccttgcgttgccttcgagggtctcccaagctccctctaggcactccatctccacacgatcatggattagttgcgccgccatcgcgatctacaagaaagaaaagagaggggtagactctttcacgcgacacctaactatgtagcaacacaatgcgtctcataaccactacatgcaagaaaaaagggtatctcaaggcttttcatctctggtaatcgattacacaaccttggtaatcgattaccagaggccaaactcgaattacacagcttcaggacatgaaacctgcaaaaatgcactgtgtaatcgattacacctaactggtaatcgattaccagtggcatgttcctctgtgtaatcgattacacagcctggtaatcgattaccagaggcctccaaaacatgctgccttcatttctaagcctggtaatcgattacaccccttggtaatcgattaccagaagccctcctagcttcttgacctcgttttcaagcctggtaattgattacactcccttggtaatcgattaccagagaccatcttagcctcatgtcttcatttttaagccttgtaatcgattacccacccttggtaatcgattaccagaggccatatcccatatatcaatcaaagttcacagctggccagccaccacacaagcctccttgctttgtggtctttgttccttttatctgttgactgccaggagctcgcctgcttaggtacatcacaggttctcactgactgactatgtccgggttgggtcgggattggtcaagcttggttttgggcaatagcaccccacctgacgtccccaaggtctcctgacccccgcgacatatctccaggtaccactttgtggtcaacaataaaagcaggaagtctcacccttccacacttcctcatttcaagcttgtaggattatggggtatccatcacatgtggtactaggtggcggtcgggcgatggtgcaaaacaagttctccacatccacaaatcacgtataaatccaccatcccctgttgcccacctccaactgagctcacgtactcccacgtagctcttatcctcgttcctctcaacgccgggtccccatcaatcctcccaagcttccacaacatccaagtagttccacatccaattgtcatgaactcacaaaaccaagcaaaacagggcaaaggcagaaaactctgcccaaaacacaaaccaaaatcacagcttttcacatacaaataccccagtaacattctcttcgttccaattcgttcaccgttggatcgactcgaaaattttactggaagtctctagcacaaaagtctacatcttgaccgttgggatttgttagcaaatgtccaaaaccccatgtgtactaccctttccacagccagccatacacaagcatttttctgcacatatacaaaattctgctgcacatttcacagcaaaattctgcataaagtgcagaattcgaaaatcactcttaccttcatccaattttgcccaaattgaatcctacaagtcctaaatcatgtatcaatcatgtctaaaccaaggacaagcttcagaccaaagcaacacaaaatctaggtatccaaaacccctcaatttaatggattttcaaggtttgagaagtgaaattgagaatgaggtaaatttggagcaaactctcacctcacacaagtctataacatcaatttaaacttgctcaaactggatttacacctaaaattccaccgaatcaaaatttgacttctcaacacccaattttaccctagaaatggctcttgccttcactttgatcatttgtttttctctcttgcacaacccaagctttctcataactcctaaatgacatttcaaactaggattaattccctttaacctccaaataccattaaatccagatttggccttccaactctcaaagcctcactttttttccactcataacaccacattctcactttctaaccctaggttaaccctacctttcatctctaacagttttccataagcaatttcagtacaccaacatcaaaagcatcatcataaaaaccctaaaactgaatgggtaagcttaactcactcaaacataataagtttagcatgctttcgtcaaatctcttcacaaataactatcacaaagcattaaccaagaaaaactgcccatcatatctcccaaagccccatacccacgaaaatcaagtgagaaagaagtctacccaaacctgaaatttcgaagtcccacacgtagagatgcgcttcacgactccgaaaatgccttccttttgcgatttggagcagaaatggtgaccaaaggttggagctttgttgggcaacaatggtggatgagagaaaagaagaagaaggctgcgtgagagagagggagagagcttctgaaatttggggctgagtgagaagagagagagtgtgttgctttttagtttaaaaagaaaagcttttctcttttctattattttattttaagttatgccacatgtctccatttaagtggagcaaaaggcccacttttctcttgatgtgactcgcactcagtcacaaaaagggaaaaatctgacatttgcaacgctaaaatcctgcctcagtttgcgtgccatttctctagtttcagttcctcgcgtttctctgcaccagtcggggccagttttcgaaagtaagcaatatatatatcaaaacgctcagaataaaaccccgagcgtgattcagaggttggtttcgttaaatttttagttacacgcaaaacgatgatttttagactaattaattgagaattaacctataacaatccagttatggatttttcttccttaattagcctaactcgcgtatcttttcccccaaaatacctacttccaccaggaatatatatatacatgtacactgaataatacttatatatatatatatatatatatatatatatatatatatatatatatatatatatatatatatatatatatataatcattcaaaatgaaccgtttacaaaattctgggtagaatttccaggatgtcacactcctccctattctctacctcttcctcacccttcccttcaacctctctttcttccacctaggtggcaccaccaccttcttccttgtttggcttgacactttcaaactcattcttctctccttctaccaaggccctcttgccctatcacccccaaacattctccatttcatttccatagcttccctccccatcaaccccaaacaacactcaccaaccaaaaacaaccacacaaacaacacccaaaagccaaaatggcttttgctcctaaaagtgcttatttttgcaatgatcatacgtgcttatgactatagagaaaagttgcaccctcatttcatcttagtcctctattgctgtcacatgtaccttggcatagaacttgtgttagcccttagtgctatcccgattcgaacccttttagggtttgagattgaacaacaattcaatgaaccctaccttttcacatcccttcaagacttttggggtcctaggtgaaatctcatggttacccgtattccacgccccaccatatactaccccatataccatattttcatatgctttgtgggtccctcttgtgccatgacaagtgccatcttggccacgttccttgtgtcatggctcatgcatgagttaatatactattacctcacacgtgtgactcccacgtgagaagtcatgtgcttttttgtgcttcacgatgtgcacactgcggtgaagatgacgacaaagaaggtgatgctccgtcatgggtggcggttgcatcgcgttgcatcaggaccgctcgtggtggcgttcttggcggtcatcggaaggtgcctcatacttcttaaattaatttttttttcaaaactattttcttttatcatggattatagtttatttggttggtgttgattaacaaaactattgacatttacacatatataagaaattaaaattatattttacaagagaaaaacaatataatcagtagctttaacattatacctcgaaaaataaaataaatgtgtaaacagaatggagcagttggtaggaaatttttttttcacacactaaaatgatgagtccttgaatcatgattcacagatataagtaattttttttagttgatcataaatatttttaacattatttatataataagtttttaaaaattaaagagttacgtgatattgagaattatattatatttttataatttcttaatgagaatcaaaatgtaaagtgtttttaaaataataatatttgattgattgaataaattaaaatattattttattctaatcataaagattcaaccattaatttaataaataaatcaccattgataaatcaattgtttgtgttgaattattgaaaggttaaatagaccaataaatgagaaatcgaaagaatattatataaattcattatattataaaaggatctctgaaaactataaaattacatttcaaatacgtttataatgttttatatttaaatattttaagtgaatatttaaatcaatcaaataatttatgttgtgatatatatatatatatatatatatatatatatatatatatatatatatatatattgttattgttaaatatttcctttaaatctaaatgcatggaaaataatctttagattaacacaaataatcaacataggaggatcgtgtttttttttcatgtgtgaaattgccttggactaacaacaattatccacagtgagtaagattagtgtcaaccaaatgggttggaaaaaacacttgacctataaaaaaaaaaccatggaaaacacgaggagccacgaaatgatgatctataacaaatatctgatgaaaaaaaatctataagcaacaagaaaacaaaagataaattacataaaaaagccaaatcagatctagataaaaataaaataaaactcaaattataaaacaactaagaagaatcgatagtaagtgtcaaaattttatatattacagtaaatggtattcacggtgagagatggtgagttgtatgggctgctttggtttggaatatatggaaacagaggaactctaacaggaagaggtagataatgactcaccgagaggattatgtttttttagtgtattctgttaggctcttaatactgaggggcaactctgttagaatcatagtgctgggattgtttttgttatggcatgttataaatatcatcgtctccatgcaagaaaggaataaaaaaagcaatttcttctccctttctctcttctaaggaggcattcctggacctcgaatcccaggaggttcactgtgtgaacctaacaaactcgatcgtctttaggggagcaacatttatttgacactcaagttgtgttgaaggacaccatcttttactccggatcatggttaaaaggtattcaaagagtttttgcctactcttttcagcaatggcagggtcgacccaaggctaaggcgatccaaactctattttctattagttgaaattaattattttgtctccatttttatttataagacttttaaaatgatatttattctattttataaaactcaatctataatatttctttgattaattatttttagactaaaaatatccatcattaaatgaagaaagagaatgtattgacaaactattagaccagagagaagtgtaattacaaggataattttaaaaaatattataaacgtaagacaaacttattaaaaaggatgggacaaacttattaatcaatgcatgggacagacttattaatcactcatcataggtggcatgcaatggagaatgtaacattcaatttttcgtaaaataaattaaaaagaattttacttaaaaataaataaatttttagaaaaattatcagatttttgtgattaaataaataaggagaaataattttatgaattaaaatagtgtttgcaaggtaaataaaataaatatatgtctttagaaaataaaaccgacaaacatcatttgaatcgaataattagttttttctaagataattagttttcgtccttatttaaaaattgggtagcgtgatatgatatggatacggtgacaaataattaacattaacaatggcagaaactgcagtgtccttggctggtcagcatgcactttcaaaaatattggaagctgtcaaaatgctgagagatctcccaaaagaagttagagacattacagatgaacttgaaagctttcaagatttcatcaatgatgctgataaaatggctgaagctgaagaagatgatggaaggcgtcatagaataaaagaaagggtgatgcggctgagagaagcagcttttcgcatggaagatgccatcgatgaatataacatctcctgtgaggataagcaacctgatgatcctcgatgtgcagctttactatgtgaggctgttgacttcatcaaaactcaaatccttcgccttcaaagtgcgtacaagattcaggatgttaaatcccttgttcgtgctgaaagagatggtttccaaagccattttcctttagagcaaagacaaaccagttctagaggaaatcaagatataacatggcagaaactttgaagggatcctttctttattgaggaagatgaggttgtggggcttgatggccctagaggtatattgaaaaattggttgacaaagggaagagaaaaacgcactgtcatctctgtggtgggaattcctggggtgggaaaaaccactcttgccaagcaagtttatgaccaggtgcgtaacaatttcgagtgccatgcgttgatcacagtttctcaatccttctctgctgaatgattgctgaggcatatgttgaatgagctttgcaaagaaaaaaaggaggaccgtcccaaggatgtttctaccatcgagttgttgacagaagaagtcagaaaccgcttgtgcaacaagaggtatgttgtcttgtttgatgacatatggaatggaaaattttgggatcacattgaatctgctgtaattgaaaataaaaatggaagtaggatattaatcacaaccagggatgagaaggttgcagaatattgtaggaaatcatcatttgttgaggtgcataagctagaaaaacctttaactgaagaagaatctttgaa

SEQ ID NO: 2285 - DNA, 714 bp, Glycine max
  Intron number 1 from transcript Glyma07g31460.1 (locus Gly ma07g31460) derived from phytozome v7.0 (chr-ID Gm07; pos 36470639 to 36471352 reverse strand)
ccttagacttgtgcattttctgttggcttccaaaggtgatcatcattttttttttcctttgtttcccaaaaggggttcctgtcccaaatggggttccactgttttacatgctaaaggtttggtctttctgtattataagctgaatgctcaaatcagattatgattctgagctgaatctgcaaatgggttttctcttggtagcttttttttatttgaagttgggaggggtcaattcaatagtccaatttttttgatgaattgtgatgaaattggaagattttgcaaactggaataatcgttcagttttgttcggtggtttttgtctttactaagtcttgtgaaggatctaatctaaggtttgatcaccgattgagcagaaaagaagtataagaatgaaatcattaacatgaaaattgaaaaaaaattgacttttattgaaatttctgttattgagtccatgtagttagatttggtttgtcagaattttagtattcctatcccagaattttgccaagttgcagaaatccatggcaagttgaacaaaggcttgaaccatatcagttcaacctattattttttcttgcttgacaaagtgtgtgcttgagttccatctatatctcttggtgtttgcaattcaaatgtacaaatggcacttcacttatgttggaatatgatatataatgcagagtgtggcagtcacatcccaggatcatt

SEQ ID NO: 2286 - DNA, 2652 bp, Glycine max
  Intron number 1 from transcript Glyma05g31700.1 (locus Gly ma05g31700) derived from phytozome v7.0 (chr-ID Gm05; pos 36796715 to 36799366 reverse strand)
ccactgctgtgaccaaccgtcttcagagcacccgggtacaccccgtttccctttctttgctttttcttttacccttttggattgttacgcttcccagcatataaagattgcaacttgcttcctctaacctcttctctttttatattttggccttttgaaataagccaagggtgagagatcttctttggctcatagaaatctaagattttggctttgtttgcatatattggttttattttcttaggttatttaatgtcctctctgacaatttcttgttgatttgttgaagttcaaattaagcttctattattgttcttttcatctgagaaatctaggttgtagatcttattggagtattagtgggttgattgttacagcacccctcccattaaggccactaactgaaaccttaaattggattttaattacctttaaatggtccactgacttttgtggataactgatttgaggtttcatggttaagaaagttctaggttggtaattaatgtttctggttaggaaaagaaattaaattgactaaaatgttttagttgtcatttaccttttctttttgttgaaaggagttgtcatttacctgttcttaagtttttttttttttacgcctgttttgaagttatgaattatgatcgccgactctttctttgtttaggtacagtagacattaaccaaaaaaacgagagtgaactttcaacaatctcccctggtccccttattttgttatgaatttaatgtatgccgcatttgattgtcttcccttttcattttcaccttcaaaatttcgagacatgcgtaatgatttaagacaaaatttagatgtgactttgtaagtatttttgatattgttctctaatcagaattggatcttagctcaataattctcgtactaaagatttctattaaatattaatgcgaattactaaggtgaaattctaattataattggagaacaacaaaaatacctatgaaagtgtatctaagttttttttagtgattcaacattttcatctttgaataaaaatgaaaaactgggttataccatataagactaaataagtctcaacagtcaatctcttcagtcttgactgccacataaaattgtgatggcttgaaagcaaggttctgttgccatttgcttgaggccatcaaccaaagtattcaaatttgacgtttctgttcattcattttatgccacagtagttaccttacctagtgctgttacgtttgacggcatccagtgtgtacatttagttattggtttaaatcaaatatacatttgccttaatattgatgtgaaaagctttattattgtctttaatgatctttaacgccttaaaaaattatactagtacagggtaggtcaaacctggttttctgtcaaggaagaatattaagtatctagtcagaattattactgcattccaaatcctaaatttgatttttctaattgatttattcatatagtatatataactttcagtgagtgattactttttttgatatagtatttatctgtcggttgaattagcatttatcattactctatctgctttaccaaaggacctgaaggatttcgtcctaatttactgaataatgaaattgatgtgggtagttgtttaactactagtactccttttcagaaggacaactaataatttatcttgtctgtattcaatacgttgctggtttttctttcttttttgctagcaagtatttgttgttttaaaaagtgttgaatatcctgattgaaaaacgtattttaagtgataattttggtatgcagctgggacctcgtgcatgttggtatgccacctttgtaaataaaaaaataatttgggtatggaatttaaaaatggtgttgatatggtttatatgagattttggatctataattaatatcgactcacaagtcacaagggtagggatattttttggggggttggagtagtgtgggaaaatatgaatatattgtaatattatatatatatatatatatatatatatatatatatataaaagaacgatttcttattttaaaaatgtaagaatcataaaaagttatgcttgtttatttattcatcttaattattaaaataaaagttaataattttttttcaccataatcaaaaggaaaaataatctatattcattattctcatttgtcgtagtaatcaaatatgcctatctgagtctctctctatatatatatggtaaaaaaagagaattattgttgttgaattcctagatccccaagaatttatgaccatttgtcaactactcggtgttgatttttttctttctatcttcaaaaggaaataatacattctcttcaaactataaatcatacatttatattaatcagtaggaatagatcccctctctcatgacgtgtcatgttttaattttgtgtatatttctctcataagtatattattaaagcataaaagaaagatgggaatctttttgtgtacattgaatctcgagtttaaatattattagatcataggctctaactataatctaatcataacaaaattttacatgaaaatatgcattataatttattttccttttgactaaaagtaaattgacatggcagggagtagagaacacaagtattaaaggtgagatagg

SEQ ID NO: 2287 - DNA, 347 bp, Glycine max
  Intron number 1 from transcript Glyma02g15180.1 (locus Gly ma02g15180) derived from phytozome v7.0 (chr-ID Gm02; pos 13686340 to 13686686)
atctctcttccttagccaaggtaagtttttctattttttttttttacctttcaaatgtgccatgttgtcttgttccttcaaatctctcaaaacatggggtagaagattctatttttgattttgttttaacatggggtggcacgtgaaattgtccgatctggttgcttaaaataaccccaacgaatatgtgtgcttttgaggtcaatgggtatttggcatttgattgggtagcttccttgagatgtaagattctgtggggtttcaacttattcatgtgctggatcaacttgtttttatgtgttttgttatataaatataaaaatcgatttaaaatctgtggttacagg

SEQ ID NO: 2288 - DNA, 2557 bp, Glycine max
  Intron number 1 from transcript Glyma10g33310.1 (locus Gly ma10g33310) derived from phytozome v7.0 (chr-ID Gm10; pos 41699719 to 41702275)
gtcttcaaccgggtaagcattgcaatggctttgtttttgtttttcttgttttgctcttattcaattgttgaacacactagctacttgtgaggatttagtttagcaacttcaaaatcagtcatacattatccgaaactgtaaaagggctttttttggatgttttagttttcttgtaaactttgattctcttccatggaatgtgagtgttaagatgttgttgttggagtttacgcgagtgttcgggatagagctattagaatgagaagtatgttcagattttcaaggattaatttagaaagagattagtaaaaaaaaaaatatattcaaaattttaaagatggttctagaagaggaattagaaaaatgagacttctattcacgatttcaaagacgaataagcattgttgaatttatatgctcatttctgatgaatgtggtatgaagccattgttgttttaattccttaatactaactttattcatttagcaaaggaaaagtatgaacatataccgtattttgggttgtaggtggaaattagagaaagattgagagaaatttgatcgatataataaaacgtaaaaggaagaaaaaaaaatgaaaatgaagtgaaagaaaagttaggtgtatgttaataatactaacattttagcctaaataacgtatacaccgctgactggcctaaatttgcttagataatagtattttgcagaataccgatttgtactttgtagtgttgggtgatgttagccacacctgaccgtcacttattatattcccattcaacagcatacatgtcctatttgtgagcattcatttctccatatgtattcacatttaatttcggtttcttaaaagcttttttttatactaacgccttctaaaaattaatgtcgaattaattaaatattaattgaccttttgaaaaaataaatattaattggttagaaagaaaatctttttttctatttaatatttaatttattactttaattgaccatttcaaaaaattaaatattaatttattataaagaaattttatgtatcaacaactataaatatgttatcttacttatatatatatttttcaaattttgatataaaaataagaaaagtaatataattatttacattatttcatacacaaatttttaaaataataaaaatagtattcttataattatcaatgaattatgaaatactagaagatctcgaatcaattcaaacaaactctccaaaatcagttcatatgaatgtttttattcaaaatgattatttttcatacataatcctagattagctattacaccaagagaccaagtattatttttcaatcaatattagagttttatttaaataatatttaaaataaagactaatataaatcaggaaagtaaaagtctaattttattggaagaaatcaaaacacccacgtgagaaacgtaactatatggataaaaaaacactcaccaaactatacttaagttgttcacctaactttactcctcaatgggccccacctgtggtcctaatgtttacttgtctagtttctatcgggctctgagattcgtttggacctctagatattgtgaactcgagggactgaacattagtactttgagtgctttcagtaaggaaaattataaatcgacactctttatgttagttaatacctagaaagattatatatatatatatatatatatatatatatatatatatatatatatatataaaataagtgatatgatatgataggaagaaaaataaaaggtgttaattggatataaaaaaaatagaaaatatattttgacacccgagtgggtagcacttgagagagacgaagaaatataagtgattgataatattgatgatatgatctaataggaggagaaaaaacaaagaaatgagagttgttgatagggtgtttaaaaattttgggtgtcaaaatcaccactcaacaaaaaatataagtaaaagaaaagaaaagaaaaagaaattgtcaatctgtagcattatataacccagatggaaagctgtttacagtggtaaaaaataggtgatagaatttttaatatgaaaatggtgtatatctataatgtagcattcctcttgatgaaagaatttgattaaggtgatgctcacaatttttagattcacaactacagatttgtctacatttaaactttattgtgaaataaattaactgcttaaaacttaatgcagtctcgtcaaaagttatacatgtagggttgtttattattattattattattaaagcaacaatgatccacatgaaagacctaattactagtttggattttgtttaaggataaataattgatattctttggactccaaaaaaaaaaaagacatagtcatagacacaaccacatatgaagcatcagtattattagttaaaatgttaggcattgaatgcattctttgtattttgaaactgattgattttatatcatgaaatgattacagcagtgtttgtgaggctaaatatttactgacaatgtaacatggattattgaacaggtcacctatcctaat

SEQ ID NO: 2289 - DNA, 1979 bp, Glycine max
  Intron number 6 from transcript Glyma13g24030.1 (locus Gly ma13g24030) derived from phytozome v7.0 (chr-ID Gm13; pos 27380017 to 27381995 reverse strand)
ctgaggtaaggcagcttctgttgagtgttggctttgtatactcaagttagtggtagaactagaaataatacacccgaatccagataatatttgttatcaagattttgtgtggttggctttgctaatctgctgtactatgaattaattggtgttatttgcctatgtttttctctaaatatggccaaaagaaatcagagtttcacttgaacaattatgacaattcagctatattagatgtcttggattgagtgaaaaaaattaacaagaatgagatcaataaatattgaagagttagttgatgaaagaatataaagatgcatctttacaagtatttgtttctcattccctattagtttttttatttatgtggttcttaattttgttatttctagacatggtcttttaccactatgataaaaacaatttaaagatgtgcctttgatacaggctttggtcctcgccatgatcatatactgatttttctcattaaaatttaatttggtttgtgaaaattttctttccttcagtgcttggatctttagattatgataaacttttcagagaccacttactgtagattcttgattcaatgtaattagactctaattatttacatcattttagttgatttctggaaattggtgcttgggtgtatagagattttttagttagattttaagctttgaagaagttatttgggattatcataatttggagcataaatttccgttttttgaggatttttgcagttctcaagttaatcttcctgcttaacagagaagactgctataattactacccagatatctgtaaattctcaacctgaagcttcaggcaaggagttctctcagatcaaggatttcttccatagaaggaaataaactttcttcttttaaaaattgcaagatcactcctgccctttcaagcttaaaaacttcaaggtctggtgccaagtgtaatacttccttcttctgtttttctctttaatttcatgcagagactgtttaaatgaattttatgttatctcaggagctttggagctaacagggttctaacaactgctttacaccaaaaagaaacaaactccctagtaagctctggccaaagcatggacaaatggggtattacaacatcaaagaatgaccattctattgacagcagtgacaatcagaagtcctcaaccccatttttgaagaggaaaactattgaggtttgaaatttccaaagacttttaccttttgaagattgaaggaaaaaatcatttctcaaatgatttgacactcaccatccaagacctatacttgtcacctttattttttttaataaagtcatatctgcaaacgtcgtcattcctgtctcctgctaagtacttttggtgcataattcttccccttgaaccctcggtccacatccattcacatagctggatgaatttttttgtttcttcaaagaaaaaaaagaaaagaaaatgaagaacataaaaataacttcataactttattactctaatatgaatatatggtacctttgtgttcaaacgaatcatcttacagaaattctttgaacatctaaaagactcaattccacaggcttctgatgctgattttacattgttgaggcccctaaagtgcatctcccagtcttctcctagtaaaagcaggtcctgcagaactaattgattgctttaatttctcttttttgatagattctgtagtttcttttattggtacttctggaaaagtaacaattcttaactgcagaagttctaaagaatcttcagaagaagttgttggagaggtacataaccaaagcttggggattattatatctgatgtattgtcatatatttttgatgattgctgtttactgataaatgcaaggagacttggggatatttaagtgtgataattgtcaatactagattttttctctctctccatattacccaaatttccttccatgaaagtcaggtagagagt

SEQ ID NO: 2290 - DNA, 1168 bp, Glycine max
  Intron number 1 from transcript Glyma06g02370.1 (locus Gly ma06g02370) derived from phytozome v7.0 (chr-ID Gm06; pos 1578811 to 1579978 reverse strand)
gccgtgtggttgataaggtaatctcagaggcgcgttcatgcattagattctaaagctgtttttacttccgttttgtgtcgtactgcgagcaattgcaattacgtatatatgaccagctctgtttgtgtttacgagcgtgtttggtttctcttgaaaagaatttcaaagttaatttgaatttgactatttgtttattgagataaatctgcatgtttcagtcctggaagatatactgtttatgtgcggtttatttatgaatatgaatgtgatttgtgtttagaatttagaaaatgtttccagtatttagctgatgctcacaaattggaggcgtttccttgcggtaatgatagcctagttgaaattgaaactaaacctgtaatgctgggtttttttgttgcgataagagacttcaagaaaccaccattacttatgatacgtaggtatcacgatgagtagagtttagaccgggtactatactctagtgttgttcatggccgctatggcggcgttacagtgctatcgcatagcagaatttcttgaatcgcgattgagacttaatcaactattgcgacccctatcattgttgtggttgtggcatacgttctgcatcctcttgtcatgtctggcgggtctccagccaattgaacttttgagctaatattatgtcaatttttatccatttatttttatttgcacacaacttaaatttgtatacgtatgacatatatcatatagttcaaccgttatgtgagttccgctatatgcctgcaacactatatgatattgcgggttattggctttcggcaattatccgcaatccgtaattgataacacaccagcatactccaatctcgtgtttagagaaaaaaaattctgtgaattcatatccacacaagtagtaaatttagtgtccatgcttgtaccctatgttgacttgtataccaatattcatttcacactcattacatgccttttagttaaatgaactgtgaggatggcaactcttgattaagtaatcataactttttttcccatttgaaataacttggttcctttgttatctcttggtagcttttaacagtgctcggtcttcctctcttaatttgtgttttagttgcacggatcagtgacatcttttaattgatgatccttgagcaggtttctttca

SEQ ID NO: 2291 - DNA, 1522 bp, Glycine max
  Intron number 1 from transcript Glyma10g34890.1 (locus Gly ma10g34890) derived from phytozome v7.0 (chr-ID Gm10; pos 43036978 to 43038499 reverse strand)
cagcccgataaacgcttccaccacgccgccgttaggtttgtatgcctccttaatttcattacttttaactctccttgatcgatgttaatgtgcatgtgagctttattaattacactttggcctaaatgtctacgtgttgcgacaatttccacatgcatgattgattttttgcgtcaagcttaattaggataatctaatgatatgcatattctttttatcaacaaatattagtttatgacaaatatattggtggaagattcttttctcaccccttttctttcattcttaaatctccattagattaacctttataatttcttcagattatagatatgtatattgtttcccgtgtttgatttctagactagagattttgaaattttagatgatcaatgaatatggtgcatgcagaaaatatataatttcatagaatgactaatttcttactaatactttgttatgctatataattaattaaatacgtgaggttataaatagaaacaaacttaatagctatggttgctgtctgagatgttgtttttttgtggttgtaactcaattaacattggcatgtgttggaggttattctttcctctagttgtgtttcttcctagctatcaccgctaatgtaaccaaaaggacaatgtttaattaatacttggtgatgcagtttcggataggtccttggctttgagttgaattggcttagtctgttcataatttcattgactgtgggccatcagattcaattcctgtctcctctgatgcctttgattgtgagcccacgaagtcttttgctgtgtccgtcgtgcaccaaataataatttagtgccacccccacttaaccagtaaccattatctgaatgctataataatattaataataattccctatctcgtcgtttctgaatttctagagatttaattatttttcccttaacatgcacgcttttttaatcttgccgaaacttggattgggaccttcatactaaactattgcataaattaactaatggagcaaaaggtttaacttccacaaaacgacgaatcacaatttaaaattttaatttgttgtgacttgattgccttggtttacatagaagatacttgtagataaaaataaaataaaaaatgattgccttggagtatatattgaaatgcaacttacgggctctaaataggaatggccataatgcaatgtaagctgtaaatttataaagcaatatatagtggttgctttcttgtcaatatttaaggacactatcatccttttcatttattttttcttctgaaaaacaaaattttatgacgttttttccctggtcaaattttaaaaataatggctatgattattcaaaactggaccccacataacctaattattgaagaaatattgattgtaataaaattatgatgctgatataccaaaaataatatgatgccgataatataacaatttgactattttgttgacttggctgttaaaggttctacgcatctgaagtagtggttgcgttggagt

SEQ ID NO: 2292 - DNA, 3532 bp, Glycine max
  Intron number 2 from transcript Glyma07g24950.5 (locus Gly ma07g24950) derived from phytozome v7.0 (chr-ID Gm07; pos 27389866 to 27393397 reverse strand)
aatcttggactgggactatcatcggtccccctagtgtaagttgctgtctgttatttttgacacattggaatccccagctaacatccctatttgcttctatgacaaagtaaatattttgaatttcagtgggggcttgtttaatatatctttgagtaatatgttatagattaataatcagtaaattggtttttttgttctttagacatagacatgtgaaactctggcatatatggattcaaatgttggatgttaaattataaataaaggttccatttgtataaaaacaatacatattattaggtcaaatatatagaatttttagtaaaaccaactccaggtttagtttactgatatggtgctactcaatagacgtttgcattttgtatttcgtacaaagtttttggtgggctgccatttttagtggccggagagaacatacctatgttgtggccaagtctctaaaatactcagttgtatctctgtcttgggacctacattgggcagtgctgagaagtacttgattcagtaacaggtcttttttctactagtttctatcattttaccatctttttttctcagcaagtactactcctattttatttcttttgtttctgatttatctcattttatgtgtccattaatccatgcaacatcctcatctacataacgctttttttgtttgctctttacagcccaccattgagtcagtaccataaagcatagtaggttttattgtatggttatgtttttcttttagcttgagaagcacctttccatctcaaataacaccttcctttcatctgcccagtatgaaatcctataatttttacatatgcatatataaaaatactcttgtactaacgttaaaatactcttatttacagatgtttaggaatacccccattccattaacattatataatttagaaggatgtcaactgccttgtatattttcaaaaaaagtttgatactaattctaccctctcatctaagcccccaccaattttcttgtttgactcccacttctcttgttgaccaatttgtaaccttgtcctcaactgaaaatcttctctatttcaatctttctctttcacattctttctctttgctttggatggaataaagaggttgcttgaagacattatcatggtcaaatttaccaacagagaatgacaattgattctaaccctttgtcttccttttatacaccttccattttctgggttcaagctttatcagtggtgatcaagatggatcatgaagttgggggaatctcttgctgcaccagaagagctttcaagtttaaactgaaatagttctttcttcttcctgagcttctttgttcttatgttttggccttttggatattatgattgagatatcatcaggttgctgagtttttctatggttgcaaacctttctgcgaagtgatggtaggatgaattggatcaatcacgaaaacaaaagtaaacaaaaaaatatattggactattggagtaattacaaatgctagcaacacatcctttgacacatttttttgaacactctactactggctgaaatttattgaaattcactcaaattttggtgagtgccacttatcatataatgaatttctctcctaattttgtagttttcaataaatttctactaatgatggagtgtgtgttagaaggaggttgttagagtgtgttgttagcactcctcttagagtaatacttgaatgcagcaagattttccggtgtctttgcacctgaaataccaaaactcttgaaacagtcatgttcagaacatgacatagaagcaaaaataattcttctcaattaaatgtggaaagcagggaaggggagaaacccttttaaagatgcaatccaaccacacacaccatataactaccaaacctgaactcctgtagaaaacatcagtgggtgcttggtttaagaaatatttttctatttttattttctgttgtaacttttaattagaaaaatgtcaactatattatttttttgttttcaaagatttgtacaggaaacactaaaaactattttttattgttttgattattcctatataaactgttgaaaataggaaacaaagtgaaaataagataacatttttttaatgaaaaattaaaacagaaaacatttctcaaaccaaatacctacttagtctctttttatggaaacctttatattataccattaaaaaatgtagagtagtgggacaaatccaatgttctaaaattctaataaagcttgttgcaaagcagcagtagtcatgagtaaggtaagtttttcaaacttgcatgaagtcatttgacacatttgtaagaatcctgttatgtacttgtagttgtatctaaacaaaatacttacctaagagtgtgctttggatttccaaatgggtatgtcaagcacgaattattgcaagagtgaggtaacgtatctggagaaaaagtgaggtaagttcttcaaatttgcatcaacttgtttgtgctaatccttttaagcacttccatctaaacaaaagacttgacctaagagggtaatgagtttgttaaggataaatcatgtaatgcccggagtatacggaactgaagtaaaaatttgcaggagctaaacactagaaaatccaatatccaaactcatctatccaaattggttcagagtagtcttaagtaaaatcaaaaggcattttgagtttacttgtctctctgtcatttaaatctgcaattctgtatggaaatgaaaattccattttcaggaataatcttaaattcttgattagaaattagaaatttagagtataagtggataataggctgattatgcaaagtagacagatggaacaagaaaagtaaagtctctgaaaaggaatgcccatacctaaatgtccacccagaacttgatagcattaacatcacccaaactgaaagaaatcagtcgtacaaagaaagcattcccttgggaattaaatttccaacttccaagagttagcatggatagctgtggtgcttggtttgcaatcatttctgatcaaggccatacctgttctgtaaaccaaaactatttaactcctagagtattgttttgaccagataaatatgtcttatgattttctattcacatggaattgattttcaaaacttcaaatattacccaaacatcatgattcttcccacaattaggcttacaatgaaccttgtaagaaaaagctttgctggtggttgtctcacaacaagtgatcataacatggaaatgtttttgatgaaataataaaaataataggtgagataatgacagatattaaatgaaaaataaattaatattcaaaataattaaatatcttctataagggattttcaaaggtgtctcactttctagctgctaagcaaaactaaaactagtttctactaaataatatattgatatggcctgtttttcctgtccatcatgttattttaccagactgttcatgaagggcgtatctaccagttgaaattgttttgcagcagggattatccagacaa

SEQ ID NO: 2293 - DNA, 7220 bp, Glycine max
  Intron number 2 from transcript Glyma12g00260.3 (locus Gly ma12g00260) derived from phytozome v7.0 (chr-ID Gm12; pos 28169 to 35388)
caaggtataaattcttccttctctaaattttttttattgtgataacgtgcaaagcatagcaacctaaataagaagagaatttttggattggcattggcttcttatgagacgcttttatcaaatgtgcattagtaaaaagtaaaaaccagctatttgtggttctttctatcgattgttaaacagaagctgcggaattgccattttctaacaatatactataatatggttatggcatcgtgtaattctcatggctgctgcagtgatagcaagaggtatggtggggaaagcagtacttattctttctttttgacacaacagattctgattgttcagacttcgatgactattcccttgcattcaatgttctttaaacatggttactacaagtgttctcacatcttttgcaaactcaaacccatgacttgaatgagacctctttgattgaacacttctaccaaattttgtgacagactctgctgtgaacaactgttttggttttctttggtaacctgtctattttgagtctcattctttgttttcttctttttctccaatcatttcatctgtttccttgtctgttctctctatttttctatattctgtaagatacactctactcctttgttttgtgtgtctatctattcctatgtgttctaagtctctacttctctttgttctctgttctgtcctttctgatttaggatcagtggttctctaatagagttttgtgaaagagagtgattgagagtgaggaagatattattattcaacctaattctttaatcaatacatgctcggtttatatacagcttgacaaacataacagaactgagtaactaaataactgtagttagttagttaatacagttgtttgcagctgtaatgacagctgtcaactgttgtactaagtactaacaaaagaaaaataaacccatcagagtaggtatactctaataccccccgcgagctcatgaggggttggctgaaagcttttcaagcactctgagcttgtctctgtaggcagaaaaggtggaaggtgtgagcttttgtgaggatgtctgcacactgatcaacatcaggaatgtgaacaacttgaatcagattagtgtgcaccttctctcgaacaaaaaacagatccaactccatatgtttacttcaagagtggagaacagggttatgagccaaagccactgtacttgtgtcacaaagaataacaggagaagcatgagagtccttgagttcagaaagcagagacaaaatccaagtgacttctactgcaactaaggtcatgcttctatattcagcctcagtgctggatcttgcaacaacagtctgcatcttggaccaccaggaaattaagtttggaccaaggaagatagctgcaccagatgtggacctcctgtcatcaggatcagaggcctattttgcattacagtaggcatgaatggagaaaggatgcttggtggaagccggctggaacattaatcccaatgatatggtacctttaagatatcttaggatcctcttgacagctgaccagtgctgttcagagggtttagacataaacgggtcaactttattaacagaaaagcaaattttgggtcttgtgattgtgacatactgaagtgcccctacaacagacccatataaggtagggtcagagacatcttcagaacctgtcttagtcagtttgcagcctccaaccataggagaagaaataggtttttgattcttccatgttggttttggttgagttcagacttctattctcaaaaaataatccaaatcacctagatcctttatggaaaaacagcattcagtttggagacaagggactgaatgagattggaattgcttccaattatcatgatgtcatccacatagactaggatgcaaacaacagaattttgctcagaatagacaaaaagagaaggatcacacttgctggaggaaaatataaactgtaggagagtagcttttagtttatcacacttgctggaggaaaatataaactgtaggagagtagattttagtttatcaaaccaagctgtgggagtttgttttaagccataaatggcttgtgcagtcaactcacaagctgcttgttggaggattcaaaggctgagtcatatagacttcctcttgaagggttccattgaataaatcattcttcagatggaaacccttggcaacaagcctgtctatatatttattgagtgtcccatcaggattttccttaatcttgaagactcatttgcagccaatagctttccttgaaggtggcaagtaaactagagtccaagtgccatttctgagtaaagcatcatattcacagtaagccatgtgggattgttcagggcagattttgtggttttggactcaagatgagtgagaagtaatatagggttgagtcttggcttaacaatcccagatttagcatgagtacacatggagtgtacactgtcaggtctaacaatggaaggctgtgaaggagggtcgaattgaatagtatcaatgactgatgaagtttcattgagattggaatggatggttcaggttcattagctggtaaagatggtgaagcatattgactgtcaaaatgtgttggaagtggtgttagaagaggtgttgggatagtagaatcatgaatagtattagtggtcggaggatgtaaagtaggttgtaagggtgttgggagagtaagagttgaggttgttaggtgtttctgaggtgagtaatgagggattggtaaaaggagttttgtagggaaaactggacttgttaaaagttacatctttggagatgtatattcaaccatcagcagcaaggcacttgtagcctttgtgagaggtagagtagcccaaaaagatgcattactgagacctatactgcagattgtgcttgttgtaaggtctgagcagaggaaagcaagaacagccaaactccttgaggaaactgtaatcaggtaatttctgaaataagcttgggtagagaacttcattgttgatggaagaggagggaaatcagttgataagataaacacttgaagtgaaggcatggtcccaataatgaaaaggcatattagcttgagagagtaaggtaagaccaagctccactgtatgccaatgctttctttcaactacaccattttggtgatgggtgtggggcttatcaatctgtgcaaaattcccagatcattgagaaacttggtgaagggtctgaactttctactccaatctgaattgacagctttaatgggaagattagactgagtttgaatatagctttgaactgtttaaaaatctccaatgtttctgatttacttttaagtatacctaagtaaacctaccatgagcatcaacaaatgtaatgtaatacttaaaaccttaaggaggaggaacatgtgcaggaccccacaaatcagtaaatatgagttcaaagggttttgaattgacagatttagatcaagaaggtggaagtctatgaaacttacaaccacagcaatgattggaaaaatcagaaacatttttattgattggtggaatattacagattttaaagacaattttcatagcatccatactagggtgtcctagtctagaatgccaagttgaaaaggaaattgaattacaagctgtatttacaataggaacaacagaagtacttttattaacagaaacagactgaggagtctgaggcaccaaagattgtaaagttggaaattgataaagaccatcatgtcccactaacccttgaagaagtatttccttagtgtcctgtgatgtaacaagacaaaaagaaaaatgaaattcaaggaaaacatcattgtctttgcaaatttgactcactaattagttttttagtaattgagggaacaaacagcagattatttaagacaagagacaaattaggttttaaaacagagggaaaggtagagacacctgaattgatgttaagtccctgaccattaccaatagtaatttggtcaggaccctcaaaaggagttaactgatgaatgttttgagacatattggtgacatggtgtgggatgcaccaaagtcaagataccagctctgtgagggagattgagcagtgctggtgagataagcctgaggagcagcctaacatgtagaactcaaaggcaaagggttgggtgaagtgtaaggaagctaagtttggtataattgaagatagacaaactgtggtgggaacctgcatgatggagtccagaatggtgcgcaccactgagctggtgcttgagttgtggtagaggcaacaagagagcccatcagagtagttatactctaatattcccactcttctatttgttctcaatgattcttgtagtgttcaggtcaaggatcattgcagactactaacaaggctggtccagagtggaaatattgtcattccttggaagaaaataacaggagcactttttgtatgtgattcatgtggaaaaatttagctaatgttatgacaaaactagtcaagtaactgtgttaaattcttgtatatcctctccattaataggtttagttttgacttagttggatactaaataaaataactatgaattcaaataaggaatcggctttctaattagtcccttattagcttttgttcttggtgtattaatgtagctcaatagctcattaaagaaattaaattcattaatataaattattaagaagtgtagtttctgtaagcattaaatactacttacatatcctctccattaataggtctagttttgacgaagttggatactaaattaaataactatgaattcaagtcaggaattttttcatctgattaatgctggatcattttaagtgaaaatctattttatttaatagtgaaaccccttccaattccattgttatttttattaaataaaacttgtggttctcagaataatttcatgcagacttcaccaatccccctgtatgcatcagttggttaaacatttgtactgttgctagtctttctgaaattatataaactagtgtctgccattttattgagcattaaactttgtatttggttttactttggcctgaaattattttatattatttcagattagagatatccgcacaaaaaatgctgtcatatcccatctattggagtatattgactaccctgatcaaagtatgtttttgctatgttttaaattttcaactagaattccattagcttatttattgaataaagttatatgaatgttcttatgcaatttggttgatttaaacattttattttcttgattgagtgtaatatagttgagtcattcaatattttacattccttctttgatgatgttgaggtttatatgaactgtcataagtttgataaccagagagaagggctcagtgtagtcaaagctgggctgttggtgaaatccctttgcttccagtcaagccttgtatttgttggtgctgccatctgggttttccttgaatctaaagactcatttgcatcctactgcttgtctatgggcttgaagaggaactaaggacgttatattgtagcattactttgcagattctcatactctaattgcaaggctgcttgccaaatgccaatagggatccgtaagggcttgtatcattgtttttggttttgcatattctagatttggagcgggtatgtgtatgggaagtgtttggttgtctaaatacagggcaaattttgtaggttggaatgggtgtgctaagcattgggagatgataaggcaagatggatcatggatgaggcaatgctctttgagctggagtggctaaagaagaggaggggatgttgttgttgttgaggtgtgggaatttgttggaggattggtgtgaggagtgtgtagactgtagagtgtttagtggaatctatgatggggatacaaaattaggtcagggggtgagaaagaggttaggatagggaattgaatgcttattaaagataacatctttggccacaaattatgccctaagtcatgaacttgtacctctgtgatgctgaatattccaagaaactacatctctttagagtaataggaccgtttcttagggttataaattgaggaaaggaaaacaagcacaactgaaaattgagaaatttgaaacacagcgttcaattgaacaatatagtatagggattattaaaatctaaagcagcgctaggaaacaatttatgatcctaaaatttaaagggcaagcctgtttatatgcttgtgtttgtgctcagctgagccattctggtggtgtcactgatttgtgtgagggtgagtctgaatgatttctgagtcacccagtaagagccttagaaaaaggtctgaactctaatcctgatttgtctggatatgcaatggtggggagacaagaagggttgacaattttctctatgaatattaaaaagtgaagataagcatgaaaagattctataggtgtaggtccccacaagtcactgataacaaattcaaaaggtttacaataaacaatctaaagaaagtaaggaatgtatttttgagctttaccgaaacaagaacgaaactcatttaactttattaagcaatggtatattacaaattttaactactagcctaaggcattatatttcggtgcctgactctacaatgtcaagtagagtgtggactaggagctagagatgctactgaattaaaaaaaaaatagaaactcctagtacacagattctggacacagaacagtgggtgcaattaaggcaaccccaaaagcacacctctatgaactatgaaggaggataggttcgagatgtggaagcaaagcccccagatttgggagctctggtaccaacttgaaaaacttgaatgatttttgaaaggaaatggctaaaattttatttcttactcagataattacaatggatgattactactcctatatattgatcatatttatttttgctgagcaaaaaaaaatatagatcacatttaattcagaaatttcaaaaggactaaaaactgttgcaattgttatgcttttcaacaccacctttatcattcagagttttactcaaaagtaagtggtattggcacaactaagtgcgcaggtgattgaattttgtcgcaaacctgccaagaatggagaaatccaactacctgtgcaagggtaataattcatttgaagttacaattattacactacttgtttgcagagccaagttggatcaagttgtatcaaaagcctcta

SEQ ID NO: 2294 - DNA, 5879 bp, Glycine max
  Intron number 1 from transcript Glyma10g07880.1 (locus Gly ma10g07880) derived from phytozome v7.0 (chr-ID Gm10; pos 6681167 to 6687045 reverse strand)
aaggccttaagttttgggacctacggtgagtcttttatttccccctaatttttttttgttactttgttatcttatttctttttagtttattttaaacatcaatctttaattattatttttcattctatcttattcttaaactaatgtaccccagttctagtttctatcttattctcaattagaataaattttgtatactacttaaatggatttgttttgaatgacgttgcaattgtattataactattatgcaatgctacaaaacttggctcagacatgcaaaatggtgacccaatcttttgaatggcttgagcagcatgtagatttgtcacgtaaccaaaccaatacaaattgtgagttggctggttttgaactaactctcatgtggccctgataatggaatctggaagtatctcaatctgaactaaaattcttgtttgtttctgcttctcactgacaatctcttggtaaactccagccatatttggcacttagagctccagcaaataaccaatttggggggtggatctggaatatcgatatgctatacgaatatcactggatctaggtctgaattataattcttgatggtttctgcttctcactgacaatctcttggtaaattccagccaattttggcatccccttagagctccagctcataaccaatttggtgggtggatctggaatattgatatgctatgctaatatctctggatctaggtctggcttttcaatcatatggagacagccaaaacaccagaacacccaacccaacaacatttattaaaaaatcagagttatataggatgtacttcagtcatattgagtttatttttattatcgagtcatggtttacataaaatctaagtttatgcatttttagtggggaaaatttatacaatttgaaattaataaagaattaattattaactattttcaaactatcacatcatttaattaattattaatattttcaaactttataataaactgtcaatatattacatgataatatagaagtgacacttgagacttgagaggcaaaacatctgtctcagactcacatcttaagcaaaggataatgatacttggtttagcactttactgaactagttattgcctttccattcactataaagctaaagcaattacaacctagaagctaataaccagcattattacaatttttgctctagttttacaagcctagctcaattcaactaataacataagaaccttattattctggtaatgagactggcaagatctagtgtgtgaatgggcaaaacaagtctgggcttgaccagaatgagtgaggcagtgagcaacttgatctggagaaattttggctggaaaagtagtgggaaagcactgcataatatgtgatgaatctcccgaaactatatgacaacaaaacagagaaacaccaaagaacttctatatattggaaactccagcggaatatgttaggaagtcccacatcgcctgcctcggttcttggggtgcaacttatatatttgttaagcaactttacttagtgccaattggttttaagttgaaatctaacagaatagtgattggatcaggtcacagaagattactgcactaataccatgtgaaaattgtacggttttgttggaagtgaaggtaaagatacaaaggaggctctcaataatattcttagtgtatgctattagtttttttgctgtccgaaatcacaaaccatgatcaaccacaaatccacgaatttgaatgatcacggacaatatgtgtgttaccactgtctttaagaacttgtttgtgtgatgggcaagttcctgggatataagtataacaggctcttcccaacaatggttggggcaatagaactagtaagttttatagtgagaataattcaggaattcacataggaaaaaggagaaagaaaaaatgtgggagaggatacatagaaaaccatttgaatatttatgatgaagaagatagagtttctacaactaatcgagacgaagtcaaataaaatatctagtttttatgataaacactaaattaatttaaaaggtttttctatatttaattaaatagaaatgttaaccttttttagagctactagtgagcatggtagtcaaaatcacgatgttacctcttaaggttgtttgatgttatgatttctctggcctgaatgatcctgatctgctgctgatgtgtttttgtgtgattggtaagatcaaatgatcttcctcatgaaattgtttaattgagtgatctttccgagcatgcagaaatcttttttttttctaaagaggaaaatcaacccatttttgtgacccgtttgatcaaaacacagatcatttcatatttgttcatttttggctggcctcttcgtcgattttctgctcttctgcacctgacaggccgtctagttttgactcctttgggtttgtttgcttctaggtttgtgagggttggacccaactgatctctgttcttctttctctgtatgggcttgttagcttctggtcattttttggcttctgtttgggacattggttcaagtctgttttatttatttatttatttttttggggtgggatcaaggatcactgtttcttgactcttttgatctctgttttgggttcaacttcactgatatttattttgagttttatgtggtgtgtaaaacttgtgtcttttttatatttgaaattaagttggggcttgttttatgcattctctgtaagtttacttaatttagtagggattttaagattatgtcttaattatgttattttttatgcacatacacacaatttacttttgtcaccccattcttgatcttaggttggatctcaattttgataaccttgtaatgagaaaaggcttttgatcgatgttggttgtatgttttagagcagtactactattaaataggactagtaaaagtatccttacatgtggttatgatgcatgtttagtataacattactattgctttcctttaattcataatagcttcattatgaattaatatgatagtgattatattgttttcctttgttgttgaacacgatggaaaaacctttttcctacataaaacaccttttttggggggtttaaccagtgagtgaccaaaattgcttttatttgaaaacaatttattttaatatgctgcagaagaggtcctagaggagtaataggtatttggagttctcatcagtcttattcgcagaaagccattaattcgctatatcatatagcagaagtcacatatcggttgaaatatatgatatacatcaattatttatgtataaaaaattaagttgtatgcaaataaaaataaaatacttaaaaattggcataataatataaagttcaattggctcgagactcgctagacatgacaagaggatgcaggacgcatgccaaaaccacaacgatgatagtgattgcaatagcggacagagttgcaatcatggatccaagaagtgatcattagcctattacaatatgcggatgatacaatattttttggggaggcgacaatggaaaacactaaggcaatcaaatcaatcttgaggacctttgaacttgcatcaggccttaaaattaactttgcaaaaagtagttttggatcaattggtatgccggaaccgtggaagcgaagtgcagctgatttcttgaattgtagcctgctgtccatcccttttgtttacttggggatccccattggggacaatccgagaagatgtcagttgtgggatcctatccttcaaaagtgtgagagaaaactagcgaagtggaagctgaggcacatatcgtttggggggagagttacactcatacagtcagttctaacttctattcccatatattttctttcttttttcaggatttctagaagggtggtggaaagactggagggtattcagcgcagattcctatggggcggtggacctgaacaaaacaaaattgcttgggtcaaatgggagactatatgtcttccaaaagagaaaggggggttgggaatcaaggacatcaacagtttcaaccttgcattgcttggtaaatggaagtggagcttgtttcaaaatcatagtgatctttgggctagagtgctggagtcgaagtatggaggatggaggagtttaaatagagcatcaccggattccaacgactctatatgatggagggatttgagattggctctccaccatccacaacaagagatggcttttcacagcggagtggtgtggaaggtggggtgcggtgatcgaattaagttttgggaggataggtggatcgatggtgagtcaacattattagccaagtacccgaggctatatctcaactcatgccagcagaatcaactcattcagcaaatgggagatcataaagacacaggatgggaatgggatctcaaatggaggagacgcttgtttgacagcgaggtatctatggctgacactttcctaaatgaggtgggatgcatccgaatccaacctcatagtagggatgattgggtctggaaactagacccaagtggtcaatactcggcaaaaagcgcttattatgcattgaggggaaacatcatagagggggatgaggctgcagattttgaagaattatggaagctaaggatcccatctaaagctgcagtttttgtttggagattaatttgggatagattgtcgactaaggtaaatctgcggaggaggcatgtggaaattaatgacttacaatgtccattctgcaggagattggaagaggatgcagcacatttattcttccactgcagcaagattacacctctttggtgggaagctttgtcttgggtgaacatcctcactgtgttcccgcagcacccaaggcagcacttctcccaacatatggctgatagggtggaaggaattcggggcaatagatggaggtcttggtgggtggcttttacttggactgtgtggcagctgaggaataaaatcatattttcaaatggcacttacaatggcaacaaactgatggaggatgctatattcttactttggtcttggctcagaaattttgagaaagatttcgtagtcccctacaatcattggtcatctaaccttagagatgcttttgttattagttgaggatagaaatcatagttagtggtagctatactatctgatttccagtttggttcccatcgagactgctgtgtagtctggtctttggaaccattccactgaattttattgtaatcatggtacccctggtacttggattcatttcacacatatatatatatatatatacttatctttgctgaccaaaaaaaaatggatccaagaaatttccgctatgcaatagccttatagaggctatttagcaacactggttttcattgactgtagaacctagctaaattacttgggacacttccctactttctgccctgtagtaaagttgctttttacactttatagtaagcaaatattgttctctccaagaaccttgaacagatgaaattgtgacttgtgaatacaaagatagatgatacatctgtcgtatgagcatcctcaagaatttgatctcaattcatttgcattcatagtgtgagcaatggggcactgcatcattagtcaaccatagaggcaacactttttttttgtattgtctgtatgttcgtgtgtaattagctttgctgtttccatcattatagaggacaaatatttgtttcttatcaattatcatgtcaaggtgtatgattacttgtttataggcaacagaggaattaggtttagcctttgagtctgttaaacttgtttacaatggtttgctttatgcatggcaatttgtttgtagtaatccatttcgtcctttgaggagcctcaatccta

SEQ ID NO: 2295 - DNA, 2138 bp, Glycine max
  Intron number 2 from transcript Glyma14g00630.2 (locus Gly ma14g00630) derived from phytozome v7.0 (chr-ID Gm14; pos 305996 to 308133)
cactcgcttccggtgaatttaccaaactaggttctactctatgtttctttctcacttcctttttttcacattaatttcattcacaatctttattcttcctagttgttacatatttctttctccttgcttaacgagctactctactgggtttatgcctgatgtcagggttttgctggggagtcaaatcacttgggatccatttgaaataaataaataaaacaatgaacgaactaatttttgttccaatactagttacttatttgcctccaaaaagcttcccatgattggggaatgatcacatgaacaaaaagttggttgccaaaagatatatttggtagatttttccttttattcgatgctgaagcagaagcatatgtgtgacaatgtctatgtcttggcttctattttcccttagaggttttcttaagcttactgcacttcagttcctgcacaagttgcctttagcagtttagcttccttcacatattaaagctcaagattctaattccactgaaggatattaggtcttataatccattattagtattttttttatctgatgttttgaatttgggtgttgcaattagtcattgcttacattactaatctttggacaatgatttttttttaatcttaaaaaataatatatctattggctaaaaactaatctacggattcactccagtcattcatagcaaaaccctttaaattttggttcttacttttttttttatttgtttaattcaatttgcacttggtttatttttttaattgacccgaatttcttgttcaattcagaattcatatttcctaccttttgcaatatccttcgtgcattttgttttatcaaacataccctttgataaaacaaaatgcatataaaggatatgaaagcctttctaactttttggattcaaacatacccactcccttcccttaaaaatggggaaataaaactccttttcagagttttgacaaacatgtgaacatatagcatagtcctattggtttttctttttgatagatgtactcagtgttgttgttgagggcgagccatgatgcaactgtaaagccgtgccttagtgacgggttagtcatgggaaatggcctctttgcatatgcaagggtaaggttgcatataaatacaataaccctcccccatactttcgcattgcgaggagcctttggcaccagggtacattagttttttttatactctgttgtcaaaattgcgagtaagatcagaggatcgccttctgattcccttgcatgctctcactctataaagcctaatcacattctctaatatatctctggtctctctgctttctgtgttctgcctcccattaacaataatctgtgttctacttccagcactaacacccctgtttatgccttcaaagattttgccttcagggggttcaagctttgtgcctcactgccttcaagcttctatttttctgcctgtgctttatgtttaagattgctattgaggatcacatatgttatgtcactttttatgatttgtacgtaaccttatgattgtgaattttcaattttagtttatctaaatattgtgatttaggtgttatttttgctatctatgttattttttgtgtacgcacgtgtaagtataattttgcatttttagtaggatcttatgattcatgttacattcctaggttatataaccttctactcccttcccggtcttagctaggatcttgattttgacaacattggatatgctgatggtttcgagagctcttgaattgatttccccccttctttttctgctttatttaaggagaatatgcactccctctttgattttgataaatttatccatgcctagaaaaatgtacagagttatctttattggaatacaacacaagatgccttcaatacttaatcacgtgctttttgaaagcatttggacttagagttagcatgcaagcatataacatttctttagttgaaccagcttgtttgatatctctgtgctttcagtttgcttgatatatggatgatacagaaagaagggatgggtatacaagggacctatagaatgtgtctgacaccgttgagtactttgcctttcagcttactatagtgatatttgtgttggagcaattgca

SEQ ID NO: 2296 - DNA, 2949 bp, Glycine max
  Intron number 4 from transcript Glyma13g26470.1 (locus Gly ma13g26470) derived from phytozome v7.0 (chr-ID Gm13; pos 29665724 to 29668672)
aaggcagactcactttggagcaagtcctaaggttttgttgcttttgttttttatagttaaaattcaatcagttgaatgaagtcatgaattttttgttttgtttgtttctggttgcttttttatgattaaaactaaaattgaattaattgaagtgcacacttgcagggtaaaagtttttcataatgcgatccaaatataacctgtcaatttcatataattgaaaatttgttgcttttgttttttcaaaattaaaattgaatgaagtcctatgtttgtttttttttttttgcttctctttataagtaaaattgaattaattgaaatactttaaatgttttgtacagtgtcatcctgtcataaattgtcatatattacaaattgtttagttttagagtttaaaatctgtgcaaataaatataaaagatttttactattgtaggaaaatccaatacttacagttttcttattttaaggagacaaactgttggagtttactacaagtgatttttgtcttttaattgttgttatattgcttgacaaccatggatatgattattagttataaataaatagaaaaaaaatataatttgtagatatgttgtgtggtaaaaatttatattaatctttttatgacggaccttgaattcggtttgaaattctaattatatagttatacattataaagttgagttgataaaaatgtaagtaaatagatattataaacttaagtttttaagtatcttttttttttgcactgcaaaaatcaatagtatatattataaaagaaattcagtactagatgtactgaagatacaaagataaaggcaagaaagatacaaagagaacccctctagggaaaatcgaaggcagcccccagagtacaacaagcccaacccctctaggaaaaaacatcctgtaaattggttgaccaagaatgaaagtgcagttgggagtccttctcaacatattttagccatgaccaagtgtgaaacagggcatcatccatgaccttttcaggattaaaaggctggttcttgaaaatcatggcatttctataatgccaaatggagaaggacagggctaaccacagaaattcccatcttctgtttgtactagctttgctactccattgagtgaattgtaagaagtgattctttgggtctatggaaaaaggacccactctattaacccaactcaatggctcccaccaaaggttccttgtcataacacatttgaacataagatggtcgaccgattcttctttatgatcacaaaggggacagctataggaaggcattgtgacctgtctctttctgagattgtccctagaagggagtcggttcttgaggagtctccaagaaaaagcactcacttttggagggattttcaacttccacatagtgttaagatcattgtcttgactaatactatgatgagtctcctgcagcactttgtaggcagttcttgttgaaaataatccattagggtctggcttccaccaaaggatatccctgttggattggtttaagtgagcagaatcaatctccgctagaagatcagctaccatttgtatttcatgatcaaaaaaatcccttctccatgataacttccattcccatctgccctccacaaagtctcccatggaactaattgaagaatgctgctgtttactaataacatataattgggggtatcttccttggagatcacaattgttctctagccatatatccttccagaacctgatgttggaccccgtacccactctccatttgaaattatcactaaggcaattgttgtgttgctgctgaaagattatcttcaagtcctgccaccattgagagctgatatgtctccttccaccagaaatcagctccttccatccaccatacttcgaagttaaaattctagaccaaggttggttatgatcatttgccaactgccatccccatttaccaagtaaagcctcattaaataaagataaatctttaatccctaggcccccttggctcttaggaagacaaacaatatcccactttacccaaggaatctttctggcctcttggtgagctccccaaaggaaatttctctgaatggaaacgattttgtgcaccacttttttggggatcctaaagaaggatagaaggtagataggtaaggctgagagaacaaaattaataagggtgattctgccccccatagtatacacatggagcttttcgtgttagacccctttctgtgttaacatattatagactatgtatatgattaaaaattatgaaatcaaggcaatagatatgtttaacgtactcaagcattctgaggttgtactaacaaacactgttttattgtttttattctgtaatcaaatttctggttgtagcaatttatttccttttcctatgaggtttctttggtaaggttgtggcaagaaatttattgctagaacttgatacatactaatagaaaagaaacctgctgattttcatgcttgattagttcaatttatctagattggtttgatgagtactattgccaatgtcacaagttataaatatgatgaaccacattctggtatattcatgtgtatatgctggtcaatgctaacgtgtgtatggagcaacactgtatctcaatgatcatccagactgggtttagtatcagaagtttcagttaactgcgttctgcctctgctttttctgttttcataaacaaaaaaaccaagagaagattgaattatttgattaaaattgtgttgaaatttgaaaacgtctcacctgaaccgttttatctatgacttgatggtttgcttttcttaattcttatttatgcaatatgggcagtttaaaagccatttccatgaaatttgagttctctcttattgtatatcaattgcctatgataactatgaagtatgaatagtgtcatcaaattttgccggatgtagat

SEQ ID NO: 2297 - DNA, 1918 bp, Glycine max
  Intron number 1 from transcript Glyma19g05450.1 (locus Gly ma19g05450) derived from phytozome v7.0 (chr-ID Gm19; pos 5923139 to 5925056 reverse strand)
tctcgtctcgccttcacgcttcttcgctatctcgggtaactgcgtcaaatttcaataatatctttattttatttatttttttattgcctgctattttttctttgaattatatgtatgcagctttatttctttcttgttattttaattttgctgctagttacggttctgttttatataataataattacaaattgttcctcacaaccacgaacgtacacttttgatttagttcctaaaattgagagagtagtttgcatatacgcttattataaagaaatttatactgtgaatcacttagaaatcattttaccaacatgagtttgttaagaaagatgctgaaaaagatgcctgtatttagaggacgtttggtgagatagaagtttttagtatcctgacaatcataagttagtttccaattgttggtatgcattaaaaaaaataacattactaaaaaaggatgatttgtgagaatgttttttaattagtttttcatgaaaaattttgcatggaaggatttgggaatgttattttctgagtttatttttattttactataataaaaatatgatgttattcttaatgtaataaataattaaaacaataataaaaaatatgtgtgcctaatagattcctagaatatttatctcaatattcctaatggtcaatcaaataaattttattcattccccataaatatgattcatagaattcatgattcctgggaatgaaaaaactttttccctatcaaatgcatccaaagaaatatgtggaagaaaagaaaatcaaaatcattttaggcatgacttttagaagctataaggttgacttggtggttgaagggaggaaggaggagaaagaggtggtatgttcgaatctcatattaaaaaaattaacaactgaccgatgaaaataaataaataaacaaataaatttaggcttgactatttatgttgttattataaagggaaaaaaaaggaatgtacactttcagtttgtgagttcagcgtaaatttgaatatttaagaattgtggagttgttgcaaatgacattgttattttcaagttgcatgacttggttacgttgtattgtgaggcttgtgacgcgatctaccaaaaactatattgaattttgaagtgtttgctttcgttttatagtgttatttcgagtaagtagtcagtagttattgtcataataaatgctttcatggatagttgggattgtttattggaggagaatagccgttagtttttgtttattcagaactctcgcaagaggtgtaataaaaggcttttttttttctataaaagaaaaaggtttacttgaacagattcagcttattttgagctaaaaaaaattctagaaattttcttaattattttcagacttatgctaaaataagttgcttaaaaatacttgtgtttgtgcaaaaatgaaattttaatagtttattataattaatttagtaaaaaatgattataaaatcagataccgcctaagctgtttttattgtttctaaaacatgattttcataagcttcagtttctatcttaacaaaataatggaaaaataactcaggtttctgaaattgcgtttttaagtgcttattccagtagacaagctcatatacataattgctgagttctcaacctgcttctgaaaagtcatgtgataataatataaaaggtggcaaaactgagaacttatatgaactgtgttatatacccgtatagcattcttcgtaattattaggctaaataatgtaaatataagctcacttaaatgtagtttgagtacttggttcagattattttataggaataattgcttatattgtggattgtgccttgtggcatgtctgattttctgttgatacattgttcaggattggttaccgttggattacacaattacttgccc

SEQ ID NO: 2298 - DNA, 1374 bp, Glycine max
  Intron number 1 from transcript Glyma13g04250.1 (locus Gly ma13g04250) derived from phytozome v7.0 (chr-ID Gm13; pos 4597895 to 4599268 reverse strand)
ctcgctttgctgttgaagaacacaacaaaaaacaggtttttctttcttttttcccttaaaaaagatgaaagaaaatgttaattatgtgttgtattgcattgtttgcttctcgagaaattcctatgatttgttttgagttgttaatttgtattgggtcaggccgatgatcggttttggccatgttaacgtttcttcggaaatgcacatcttgaattggattctctctctcttttcttttgtcttatgaacaattattggcttttggaattttagtaatgggatagtagatagttgggtaagtctattattagaataattatgagtaaattgcactgatatctattgtggtttattgagatcgcacatactctttttttaaaaaaaaaatttacagccttcctgcaccatagtaaaatgtgttagagatgccaatcttttcaaacaattcagggagatagtgtatgggtacaaaaagaaagattgttgaaagaaattcgacaaaactacaagagtgttagtgtaatttacttaataattatttatagaacattcacgtcatttttctgaagtgagagtttttgaaaaataagccaatatttccaaattgtaatctcttatcaatcatgcacttactctccaaaggttacggttgatttagtttttgatgttacaaatggtaaatttaatattgtcttcaacaagtactctgaactaaagatcaatttagagcatatttgaaaatctgttgcaaaattacgtttgactcaaaagtaattttgcaaatggatcagattccttgcttttgcatttattttgctattattggttgaatttgcattggaacgcatgccacaacatttccaactactaataaacatgcacttagtttgcgaattcagcagctatcagttcattacaaagttaaaaaccaaattgcttgttcataacattaagcactaaattaattgattgttggaacatcaaaggattcattgagtagagtaagacaaaatcttgcatctaatagattgcaggtttgaaccctcatttgtttatttggagtggggtatatgtaagtttttgtataaatgttctttgagcctagaggcttttttctgttgtgtactgggccattcctcctcccctaaatttttgttagccaaaaaaatcaattgattgttgcgacaaatttgcatgttcattatgtcaaggaataaataggttggtggcgccaatttcaataatgaagttaattttttattctttgtagttatagaaacactagtgggtttctattatcttttcattttgtggtaagggaatttaaatatgacttctattttatttttattgaattgttaatggttatgcaga

SEQ ID NO: 2299 - DNA, 4624 bp, Glycine max
  Intron number 17 from transcript Glyma11g15530.1 (locus Gl yma11g15530) derived from phytozome v7.0 (chr-ID Gm11; pos 11191498 to 11196121)
agaggatatctgggatcactcgtaaacagctagatgtatgtttttttccccttcattgttttttgctttcatttggtcattgcactcattattacgggtgcttgtctgatttgcttggctagtgttgagagtcaatacagagagatttgagagagaaaacgggattaagtttttagtgacttgtaactgttttctgaatacagagaactctatttatacagtatagacttcaaaatcccacttttaccctggaacatcattgtttgggcaaaatatttctcaaaaagttacctcttgttttagctctattcattccttcacactttatagcactatttttatcctgtgttccgttctttcttcttcctttaggcttcccagttcacattctgcaattttttaaatctaatttgtcatgatcttttgctattaatttcagcatcatctttcatttttttttatttctttactatgttcttattactcctacattaatggtgtttgtgtttaaagaccctaaactgtgacttattagttattattcatcatgaattttttttttttttagtatttatgtgtagtataaattatttagtttgtattataatatttaaaatagtggtcatctcgcttcctgttatagcatctttagagttgattactttgtactgctgtctgagattaataactgtgttaaaaataggagaaacagagggaaattgaatgaaaaccacttgttagagtacacaacagatgcgtgtttatataggttaagaacattaattacacagatagaggatatcatgtttcctctacatgaatgattttttttggtaagcaaaactaatttataatattataaagggattagtactagtggtattgatatgtgtacattgggtctatactatttgaagacctatggaaacctaattcaagctatattgcaagaattgacactccataggtgtgaattagtaaagacacatccttccatcaaaaaccaataggacaatcccccctgattgcccatgtgtgaaatggaatatcaaatcctttttccaaatgtttgagccaactccagctgtagaaaattgcatcctccatcagcttttgaccattaaaccattcatttgcaaatacaattctgccaaatgcaccaagttaaagcagtccaccatatttgccattgttgagagataatacccttgaaatatccatggcaatgttgaacgaaatggtctctaggtgattttgggaaaacagcctctatattcatccaagtcaatgattcccaccatagaggcaatattccgtcacaattaaagaataagtgggatacctcctcattcgatctgcagaaagggctcaggatcattcagctccacagtcctccttctcagattaacctttgttggtagtctctctcccagatcaatctccaaatgaaatgagataccttacttggaattttgagcttccaaacctgcttaaatacctcatcaaatttgtcttctgataattgggatgctaacactttgtaagcacttcccagtgtcactgtataaaccccacaaggttctagcctccatccccaactatcctgctgattaacttgcactgtcacagcttgaatatcctccatgaattttgcaactgtatccacttccacttccctaaaaagccttctccactgtaggcaccattcccatcctcctgctgttgcaatccccatgtgctgaattgaattctgttgctgctgagatatattgtatatacgagggtatttttctgccagtgacttcccatcagtcagccaaccatcttcccacaatttaacctttgctccacatccaattttcaattctatactgcccctgaagtcctgaaccaacccccctccctagatgcattacaaacatgtcttaaatcctgctaccagattgaatcagaggtattttcctctaattgaatgataaggtgcctattaatcgctattattaatataatcataatattaattctgattttcaactctggtttctagagctacaacccaaagttatcatggagatccttcacttgacatgacctctaataccaaattgaaacatatacaaagaacacattcttttactggaaacttctttggtgagagtctcccaaccctgtatatatagaaattttgtgcaagagatatctgataattaggcaaagtatattacctgacctacatgatattcagcttaattaccctaattatgtacagctaatagaaacaaataattacaacaaaatcaaatcaatattctattgaaatttcagcctatatctcaaaatctcaatataatcttatcataatctcaacactgtccttgttgaatgagaaacttaagtctttcttgaggaaaattgccttgattttctttgtttacatttgatttacagtaaggatttggtaggtttatttggtattcatgaagatcattttgcagctcttgggagagcatagcctgtttgtgaatacagtttggccacgtgtctacgaaaaggtgtcaaggctgactaattgaaaatagaaaatagccaagccctactaattgaaaggcttatacagggttcaccaactgttgtagaaattcgtaatagattatggaaaaaatgtaaatttcagctggggcaggtatgccacaaattattccaactagtctccagagtcgtagacatctacaaccatatcattaagagaaaatcatttccaaggtttgaactatatttcactcattgcaggagcttttcccttaatgtgggttaggtttttgtttacccttgagggttgtgcagatcacattgcccattatatgttctttagaatgtgggcttgggcctaacttaaccccataagctagctcatactgacaggattgtcccccacttatatactctatcttgatactatttctagccaatgtgagacatggattttttcctttactcctcttcatgcccagcacttttgggcttggtgcgtggctgaaatggtgggtggtccatttaatggatctgggataccatcttagaatatgggtttggactaactcaaccccaaaagcttacgcatgagtcatagggtgagggttgacacccacttataaacttaccattgaggtggcatgtggtgtgcaacactgagtccaatgatgctataggtggagtaggggctgtttttcaagagtttgagatattgataacttgatattagggtttgagatagaatgccttagacttagagtttgcatgtgcgcaatcacttaaagtgggtcacgatctatggatcactagaaaagaggaggtattaatgagttgaaaagtagtgggataaacacaaaaatggtggggaatgtagaactgatgattggcacatggaggcccttgagcagttttcggtggtggcatttcattgtccaactaaactagagatgctaggtgatgaggccttattatggagttgtaatggttgtggatatcgaggataacaatgaaggtgtgcaaataccgtgcaatgaaccatagattggtccagtatgatgacaaggcattcaaaaacagatcagttgaaaagtatctgaaaatattatttctgaataaatttctggacagaatgctgtttacattttatagactaactaaaggctcatagaataaagccaaattatatgaactaatatatcctaatgaaggttatacaactatgtttgggaaatgaatatatcaaatctgttaaataaatggaaactttaagactaaataatacaattagtatagctcaacatattatattggtacagacatacactgtcaccttccatgcaggtgtacacaaatgctcataggataaatttttatcttcaaataactgataaggctgctattattgtttttgttagcgttatgctacaagttgttctaatttacacttacagattgatgctatcaatctctaatttatcattgttaactacccaaaactagtgttttttccttgtttgtaaaagaaaattttaaagtaagaagtgaataactgaacttcgggcaaggtcattcagagttactttatgcatttgatgtgcttcaaatttaattaatggtgtgttttttcgatgtatatcttcagtatttttcataatgttctcttctgatctttctagacatttgtttctaagaatatatatttgtttcttttcgataaactgagtgagtgagagagaaaatggaaaagatcaaactgatataattgctcagaaagaaaaactcagtgagttagatacaacagaggtatttaaagagttctgacttgagaaactaatcacaactaactcttaacagaatgtaactacttgggtgcagtttaatgaaaactgacaacccttacaacatatacactgctgtctaatatgaaacaaaactgtttacacagttacgtatttacatactccaatagtttcatacttgtctgattatgcttcctttaatttatgcattattcctactagtttgtgcttgtatttacatagtaccctatttttcaggtttttttgaatatttgtctatctcgttatcattc

SEQ ID NO: 2300 - DNA, 1862 bp, Glycine max
  Intron number 1 from transcript Glyma18g46050.1 (locus Gly ma18g46050) derived from phytozome v7.0 (chr-ID Gm18; pos 55802219 to 55804080)
aattgaaattagacaggttttattcaaaaactaaaaacagaaaaataaaatagaaaaatagattcgacgcttagtgagactaactcgctcaacgagattgactcgcttagcgtgccttcaaaaaataataagatacgctaagtgcacaaggcacgcttagcgcgacaacataaaaataaagactttggctaagtgagacacactcgcttagcttacacagcacaatggctaagcgagcagggctcactaagccttattctctaacaaaaagctaattgcgcttagcgagacaggctcgcttagcgcgacacactacacaggcttagcgccaacaggcgcttagcccaacttgaccactagaacataattggcttagcgagtaggctcgctaagacttattccaaaacaaagaagaaattgtgcttagcgggacaggctcgcttagcccaattcaaaaattagaaaacatgagagggatttaggcttagcacacagttgcgggcttagcgagttttgcagccttgattggtctgcaactttcgcttagcgggacatgaccgacttagcgaattaaatgcctccagatgcagtaggggggtcacgcttagcgagatggtctcgcttagtaaggattaatttcgctccaaatgttgtaatggccacccttcatgatctttccaagcttgtgcaaagaggtcatggtcaagccatattataaccattggtatatggtagttgcaaatgccatgttgatacccatgcatattgccttatgtaggctctattggaattgtctactgactttgtcagggtaaaccagtggagtctactaaatgagctgagaaaagaattattctacattagataagaatatataccctcaaataaaaaaatagcaatgtttgttatgttggaatgaaattttactaatgaaggaaatatttgagagtgagagagattagaaaatttggaagaaggttacttgtacaaaatgaacacttcttgatttatgccttgatttgacttcatacaaattttaatacaatacccctatttatattggttcctcccaaactaatggttagaattttatcaacacacttaatctagaatattctataagctactctaaaactttcttcatacatataaagttacttacacattctaaaatattttataaattactctaaaattatgttttacaaaagatttttctagaatattcttctagaattttagcttaacatgttttctagaacttgggatttttcataaggcccaaaatcaagttcgtatttcaacatgttattctgtaaaattgatttttcttaattaatgttttatttaaaaaaaatacacaagtgagaaaaaaggaaaagaaaaaatatgtaaaacttggtaaactaggggacacaatagtttttgataacctacataaacaggtgacaagaagcaagtgggagaggttaagatattttttagaacatgagaaaaaggacaaagaggaaaaataaaacttagtaaaataactacgggacacaagtgtgtttgaaaacctgcataaatatgtgatagctaggaagcatacatcacatattgatgattggaaatgtatggaaaaaaaggtgatgggaggggttaattaagatcctattcaagatgataaataattagggaagacacgtctgggggatgtatcgacaaaaatataatcaactctcccactaacatcagtcaaattctaatttgttttgattgttgtatgttttctgaatgtatccttttgtttaataattttttatattttgcatatgtaacattcaggaaaaagtggtagtcatagcaggaaccaaagaaac

SEQ ID NO: 2301 - DNA, 8905 bp, Glycine max
  Intron number 1 from transcript Glyma03g13060.1 (locus Gly ma03g13060) derived from phytozome v7.0 (chr-ID Gm03; pos 16658408 to 16667312)
gcgataaaagtgttattcttcaaagaactcaaacggtaacaacctctatttttttttcctttttgtgctcgaaatttggttaatttattgcgatcgaacagaggaattttgcttgtttgtttgaaattccccattgttagggtttgattcaaaaattttaggattatgtttatgtgtaatttgaatttaggtttgtattgtttaatgtgtgttgtggagagtgcaaaaagtggaattttttaaatgaaaatcacttcacgcttgattcggaacaaaaatgtgatggtgcaaagtaaaaaaaaaatatgtgaaggtgcagagtaaaattgtttgttccaaattcctcattgttagagtttgattcgaaattttaggattatgttaatgtgtaatttgaatttagatctgtattgtttaatgtgggtagtggaaagtgctaaaagtggaatttctgaaatgaaaatcacttcacacttgattcggaacaaaaatatgtgatggtgcaaagtaaaaaaaataaaatatgtgaaggtgcagagtaaaatggaacttagagtgtacttgttggaaacccgctcaacctaggcccttagtgtgtgtcggtttgtcattggtaaactaccaatgttgttaatggcggatggcggttcatggcggaaagtcaaaaatccgccataaaaatatggcggatggcgtagcggaaaatggcggatgttatggcggacacaaaaaaaaaaaaaacatatatataaactcattgaaattgaaaaaaacaaaggattgcattcaaataaactaaaaaagtttcatgagttcatacaataatcaagtaccaacaccaaataaactcattaaagagttcaaaataagaaaatgataaaaacataatgcaaagtgcaaagtgaaggttaaggctctaatcatcttctccaatcccaacataatcatcttcgttgttatcatatggtaatggagcatctccctctccctcttccccatcagacgcctcaaaattgaccatgatttcttcttcttcagattcaacatcaatattctcctcaacatctagatcctcatcattttcttggactgctttttgcttccttgatgaagatccaacaaccattgcctgttttttagaagtttgggcagcagcaacacttgttttttgctttttccgcctagtatacatcctacactctccaacccccgaagcctgatacacagttgcccaatttagagcatcatcatcttcaaataccaaatcatttccaacatcattatcatcatcttgatccatctctcccacgagccattcattgcatacatcaatatcattaagagaaattggatcaatttcatctcttgcattatatctttgcttcaattgttggttgtatttgacaaacaccaaatcatgcaacctcttgtgctcaagcctatttctttttttggaatgaatctacaacataacaaataaatgttgatttcaatctcaaatatactccaaatataacttgatcatcaaaattaaataaaattaaaaagtatagttagagttttgtcacaattacttgctcaaacacactccaatttctttcacatcctgaagcactgcaagtcaaactcaaaatcttaatagccagcttctgcaaatttggagtttgtgacccaaacattcgccaccaatatgctgcaataccaattaccaaccaagagcataacttagaattctgaattctaacactaatacataaaaaaaatagtatgataaaagtttcttactaggagaatgggttttcctttgagccattgcaaagtcggaaccaaagtggtcagcaccaatcttgtaaagatgcaactcggttagaattttctgttgcacatcaaattgtggaatcaacttcttaatgcactcaaacaaaccattggtgacctcaaaatcaaactccaagtcagtgttgtcataaaagaactctggatttaagaagtgggcagctgcatgcaatggcctatgaagctgacaattccatcttttatcaatgatttcaaacacatctttgtacttgctttcattgttgttgaaagacttcataattgtttcttttgccttgtccattgcttcataaatatagcccatggctggtttcctttcaccatccacaagacgaagcactttcacaagtggagccatgactttaagagtgtaaaccacactattccaaaaagaaggcatgagcactacctttgcagcttcttttcccttaggctccttagatagcttgttcaaggtccattcatcagaagtaaacatctttctaatattggctttctctttgtgaagcctttccaaggttagataagaagtggcaaatctagtaatagcatgtctcaccaattccctcttgtttgtaaaatttctcaacaaacttaaggtactagaatgggcatagataaacccaactagattaattgcccttctaatggtcttccttatcaagggaagcttcccaatatcttcaagcatcaaatcaatacaatgagctgcacaaggagtccaataaatatgtttccttttctcctccaacaacttacccgctaaaacatagttgctcccattatcggttacaacttgaacaacattctcttctccaacttcctccacaatggcatcaagcaactcaaaaagcttttcacctgtcttcacaaaatcagagccatcaacagacttcaaaaacatggtaccagcttgagagttaatcaaaaaattaatgatgcatctttgtttccgatcagtccatgcatcggacataatagtacaaccatacttgacccattgctccctatggcctttcatcaaattttcagtatattcaacttccttcttcaagagtggaactctgatgtcatgatagctaggaatgggcaaatgtggcccatattgaccaatggctgcaaccatgttctcaaagcttttcaatttaatgaggttgaatgacaaacctgcttggtaccaaaagcgagcaatatgttgatgcaccttcaatacttcattcttatccattgactctcttatgttcatttgcctcagcatctccatttttctccgattgattgcattttctggattcttacagaatttgtccattggtccttttttagtcccacactttgtctttgcacttgcagcagcattacaagaatccgcaaactcatcttcttcacttccatcacatccaatcggttcaccaaattcaaaatctcttatatttgccatattaccactgccagaagtactgtaagtggtcccgcttttttttgtagccatatattccttcaactcttcaactacatttgggggagttttcttgcaagctgcaacgttgcccgacttcccaatcaggtgttgtttggctcgggttattcctcccttagtgatttttccacaaaaattacaaacaatggtgtttgtatctccttccactagtgaatgacaatatttccagcctgggtctgccttatttttcctcgttgcacttgcagtagcagcatcggatgatggttcagccatttaaaatcactaaaaagggactgaacaggaaaaaaaaattatggtgtcaaatacgaaaaaaaaaaaaaaagggactgttaacagtaaaaaggggtgtcaaatagcaaaaggaaaaaaaaagttgtagacagaaaaatggggtgtgtcaaatagcaaaaagcccaaatcaaaaaaaaaaaaaaaaaagatcaaggttggctgacccgcgtctgcgtcttcgtcttcttcgtcttcttcacgagacagaaaggtgttgcggtcgcggtcgcgggaggctgcgttgccggggctcgcgcgaagttggccttcgtcttcgtgtaagggtgtcgcgggcggcggcggttgggtgcgcggactgtgcgggtgtcgcctgtcgcggcggcggctgggtgcggcggggtgagggaaggacgcagaggtgagggaaggacgcagaggtgagggaaggacgcagaggtgaggtgaggtgcggcgtcggacaacatttaattgaatgcataaccgggtagggttggatcgggtcggcccaactcctaccgcggacaaaacccaagcaaatcccgccattttccgccaccccgctataaccgccacgaccgccatggctatggcggccgccatggcgccgccatcccaaacccgccacgccaccgctattcggtggcgttttttcgcaaatccgccacctaaatccgccatggcgccgccatggccgccatttaacaacactgtaaactactaaacatattgcttttctgttgtatgtttgggaatgtgttccaagagaaacccaaacacactgttaatctacaaacagctcaccccctgccttgttgattgatttgtcttttcagtgggcataatgtaatgaaccttttgttattttgagttggttttgttgaaagaatgcccatacctgctgctgcaacgtagagtgtctttcctagtctttaggaatttgttttgcttctgtttacgtttcagattttaggagttgaagtttcaaatattaggagttatgattctgttttgtaaaattatcctgttatgcctagaaataactcaaataagggatgtatttgttttgctttgtgctctttatatagagttgtttcaataaaatattttaagcttctctacacatcattttctctgttctcataaacctaaaaacaacaaattggcatcagagctctcatccgagggatctgtgagattttgtgagtctacccataattcctaaacacaaacacacacgacaatgaatctagaaggttcatccattccaattttacttccattgttcaatggcaagcattaccacctttgggctgttaaaatggcagccgatcttgatgcatgtgatctataggaagctgttgaaggcatgtacgaagttccatccctactggataatccatgagttgctcaaataagaaatcacaaagagaggaaacaaagagagtcaaaggcaagagcaaccttgtttggagcattatcatccactattttgatcagattatttttttttaatgattcaacggggcaaaacaccctgttgatcagaataatgacgctgaaaatacctaatgagatttgggagtttttgaagcaaatgtatgatggaaatgaaaaggtgaaagcaatgcaagcgctggacttggttcaagaattcgagatgcagagaatgaaggaatcaaaaacaattaaggaattgacaggcttcttgacacagtcaacaatgtaaggctccttggtactgaattttcagaagatagaattgttcaaaaaattctactcatagtgcttggaaaatttgaagccacaattaggtctctagagaactcaagggatttgtcaagcattactttgacagaattggtgaatgcactacaagcacaagaacaaaggaggcttatgatgcaagaaggatctttagagggagctttccaagccaagaactgcaatggtaacaaatacaaccaaaacaacaattcacatgccttttcaccttgtccctattgcaggaaaaataatcacccacacaagtgttggtggaggccagatgtgaaatgcaacaagtgtggtcagtcgggacatgtggagaagatatgcaagtctcattatcaacatcaggaggtccaagttgcagaggaacaactctttacaacaacatgctttacaaccaacaaccccaaaataggttggcttctagatagtggttgtacaaaccacatggctcatgattgaaactctttaaagatctcaacaaaactgttatttccaaagaattggaaatggagcacatattgctgtgaaaggcataggaacagttgcaatgaaagtcattcaggtttgaaattaattttttatatcttatttgttccttagattaatcaaatttttgttaagtgttgctcagttattggagaaaggctataaggtgtcttttgatcacaaaatttgtgtgattaaacatacaaacaacttagaagtgttcaaagttcatatgaaagggacaagtttttccttagatcttgtaaaatgagaaaatataaagggataattgactgaaactgtatgtcagagtacacaacggatgctctattatatagtggtcattacaataaatactgataatgaaaggatatttagtttcctctaaatcagatttgtttcctataaatcagatcctaataaatctatacattacatatttctgattctcaacactttccctcatgctgaagcttagaagtttactaagcttcagctagttacaagaaaatttattcccaacaaaaacataaaacttgagttccactaaaaaagacaatagtttgaatgacaactcaaggatgttggtgaagttggggaatattgctagaatgagagaggtggaatatatccatcaacctaagaaaagcaagttccgactttctgaaaaccatcatttggaagcttcaaaccaatattttgaaggcaaaaatcggggaatattgctaggaagagagagctggaatacccatcagcttaagtaaatccaaagcaagttctgatcttcttaaaaccaagatttggaagcatcaaacgaaccgtggagacccaaaattattcaaactgaagagaagaaattgtcataaatagccagaaaagttgagagaagtcaccaagaaacacgtcggaaaagtacagtgacaaaataggcgaccgaaaagttcttcgccagaaaatgaggggctagatgaaagcagtgaccagaaaacacgctggaaagagatggcggtaggaaaggcgactgaagagttcttcgtaacaacgcaaaaacgtaaaaatggactgcacagtgcccaaaattgaaaaccaaatagtacctaaaaaggcacgaaacaatgatgcaaaaaggagtttttgcccaaaacaagtccgatggagatgaaactttagggacagagtcatgttgggcaggagactttgtcattgaaacagcggccagaaaaggtgtcggatgtgcttatgggcaaagctgtttggctggcaaagatggtgcatgtgagggtgcgtgcatgcttcgttttcgatgccgtgagccacaccatgtagattggtgtggggtgatctagatccagtgggtgatcagcggaaaagtcactcgaaaattttttggaaaatttgccagagttgcgttggtgattggaaaatgtgccagaaacagggaaaatggccagagaagcggaaagggttgtcggaaagaagaaagaggtcgttagaataagtgcaacgatctggtggggggatggttttcgttattccctcaacctggttctagataccatgtaaaatgagagaaaatatagagggataattgactgaaaccgtatgtcagagtacacagtggatgctctattatatagtggtcattacaataaatactggtaatgagaggatattcagtttcctctaaatcagatatgtttcctataaatcagatcctaataaatctatacattaaatatttctgattctcaacagatctgattaaggagcaagatgaggaaaatgacaatgccaacaaggaacaaatagagaagaagccacctgagaaaaaccttgaagatcaaaaggctcaagaaaatatgcctacaaagcatgagatggttttgaataataaattgagcaatgacagttgcatttcaaaaattccaaaaatcattctggagtttaaaggtgtggaatttgttaatcttgacaaagacaaggatttgatgatggtaaaaggtgctgtggatgcaagtaaaatgattcaatatatgaaggataagctgaagtggaatgtggtggtggtcttatctgagaaagatgatagcaaaaattacaacataaaagaagaaaagcaagagtcaagcttgatttgatttttttgaaaactaaaggagtctacagttgctaaggcaaggaggggatttgttgaaagagtgcccatactagctgctgcaatgtgtagtgcccttcctggtttttaggaatttgttttgcttctgtttacgtttcagattttaggagttaaagtttcaaaaattaggagttatgattctgtattttaaatttaaatttatcctgttatgcctagaaataagggatgtttttgttatgctttgggctctttatatatagttgtttcaataaaatattttaagcttctctacacattattttctctgttctcataaacctaaaaccaacatgcactggcactaagcttcagggatttgcatggttgaaatcgtgatgcaatatttgcatattataataaactacaaatttgtcaaaatctaactgtgataataattgttgtaaaaagaaactgttattataattaatagttattactgcaattcatcttctaaagtacatttccctcactttagtggagcaaaatccaatctcaagacttcagattgttgcctatagatttcccctttcattttatagataggtgtatattttgatgttttgaccataaggtgttattgaatattgaatattgacatgcctgctccttttcttgagtaaatgagtaattatgatggtctcgaagaaaatgggtaggtgaccagcattgtagaaattgaagtaattaaattttttccaatgatatttggctacccatttggcatttagaattaatggcttttatgtctaagaggaattatatctttttgattgtcgtagaaaatttaaatttaatttcattaacatcttgcaacttagttgtgaattataagactaatttattgatttatttcgtgttgaatgttgtgaagtgtatataca

SEQ ID NO: 2302 - DNA, 925 bp, Glycine max
  Intron number 6 from transcript Glyma17g07050.1 (locus Gly ma17g07050) derived from phytozome v7.0 (chr-ID Gm17; pos 5126756 to 5127680)
ctcgttgagcaaggtattctattccttcctctatccctttcggtacttaatgaattcccttgtgaattggcagatttaaatttgatttgtgccaattacacgtttttttaacaacttggatatatctttaaaacactgattcccttgttaaaaaaacgtgtaattgtgaagggaatcgatgttttaaagaatagaaaaaagttttcacaattacacgtttttttaccaactcggatatatctttcacttctgtgcaatcgttttccaaatgttgaaacttttagtagttaaacactgtatatactaaatacatgggcactgggcaacctctctccccgccttacgctgccttttaggtgaatattacttcaattatctggatctggatctcacatgaggatcccactgatgggttatttttgcgagagtcagacggaaaaggtttacttaaaattagaatctttgcatagggtcccacaatcctatcacaactttattctgtctatttttttctcttcacaagaccctcacatcagaggggattgtgatcccaaatcttatacttcataagaattgtgcaagtaattgaactttgttggttgaaaagtaaccttttgttgattcttcagattctatgataattaaattaacacaccaaatggagtgttgtaacttgtaacataagtgggtaatttttttatgaatttgatttctgccagggttgtcatttaacatgattcatataaatgctgtaggcagctaagttcttgtataacaaagcttaattatattatagttgtcaaatatatgttattctctttaacctttcacaccttgatagttctacttctcaccatgaatctgatctgacctgtcttctgcaattgcaggggggaagcgccttgtgccagtgggtctaggtgat

SEQ ID NO: 2303 - DNA, 9100 bp, Glycine max
  Intron number 1 from transcript Glyma05g16870.1 (locus Gly ma05g16870) derived from phytozome v7.0 (chr-ID Gm05; pos 19368724 to 19377823 reverse strand)
tcttggaaaaggtttgcatctcagcctcatcttgattgtagagcatatatacttctagaataattttttcgtatttaataatttttattatatgattattttgtaacatctaatgttatattgaagatcttatgacatatatagattatattcataagattcgtattaatataattaaaaaaattatattgatatattttatgttaaacatattattagtataaaatatttattggaatttatctttcttaagcctcttcttttaattatatgttttcgtcaacaaaagacttaatctcaaaatcttgattaaaaaggaaatgagtttaatttcacttttattggtaaatttgtatgaatataaagttgtttagtattttaaaagtatacattaaagttaatatgatataaataattaatattatttttaaatatattgtttagtatatacatttaatgctatgcatacatttaatatcatttaacagtgtatgtagtgtaaaaaaaatagtatatacatttaatgtatataaaaaagtaaaattaattaactatatttttttccgtagcgggttacttttattaatttttatttaattataactattttattattaaattcttataacatttaacataaataatttgaataatcaaaagttataatttaactatcaaatgcataaaagtaatgtggttcccgaatttgcgtaattgcgtctatgttgatctaaaatcgttgttcaacaatactgagcatagacttaaagttgtaaccggtccacgaaattatggacccatattataatcattatttggacaaatctttattctaatcataactggcataatgctattgctagcccaactttttctattttgaaactatattatatttaaacagcttttttcttaacatctacatttttttgtgtgcctctaactcaacatttacatcaatttgcattgttatttctttttcagataatgtaggtaagtttatcgaatcataaattattatggataaatttatccacttttataattataatatcttaaaaattataccaaataatattttattcattaaaaataaaacatattttgcattaacaacacatgttaacatttttttataaatgatttacacagacacatacttttaagttattataaattcataatacaaataatatgaatttatactaactgaaaaatatattatatattaatattattttgtacagataatatatataagtcttatactaacaaaattatttactaatataattttattctgcaaaatttgaacatataatatgatatgaacgtggaagacgaagccatgcaacaacgacgctcgaggagagtgaagcagctacctaagcactgggatgtttactagttaggatgaatgggcctaggtaaaagctgatcatatgatccttaagcaggaagggtagttagaagttgattagttagttagggttagcagcaactaaccacttgcggttagatatgtttcctcgagcatataaataagttgtaactaactacgaatgatttggaaaaaaatatccaaaagcttcttcctctttctctcaagctcttcttcttcttccctaagttctccctgaactcgcgttctccttctctgcgagtctccaaagctttcttacggtcttgcgcattatggaggttccctagccctcgaaagctaggtatcattggtgctttcattgagcacgtggtccaaagtatggcgaaaggtactagatcgaaagctctctcatcggaaaaaatggaagaattatttgtgaaatttgcagcaacagtcgaggcaaagatggagaccttatcggaacgcttagcacatctcgaagcaaacaaatataatccacaacaagcacaacctgaggcaacttcgttttcagcatcaggatcacacacagcaccgcatcggatgaagctcgatgtgccaagattcgatggctccgacgccacaggctagatcttcaagataatgcagttcttcgagtatcacacaacaccaaatcatgaaagactcatgattgcatcattctatatggaaggtcaggcattagcatggtttcaatggatgcaccgaaatggttagttatcgtcttggccagcattttttcatgctcttcattcacgattcgcatcaaccacatacgaagatccaacaggattactatgcaaattgttgcagcgaaccatggtaaataactacctctctgaatttgaagctttagcaaatcgaattatcggattaccttcttcaatggccctaagttgtttcatctcgggccttacaccggcgattcgccgagaggcccaagtactgcaaccagtttcaatgagtcaagcagtggcatacgccaggttgcacaaggaaaaacaaaatgacgcacgaaagacatttcgaccttcagctggagcttcctcaagctcccgacaaccactattgcctacgtcatcctccaatcctccactattacctacaccgatgagcactacttcttccaactttcctttcaaacgtctcactccggaggagctagccatacgacgagagaagggactgtgtttccaatgcgacaaaaaatattcgagaggacataagtgctcttcttcccttttcctattcattatggaagataatgacacaacatcagagtctcacgagcaacagctaaccttgccggaacccgtgccagaaccgccaccagcatagttgagttttaatgcgttgtcaggacaggtggtaccggaaacattacgcatgcagggatacattcgcgggcaacctgtgagtatattgatagatggaggtagcacgcacaatttcatgcatcacagggtagttatgacggtagggctcaccacgaatacgacctctctattaaaggtcactgttggcaatggtgatgagcttcagtgccagtaaacgtgttccaatgtcgaggtaactattcagcaacacccctttgttatagacttccatgttttacctatttgtggtgctgatttggtcttgggagtgcaatggttgaaaacgttggggtcggtattgacggattacaccgctctgacaatgaaatttatggccgccggccacctggtggagttacacggcgagcatgaacaagccctagaatccatatcctcttcccagttacgtcgcattgtacacactgatggaaccaatataatgttccacatttggttagagccgtgcacacccccacagcaggatattatcccattacctcaggggatcgaggagttgattgaccgatattcgaagctattccaaccattagtggatcttccaccttcgagggacactgatcatgccattaacattctacccgaagcagcatcgataaacgtgagaccatatagatacccccattatcagaagaaggaaattgaggatcagataagctctatgctggacaagggattcatacgcaccaatgccagtccattctcgtctccagtgctgctagtgaagaagaaggacgggtcatggcggttttgcgttgattacagagccctcaacgctataacgatacgagatagattccctataccaacaatagatgatttgttggacgaaataggcggagcacggtggttctccaagcaggatttgatgcaagggtaccaccaaattctgatgaaggaagaagacattagcaagaccgcattccgaatgcatcaagggcattacgagtttagagtaatgccctttggcctgtgtaacgcaccctctacgttccaagcaaccatgaatcagctttttcagcccttcctacgcaagttcatcatcgtcttcttcgatgatgtgctcgtctatagcaaaacgatgacagaccacctggttcacttggaaaacgcgttccaactcttgctctcagggaaattctctttgaaatgtacaaaatgtacttttgctcaaacacaactcgagtatttggggcacatagtctccggaaggcgcatagaaccagtgctggaaaagctacatgcgattcaggaatggcctctaccttaaacagtcaaagcattaagaagctttcttggtttggtgggtttttacagaaggtttattaaaggctacgctaagattgccgcgcctctatcctagttactatgcaagggtcagttccgatggtcggagttggctactgtggcgttcaacaccttaaagaaagcagtctccactgcacctgttcttgcgctgcccaacttcgacattccatttgtggtggagaccgatgcgtctggtatcggcgtcggggcagttctctctcaggcgggccatcccatcgcgttcttcactaaggagtttttccccaaacttcgtgcatcttccacctatattcgtgaacttgcggccatcacgacggctgttaagaagtggggtcattatttgttgggccaccccttcgtgattctcactgatcaccagagcttacgggacctaatgactcaagcagtgcagacaccggagcagcatcggtatctaattcgattgttgggattcaaatatactatccagtatcggccaggatgcgagaatggggtagcggacacattatcttgggttgccggagaagaagctaaggcttccttgtacctactctcggtgccacagctctctttcatcgttgaccttaagcatgagctagctacaaacccagaatttctgacactacaggagaaaatccacaaggacccagccatagcttctgaatataaaattgagaatggattgattcttcacaagcaatgcatttggctccccatgggatcttccatcatcccgttactaatggaggaatttcacagcacgccgacgaaaggtcactatgggattcagaagacacttcagcggttgcaggaaaatttcacgtggaactccatgcgcagcgatgtacgcaccttcgtcgcagcttgtgtcacgtgtcagcttacaaagtatgacaaccacaaaccagcagtgctattgtgcccccttccggtactgtatcggccatgggaagatttaagcatggacttcatcgtggggttaccatcgtataaaggccatacatgcatcttcgtagttgtggattgcttctcgaaggggttacatttaggtatgttacccactaagcactctgaaaggaaggtggcggagctgttcacatccatggtaactcgacttcatggtttgcctcatagcatcatatcggatagggaccccttgttcgtgagtaaattctggagggagcaatttgaattaagtggcaccaagctttgtctcagttcatcgtaccatccacaaacagatggccagacggaggttgcaaatcggatcgtggagcagtacttacgggccttcgttcaccgcaagccatcgtcatgggggcgattcctgttatgggctgagtggtcatacaacacttcatgccactcaggtaccgggataacaccgttcgagatcatctacggctgcaaaccaccaactattccggaatatttggggggaacatcgtcaatcgagacagtggatgagatgctcagccaacgagataaggttttgaaattgcttcgccggaaactgctcagggcacaacaaaagatgaaacaggccgcggatacacgaagacgacctcaagagttcaatatcggggattgggttttggttaaactcagaccacaccgccaaatctcggcttctaaaacatcgtacacgaagctgacaaagaggtactatggaccatttgcggtggtggaaaggttgggcaaggttgcgtatcgtctgaagatccccggccacagtcgcattcatcctatcttccatctctcattactcaaggcctttgtgggagatcccgcgatagcaaacgcggatcctttgcctaccatggctagtgacgaaccagcagcaactcccttgacaatcattgactccaaactggttccttccgaagatgggccccgacgaatggtgttggtgtagtgggaaggcttatcacacgacgatgcctcgtgggaagattggcaatagctgaaggaacgccacaaccttgaggacaaggttttgtctgaagaacggggggatgatatgaacgtggaagacgaagccatgcaacaacgacgctcgaagagagtgaagcagctacctaagcattgggatgtttaccagttaggatgaatgggcctgggtaaaagctgatcatatgatccttaggcgggaagagtagttagaagttgattagttagttagggttagcagcaactaaccacttgcggttagatatgcttcctcgagcatataaataagctgtaactaactatgaatgatatggaaaaaaaatatccagaagcttcttcctctttctctcaagctcttcttcttcttccctaagttctccctgaactcgcattctccttctccgcgagtctccaaagctttcttacggtcttgcacattgtggaggttccctagccctcaaaagctaggtatcataatacatatagagagaagcttaaatatatttttgtccatgtgaaccaagtgaattctaattttagttcctaaataattttttttcatctctctgatctttgaaatcactatttgtacaaatgaattttaattttaattcctataaaaaaatttcctttgatttttatctgtcaaaaatttgaaatcactattttttgtccttaacatttattttagaataggaaaataacatttattttgtgatcttgaaattttttctagagatgttacatgatgtcattatattatagacaccatggtgagtgtcatatgggatagtctcttgacatttgattaagacatttgtcgttaatgagtgtcatatgttattactagggatcaaaaacaatgatttcaaattttagagtgatgaaaagtaaaaaaaaaaagaaattacaaagatcaaaatcaaaactcactcagtttataaaaattaaaaacatatttaaacttatatgcatatatatataatttaatttttagagtaaattacactcgtatcccatgtgtttttctcaaattgcacctgatacccccctgctttttttttacattacttttacctcccttttgttaacatcgttaactgacattagaaaaaattaccctaacatctttattacactcgcaccccctgtgtttgcttttcaaattacacctgatatccttcccctttttaacattacttttagcccccccttcttttaatatcattaactcatatgtgagtagacaaaattatcctaacatttttgttaaattctcaacaacaaattaacaattgaccctgtgaatggacctttcttaaggcaataacagttttcctttaatatttgactcttacttcattgttactaacacttaaaagatgcatctcttgattgagacattatatcaaacacctagccatcaaaaataaatatttcaaaaaaaaggagttaaaaacaccaatgtaggagcaaaagactaaaatttgaagcaaatgaccatattcaatcaataggcattgctgggaacacatccaacaaaaacgcagcaactaaacgacccaacacgcactcaaaaaattgaactaaaaagaagaagaagaagaaggaggaggaggaggagggtgttaacacatgcatatcaacaaggtagattcacgtccaacaaaaaactgggttcatgtcgaattagagaaaaaagaaaaaaaagtgttaaaatattttcaggtttaaaacaatgtcatgtcttttatggagttaagaggaagaagatgaggatattctagacataaattttcattaaaagtcatatgaccagcatgtgtctattttctgtgaaattattaaacggtatttaggagggagaatgtctaaaattatcctaacatttttgttaaattctcaataacaaattaacaattgacactgtgaatggacctttcttaaggcaataacaattttccattaatatttgactcttagttcattgttgctaacacttaaaagatgcatctcttgattgagacattatatcaaacacctagccatcaaaaataaatatttcaaagaaaggagttaaaaatacaaatgtaggagcaaaatactaaaatttgaagcaaatgaccatattcaatcaataggcattgttggggacacatccaacaaaaatgcagcaaccaaacgacccaacacgcaaccaaaaaattgaactaaaaagaagaagaagaagaagaagaaggaagggtgttaacacatgcataccaacaaggtagattcacgtccatcaaaaaactaggttcatgtcgaattagagaaaaacgaaaaaaaaagtgttaaaatattttcaggtttaaaacgatgtcatgtcttttatggagttaagaggaagaagatgaggatattttagacataaattttcattaaaagtcatatgaccagcatgtgtctattttctgttaaattattaaacggtgtttaggagagagaatgtgggtgtaatgtgagctaaacaattaatggattttttgtaggatgcaaaaaagtaggggtgtcgggtgcaatttgaaaaaaatatagggggtgcgagtgtgaagaagaagatgaggatagtttagatataaattttcattaaaagtcatgtgactagcttataccttcttgtttgagtgtaatgtgagcgaaacaattaagatattttttgttggatgcaaaaaatgagggatgtcgagtgcaatttgaaacaaacacaggagatacgagtgcaatttattttaatttttatcagataaaatatatatcatatgaggataaatcaaacataaatgcaaaatataagtttaaaaaattccattttttgtgaaaccatacaccatcacacacacacacacacacatatatatatatatatatatatatatatatatatatattttgacagcttacatttacatcttgtttgaaagcattatttgaacttttgacttgaacagtacactgagagtatcccagcggagaattggctgga

SEQ ID NO: 2304 - DNA, 348 bp, Glycine max
  Intron number 2 from transcript Glyma08g12120.1 (locus Gly ma08g12120) derived from phytozome v7.0 (chr-ID Gm08; pos 8808573 to 8808920)
attttcagaaccctcgtgtgcaggttagctgtgcttttattgaagtgatattcttaattcttgaacatgatttttgctcatgatttgaaatgcaagtttgaaatgaaagttttgtgattcttttaatgagctttgtatttcattaaagacatcaataatgcaaacagtaactgcaatgttactttattatacaaatgcgaagcattgtgatatacttcaattttatgaagtgtgtatcatttttcttttattctttgtagtcattatgatttatgattgaagtcatgctatttaaattaaataagctttctattgtaattattttcaaaatattgtctacacaggcac

SEQ ID NO: 2305 - DNA, 6678 bp, Glycine max
  Intron number 5 from transcript Glyma09g06470.1 (locus Gly ma09g06470) derived from phytozome v7.0 (chr-ID Gm09; pos 5216911 to 5223588)
atcatcatcagcttctagaggtcgttcaacttcaagtaagatatttttaggattttatttgattgatttccttgacaagtgtaaccagtgcatatttcttttccttttactttaaatcacttcgactgaactgctccctctctctgtttgaattgcttgtagtaatgattttactagaatacagtgtgttggaatatgctggcttgatattctagttctagcaataggatagtatcgttcatataactactttgaaatattcctggtatggactggaatattctgaaatgtgtaggtttccagttgctgagtgttataggaatgagttgagtattctttcaacttttcttgatgtggaatttcatgataattagttgccatacttgtggaacaaatgaaacaagctatgaacatgatgaatgattctaggtttgtgatcttattctctgatcatatgctttgcatactatgagttcccttttaatttcctctaatatcttccttggtcttccttctaccccatacaaactgctctcctcattggtccctctagtgaccttttttgcacttgtcataatcaccttaatcgattttctgtagttttttcttcaataagtgccacatcaatttctcctctataacatcattttgtattttgtcctttattgttggaccaaacatcttttttaacatttatttttgttattcccaccttttctcatccctttaaagctcaacattcactaccgtagagtatagctggtcatattgcagtataataaactgtccttttagcttggtaggtactttgcagtcacaaacatacatttagggataatcttttgtatgtccttggtaagcacatcaaagactagactaagcaagtaaaaactcaaggttgaactctaatgtgaacctatccttgttggaaagttaaaggtcttgcttctaggagttctcacactagtagttattacattatacattggcttgtattgctgtgatataagtcacacgagcacctttcttttccaaagccttctacagcacttctcttggcactttatcatactattttttcaagtcaataaaaaccatatgtaagcctctttctttgctatggtaccatttcatcaaccctcatagaaggtaaataactttacatgtagaccattctgggataaatcttagtttctttgctagcccatattcacccttcatatgctttgcatcataaaacttaaaaataaatgtgcatgctagttgcatttgatttgatgctctaagaagccatgcaagctttgtcctgtgtaaatagaataagaaaatatgattctattctatttatataggaaaatgtgaggtttcatttcagaatgctcactatgaagtatgaagtagtgtaagttttatagcagaaaaactataataaacaaagtagaagagagacaatatgtatgtggaggaaatagaatgattttattctaaatcaaattgttctgagcagcaatacaataaataataaattaaaagcaaaacagaaactaatcacataacaagatttcagcaaaacagaaaattaaaactgacttgctcctaaagtatataaaccacttattgactaggctaatccataactgaaacaaagaaaaacaaataaaatatgcagttacaaaagtaatttaaaaaatttaaacaatccttgctttaggaattgtaaactccaattctttgccttaagagttcaaatttgttgataggcagtggctttgtaaacatgtcagccagttgatctttagacttgtagtaaattaagttcacttctccactttgctgcatctctctcaaaaaatagagcttgatgttgaaatgtttagtcttcccatgatacactggattgtttgcaatagtaatggctgcctagttgtcaacaaagattccagttttgttcttctcctgcaaaaataaatgacatagagtcttcttcaaccataaatcttgatttaccgctactgttgctgctatgaattcagcctcagcagtggattgtgctacaatcccttgcttctttgtgcaccatgagaaaactcctgagcctaggctgaaagagtatcctgaagtgctcttcatgtcatcaacggatccaacctaatcactatcagagaatccatacaacttgaattcttgacacttctcaaatttgacaccataatcaatagtgcccttaacatacctcaatattctctttgttgcttttaaatgtatttcacttgcacaatgcataaaacgagacaagagacttacaacaaatagaatgtctgaccttgttgcaatgagatacattggacatccaatcaagctcctataatatccttcatcaattttatcagcaccatcttccttgctgaacttctccttttgattcattggtgtgctaacagatttgcattcctccatttgaaacttcttcaaaatttcttttgcttatttcctttgatagattaacactttgttctgactttgcttgatctcaattccaagaaaataagtcatgagaccaagatcaatcatttcaaaagcttgcatcatttcttgcttgaactcctcaactagtcttgcatcatctccagttactaaaagataatcaacattgagagaaactatgagaaagttatttcccttatttttcacataaagagtggactcagataagctttttgcaaagcctatgctcaataggtgatcatttatcttgctataccaggcccttggtgcttgttttaggccatagaaagcctttttgagaagataaactttatcttctttaccttgcttcacgaatccttctggctgctctacatatatttcttcttgtagttctctgtttaaaaaagctgatttgacatctagttggaatattttctagccattttgcgcagccactgctagcaccaatctaattgtatctaatctggacactggagcaaaagtgtcagaataatcaacacaaaaaatttgtgcataccctttaactactagtctagctttgtgcttgttgattgagcaatctgcattaagctttgttctaaaaacccatttaactccaatgacttttctacctttaggcctatcaacaaattcccgtgttttgtttttctgtatcatggacatttcctcctccattgcaactttccattttagatccttttgtgcttcctcacagctagcaggttcacaaattgctacattacatctttgataaacatcagaaagcagtcttttgcctctgactggagggttatcttctaattcatcttgcaacaactttgttctttgctggccaggatgattatcattaatgttgtcaaatagttcaattgttctttgtgagttgtcccatttacattgctgagcttcattgaagtgcacatctctagtaacagtcatctttccagtttgaggatgatacactttgtaggcttttgaaactgaactgtaacccacaaagatgcccgaaattgcctttttgtcaagtttgtcatgcttaacctgtgcaaaacaaactcaaccaaacgctttaagaaaagttagtgaaggcttatagccataccagacttcaaatggagttttatccttcaagactttggttggaagccgattttgcagaaaaaactgttgtgttagctacctccgcccaaaatgttttaggcaactccttctcatgcaacatgcatctagccatctccatcaccgatttgtttctcttttcactaaccccattttgctctggagtgtagggggctgtgagttgatgttcaattctagcttcttcacaaaattgattaaattttgctgatgtatactctttccgattatcagatcttagacattgaatcttgcaggcactttgagtttccaccattttcttgaacttcacaaatacttcagccacttcatgcttgaatttcaagaaaaaaatccagcacattcttgtaaagtcatctatgaaaagaataaagtagagactaccttgtagtgattatgttctttgatgtcttgccacatcagtgtgaattagctgcaacttttgagaggctctccaagctgatttggggaatgattctgttttgtttaccaaattgacaagcattacagtttggcaaactatcagaaagtgttggtagaccttttgacatgtcccttttttttatgtttagcattatttcaagatggcaatgaccaagtctcttgtgccagagttccgtgggtgtgacttgagtgaaataggttgcatgctcctcctctgttggatcaaatgagaagcttttacctctcattttaacccttagaacttcccggccagcaatgtcatagataaggcagtgttgatgttcaaaggacactttaaatccctttttaatcaactgacctacacttagcaagttttgatcaatatcaggtacataaagaacatctgatattattttggtacctgaacacattgaaattgcaatgattccttttccttttgcagaaatatagccaccattcccaattctgacctttgagacattagttggcttcaaatccttgaatagagtcttatcatatgtcatgtggttcgtacaaccactatcaatcaaccaacattcagaactactcctcattgaatagcatgttgcagcaaaaatataatcttcctcctgctcaacaacttgggcattggcttcatgctgctgaaatttgcttctacaaattatagcttcgtgtccaagttgattgcacttgatgcactttgcgtctggtcgtttccaacatttgtatggtgggtgacccaattttccgcaatgctgacaaggtggatagtttttctttttacccttacttttgttttggttgtttgcactattttcattgcttgttggttggttcttcttgacatatttctttctactggattcagcatgatggtgcttggttggtaaagcaccttcaactgcacagtcttgtctcatcaacctctgctgctcttgggactgcatggtacttacaagttctgccaatgtaatctttgatagatccttattattttccaatgaagcaatagaaacttcaaatttttcagggacagtcaccagtattttctgaactattcttgaatcaaaaaattctgaacctagcaacctcaccttgttagcaatgctaagaagtttgtttgcatactccttgattgtttttgactcctttattttttgcatctcaaattctctaatcagattcatggcttgcattcccttgatcctttcatctccttcatattcatccttgaggaaattccaaacttcgaatgctgatttgattgtcatgattctggtgaaaatgtcttgtgaaacagcagcaaataaggtagcctttgcctttgactttctagttttcctatccttttgatttttaatctgagccatagttggattgactggtaaaggaagaacttcgtagtcttcctcaactacttcccagagatcatttgcctccaggtgagcctccattcttgttgcccagatgtgataattatcaccatcaaacacaggcggtgctagtgctgtgtaaggagtttcagaatccatctatttgatgaattgaagcaaagtttataggcgttgttttttttttttttgtgtgtgggttgtactgtgttcattcacaggttcttctaagaaaaaaactcttgataccaattgtaagttttatagcagaaaaactataataaacaaagaagagagacaatacgtatgtggaggaaataaaatgattttattctgatcaaattgttctgagtagcaatacaataaataataaattaaaagcaaaacaaaaattaatcacataacaagatttcagcaaaacaaaaaattaaaactgacttgctcctaaagtatatgaaccacttattgattaggctaatccataactgaaacaaagaaaaacaaataaaatatgcagttacaaaagtaatttaaacaaatttaaacaagtagtttatataagtttagtcaaatgcacctaaaggcatgcctaaggtgctgaggcaaggtgccagaaggggtcaacacctcttgttggttgaggtgcacctttctgtttcagaaatagcatgcatctagcattttgttgataaatttaaaaaataagtccagtcatcttggtaatggagatgctaaatggctaaaatactcagaaaattaaatggtaactgtgtgtttgggaataggtttaataacttgaacatttgaactttttattttactatgaatgtttattatattatgcttgttcacttagttcatattgaaatacaaaatacaaaatagtcagacattttactgttcattcctttttttgacattaactccttgaattaatttgttgtctccaaggcaccgataccctcgtgtgccttaaattcatctttcacctcttttttctatttatgatgcttctttagtttttggaataaaaagtatttgttccactgttaataaatactagttaatagttatgtgaaaaaaaagtttcatttgctattttaagatcatatattctgtcattgttaatgtagtttgatttgtcatttttttcttaggttcaaagcccaagactaaacccaaaaggcagccg

SEQ ID NO: 2306 - DNA, 2262 bp, Glycine max
  Intron number 1 from transcript Glyma12g02630.1 (locus Gly ma12g02630) derived from phytozome v7.0 (chr-ID Gm12; pos 1724795 to 1727056)
ccactaatcctcattctcatcacatctatttcgaggtttctctttctctctactcactcatgtcttctttttctttcttgcgtaaactagtcactgttagcacaaggtctcatgttcaaatttgccaaatgttagttttgttaacagagagatccaacttgtgacttttttttccttaaccattgaatccaccttatatctcattgttgtcctagttatatactctcaaacaaaaaaaaaaaaacttgcaacttatgtcttccttttgctgcctatgcacctatctattatatctgccttggaattttgccaatgctgtgagcatggttcgttcaacatgaaagttatgtgacttaatttgattgatttcctaggattctgctacatttggcttagaaagaactttttttctttacacaaaccttgttattagttctacttgagtttttaccgctggagattttttattttttttttactaatttcagctaaaataagaactaagattaagtggatatcatgcattctcactgctcagagaaagacccgaagacaaatctgttgccatggacttgctaaggaaataatgtggcgtatatgcttgaaactttttctgtggctttagttttggttgtattccgaattttgtgtgtgtttatgtttttaataaattattattatcgtgtccaagggggaaatatataattgacttatatatcatctttgtgatatcattatatcttcatctgatttgtttcggtttcaatgtctgttgttttttctttattaaaatattgttcgtttgtggtttaggattttgaactttgtttttatccaatgtctttggctcatttgcaacattttttatgtgcttttaatgcttcaaatgttgatggagaggcagacctaaattgatttttccaataaggttttgtataatcatttattttattttggaaaatttaacagcatgttgcttggaatttatatccttttcgggcaattatggagcaagtttatttttgtcaagatttgacttgtagttggtcccagaagcatcctaatctgttgtttatgataatttggacttatccttcaatatgataaaatggtcggtcctgtgggacttggcatttgattgcaaacttgcaattgatatctctgagctacttaactttttgtggtcattttcttatctccgtctaaggaggaatctagtgaggaatgtggtagaaactaaagataagctggcatttttgacctctgaggtttaataatatgtatttaatcttaaaatatacttcaatttactaatactcggtaaatgctggtagagagttttgagttagactttagagtgcaaaaagtcatactgctattattgtagtcaatgataaattacaaggccttggccactagctgcattcagaatgagaaggcaaagttcttgtggggacagggcaaaggttttctttagcggcatactttggggaaaagctttctcacctaactaccactaaagttgggcaagcaataaatttataaatgtcacaagtaattagttctaaaataacttgacattatgaggattaaatggattatttatctcttcattaaattttccttttcgtctataagattaattatatttgtgtatcaagactttgattggccaatgttgagccaatcaggaagagagaattgacatgtagaatgatttattccataagtgttgaatgaattcacccatgggaagcaggaaaaagtgagcaagagtgagttcaaagaggttctctcagacattctattgggtatggctgctggactgaagcgtgaccctattgtgatacttcgcattgatggggaagatcttctggagtttgttaatggttcaggttatgaagctgaaatggtatccatattctctcaaattgagtcccctgacagatcacttcatgaccatataattgaagctcttggcaagctcactgttgagcaaggaattcctcctacatcagattcttgggtagccaatttatacaaataatatcgttgactttctttagagatgctacctatgttatcaaaaaagtcatgagaaattaaaacaagttttcatttgttgctaagaagctttattttatactttaaccaagaaacataaaaatctcaaacttgtttcatttaattccttcctctcttggcttatcatttatttttggtttaggtattgagcaacattgtggaaccggcactgctatc

SEQ ID NO: 2307 - DNA, 1678 bp, Glycine max
  Intron number 5 from transcript Glyma11g03420.2 (locus Gly ma11g03420) derived from phytozome v7.0 (chr-ID Gm11; pos 2290939 to 2292616)
actattcccacaacatctttatcattttaaatttggtgaaagatagcataatattctgtaaattattatttgtgcaataatttaaagattccatttcattttatttctaaagtttctctcttttgttaataatttatgaccgggtcactcctaaggtttcttttcagtctcctttaccatcaattattttttagaagctatcttatatgtaaggagactgttatcttgtcacgcatattactttctttattctaaataaatgttcgagcataaaatttcaatattttatctatatagttttaaattttgctgtttatatattttattccatcattattgtgcttcttagttctgtcaaacgcatgaatacatgtctaaggtatatgtggcgataggatcattatgatgaagttatctgaccacttgtattggtataattcaaaatgaagtgctattgttataatacaatcaagaacgaagtcaattttttttttttttgctagaccacatggcctgtttggttcatgtggtcatgcattcttggcttttttgtgggttttttctaatgtcttttaaagagtcacgtcactggtgacttcggttggcggcatcaatagttttctccttcctcccctcaccaaaaaatgtaattgtaattcacgggtttatgtcaattcaattatcatttcagtgtgccgttttctgtatatgtttatcttctcaatgtgaaagctcttattcgtatgtgactaaactgatttgctattgagtattgactataataagcaggcagctaatactgaacctgaggccgctgccatacacaatggtgaataccaattaacaaagaatgagttttcaagtcttggacgtggaaaatatagtggtacttctatatttgttaccaatgcttttctgtttatatctatgctgtgacttttgtctttcttatttgatgtaataagcatgtgattgtatgcggaatctttgttgtgttgaaagttatcacagggaccggtggttctgtcttatatgaacaggaggaacattgctgatatcatatttgatattgcaatgcaagcatttcttgaatgatggaaatatttatatttggctaaatgcccttagaacatggacttgttttttctttttcccaagatgtagagtttaattcaaccaatagaatttttaccagcatcttcaaagaacttttctttcattattttatttcatcttttagattcaagttcatatgtctgttttgttttgaaaatgaatctgatggctattagtaaactatacattgtaagattcgagtaaattaatatttttgatggatcctagttcatatgtctctacctgttgacttctaatagatttcaatatatttgggaggcaatttatatgtgaatttgaggggcatgaatccatgatttgctcaattattaattcattcaaccagagtaaagactatatacttcataaacatgctgagtacatttatcacacttcgctagatactcatgagcactgtcgctgtggataagtgtgaaataatattttgtcctttgtctttgggtaaatttgtctacaatgaatctgtctgcaaccttcattatttatgatcttgtcctttgtagatgtactattattttcatatatacttttggatatcaga

SEQ ID NO: 2308 - DNA, 2169 bp, Glycine max
  Intron number 5 from transcript Glyma04g34830.1 (locus Gly ma04g34830) derived from phytozome v7.0 (chr-ID Gm04; pos 41085459 to 41087627 reverse strand)
gtgccgaaaggttagttgttgcaatacgattacagctttgatggtaaaattgatcgtgctttctatcttgttaagtgtcatccattattgcattgactggcttgattattgttgagtctcttcacaatggttaggtgctgtggatagctagaaatttgaaagttttactgtatatctaattattactgtcatttatgttctagagaaagaaatgttattattagatacaaatgataaaataaaaagaggataagggtatccttcaaaccacaatacaaacactacccaaggagaaaacccaaaattgaaccacaataatttccccaaaactctactaggaaacttcctccacaaaatacctgcaacaaaagtgataaactattgctaggaaaaactcaaaacaataccccctttgctttaagcaaagaggataacttaacagcttgagaatgcctaattaagcctgctgattccttcacagtttatgctctccacaatatacagttaatctcgtttgtttgtaaaattgatcatgctttcaacattgttaagcatcattagtgtattgattgattctgtgtatatctagaattttgaattttgattgtacattcagtcattcctttcatttatcatattaaaaggaaatattattaaataggaaggggaaaatacaaaaagaggattagatatcctcgaataaaaccaaaaaagtctaggaaaaaaaaaagttaaaaatcctaggaaaccacaaagaaacacaaccctaggaagaaaaaacacaaaatggaaccacaaatgtcccaaaggccaaaaatgtactagaaaattccctccacaaaaatcctgcaacaaaatggataagtcaatactaaaataaactcaaaacaagatcccctctgctttaaacaaagataacttcaaagcttgagaaaacctaattaaacctgctgattcgtttttggtctccataatatactgttgttgctaccttcttccacttgtattatatgtatttggcaaaagatcacctttacttcctttacccaacagattaatcagaaagtgattgtggatcagaaaatcaaatcgcttgtattgtgtgtactaatagaaatagcttcctcatccaatccaatgcccttcactttgtcaaaaggtttcatctgttcaacatctaggctaggcagaattcccttttcagaaccagcattaatagaatggcctcctagaagattaatattgttctctatgggatatgggctgcctaaacttataattattgttaacctcaatactttgttgttgttgaaaaagcttctttacttcttctaagttactatcaaaatcaagaaaatcttcctgaactttttgttgatcaaaagttcaggatgagtcattactttgatcaatctggagatcatcttcgacctgtagttcatcctcaagcagacctctctcatcttcatagagaagaatcaaattatcttcattatgcaaaaacccactcaactcaatgcctgcaaattagaatcttctccaacctctttagtaaagtttcaatgttgatttgaattactagggcactgttaacattatttaattgcactctatctaacccaactaagtgtggaagatattctttgattttatgtattactatgaacaatattatgtagcttgatgttgccaaaagttgtattaccttcttatttcttgaccaaggcttagtatgtgtttagctggaatttgagctgatagctgtgtgatacaaacatccaatataagttaattgagttttggatcagatgtgtgttttctactcccgtttcttgtttcttgataataaacctgtttctattttttcattgctgttgttgcttatatccatggcctattagttccaatgctctgggggtatataaatatataatgctctaattgttgtgcttataccttcctaattgtggtttagtttattcaaggtttaaaggggcattggattggtcttaatgcttgaatcattgtttgataatgaatgaaacattaagacacttatgagttccatgagtggtattttgtagatatggtttggttaattcccatttcccgctatctattggttggcatataggaaggaacgaaacagtggattgagtaaggcaacga

SEQ ID NO: 2309 - DNA, 8909 bp, Glycine max
  Intron number 2 from transcript Glyma08g27680.2 (locus Gly ma08g27680) derived from phytozome v7.0 (chr-ID Gm08; pos 22020263 to 22029171)
aaaggaaaactttttgagtattcctctgaacgcaggttcctactcattcatcatttctcactttctttttcttctcttattccttttcggtttttatcatttctatctacacatgcttttttcttgttttggatccaccttttatttttgctttatatatgatcaatctggttatggaaatcaatatttatatattatcatatatcataactactaatttaattatttcgagttttcttaatttgtttccttgttttttctatctgatttgtgctcatcttcttcttcttaatttggtaattatctgtttatatatgtgtgtttttgtttcaccttaccctgaaatatagtgctaaagtttcgaccaatacaatagtagtattcacttcagttctacaacttgctggagtttatttttaatctttattacatatacacttttttttcaacgctaagtttttttgtttttaaaaaggtctatttttggtctggtcacgagtatttcactatcctatgtacttttctctcatcacatatagttatctcataagtcataaactcgaaatggaagacttcttttagttattacttttttaaaagtctctttaaatgttttttttttgcattcgtaggcatgagagctttatatgtttgcgtcagcttgtggattttttttttatatatatatatatgtgtgtgtgagaatatgtttactataaatatcaagtcaatcaccttattattttctattaatatacgatgaaatctaactaacaaattaataacaccctagagctttgtgtcaccttttggaagggagtgacattatgccctatactttgtaacctagtaatgtgcctactttggtccattgggtaataagagctctaatccatgactacttgtaatacaatttgtatgcaactgttggaagagggtgacgcaagttaaacggtatcttttcttttaggattttacaaaagtagtcacatagtaactgaaaaaggcttctggagtctggaagacttattggataaaatgtgagttattttaaattttttactactttcgtttaaggataaaaaaatacattataatctttcattgatataactcatttgtaagtaattatgggattaagtctatttgaagaaaatgtttgtattcaaattctaaaagatatatatttacatttaatgtttcatagaatcttgaacataattactctgataaaaaaaatcatttgcaagtagtgtaacaataggtttttgttgtgatcagtgacatgtcttaatcatagaatgaaacaattcttccctttaatatttttctaaaattaaaaactcatgttattaattatgatattttaatacttaaattttattttaaagattaatatccttattttgattacccaagacatatcataagaaattaagattaccatgtttcataaatacattttgtgaaattaacttaacaagtttccttaaactattaatgcgttcatgaatattattatccagcgggttaaaactcagctgctaaagaacatgcatgcaaaaaaaactgtagaggatttgataggagcttaaaattgtaatatctgatttggtggttgcatggtatacgagcttgatttggttgcaaagtatatttgatttgatgacttaaggttagggtcatcaaatgatggtggtctggtggaaaatataattgggtatatataaacaatatatgacaaaaaaaaaaagttatggaaatacaacagttgtacgtgtctatgatagacaactctaagctctatacttgcattgtttttattttgtttggaagataatgacatgagagatacaatggatcctactcgagagttcaataatcacttagtagggaataaaactaccacttatcctttcatcctttaaatactatatataacaaactgaaaacagcagatattgctttaccctacttcttacttctcaaatccccccaaaaaaaaaaaaaacactgaaatggaatggatatgcaagctttcactgttttatatatataatacattgcattatgataaatggggatattagactattcgaaaatagtacaacttgcataatatattgtattaaatgcaattattttaattttgttgcaattcttccgtggaagacattcttaaaaaaaggttaattgcgttttctcttccatgtttaatcattgctactttctataaatacactaaaaggtttattttcccaaccactacattcgatcttttctctcacgattaattattagaacctaataacagtttattaatgcaccggatacacttatatatatatatatatatatatagcttctgtgtacataggggtgttcgtgagctatttatttgtgattcttttgaatttcactcaataaatttccaaagtttgtttgttgaaataaacaaactcaataattattagataattgtaaatttatttatcatatttatttaaaattttatttcttattaattgtgtatctactataaaccacacattgctctgtctatatatatatatatataagtgaggtaaagtaatattgtataataactatgctaatcaaatcctgatgatatacatatgtgaaattaattcaaacataggttacatgtgttatattaaacatcatcttaaattagagcgcacaaatcatatatgctaagtttcctacaacctgatgagacctttgagggatttggtgaacaagccaccgtgtagccaactaaaattgatagcggttgttgttattactcctacaaaaaccttttcttgatcatgaagtgataattgatctatatatatgtttggttctctagtacgaaagactgattagaagcaatgcggagaacattctggttatcacaaatcaactacatttccttgagatttcctaattaattgacttaaatgaagtaacagtcaaagctacgttagttcacatgatgtggctgctacagtagacttgataattatattttgtttgttgcttctccatagaatgaagtattccctagaaaggaacacaatagcctaatgtaaatctccaacgagatggaggtcatgcctaattgttatggggagcatgtctgacttaaaaccttaagtcaatattttttgtatccaataataacattgacttggaagcaattgttaggtaaaaagtgttattttacgttagttatatttctaatcgatgtaaaatggttttaaaaaacttgagccttacaaactcaccaccaaaagctctctccctccaaacaatacccaaaccctatagtgcattgacaactcaaaggtggttatgggaatgaaggatgcaaacaatgcataaacgatgcactttagttgtagaagccacccgaggaagtggagggacttcagggtcatagtggtgcgaagcttgttaagggtgcgttccaagtagaagtctcacatcgtacgatgttggatagtgttcaattttcacggcggttcttgtatcatcttagcctattcgtttctaattgaaaaatcgtctttgaagctgtcgttgtggaaagtgttcaattttcacgacggttcttgtaccgccttaatctgtttgttaagggtgcgctccaagtagaagtcccacatcgtacgatgttggatacacatgattttagggttttgggtgagacaataaggtttgaaaccttagctctatccacacctcggtatatgcttgaaatcttgatctcacactactagaaaattgtatttcaacgacggttatttagtgctttcaatgacgattgacaaatcgtctttgaagctgtcattgtggaaagtgttcaattttcacgatggttcttgtattgtcttagtttattcgtttctaagtcggttttgcaaaccgtcttagataggtttacttattgtttaaaaatgtaaaaaacatcaatatttgacgacagtttttatctaaaaaccatcttataattgtaatattctaagatgattttactccaaaatcgtcttagaatgttacagttttaagacgattttaatttataaccgatattgattttttttaaaatatttgttttgtttttatatcaaaccaaattaaacctacaacttcggtcatgcagacccaaacagatcaattattataatatattacaaaattaattttggtaatgaatttcgactaagcaaaaccaattagtaactaaagaaaagttgtgaattaaatttataggtttcttattgaacaagcgtaagcattcacaagtgcattatatttacatgtagaaacaaatcataaacaaatgaacaagtattatttattgaattcaccaataacttacaatgtgaaagttgtgaattaagcacaaagctctaacattcactaacccgaagctagataaacatgagttacattgacaatattgtagacatacatgaagcatatatgataaaatttccacttacatagaaagcagtgacaatttcgatagagtcaccctccacaagcttgagctggatggtcactttcccaaacatatatctactcttagatccaaatctagcaattgcaatgttcaaaaaaaggtcacatgtttagctaaaaaataacaaattttgcaaggctattaaatgaactaatataagaatcaaatcttacaaaaaaaagtgtaaaattagacataacgggctattaacaaataacattactaaaaatgccacaccaaaatagaacctttcaatgttctatcgtacataatggaagtaaaaccatatttaggtcctatttagataaatttttctataaatacaattttcaaggcaaaaatacatcacaagagtccagtttcatcaaaatcttgaattacgcaataaccacctctgtaatcttatcgttttcctcaaacataaaaaaactaaatagtatcataaattgaaatatcaaaagcttagatcctctaagtctattctagagaaccaacaagggtcaacgacaaatgacccttatatcacactgatagattaggattgaagcagagtataactatatctattttttgcacaaaacttaccatagtatgatcatgataaacataagagaaaacaatctatgcactggattttacattgttgtccaatttcaaacatgtatgtatggtaagtttgttgattttaacaataattaccttaaaagccataaatatcatgatttttatttaatccttttccactataagtgcatagaaattacattctaaacataagcctatattgaaatagacacttaaattgccaaataaactcaactagcaaataacatttgaaaacttacaactaaagatttaaggaagcccaaaacaactttgctttccgcagtcaatatacgttcagcttcttccaccgtagtaatgttggacacattgggtcctatcttcttaatctatgtcactatagtgtctctgcattgcaatgcaacaaaaaaattcaaacaatcaactccaattgaaaattctaaaagcaattacacttaattgagagcaaaattcaaagatccaaaacgtgcattgaattttacttggttctttgggtagtgtagggcttgtggaccctatgaacgaagaagaagacgatggggaaatccttaacattgtacttgtttgccaattcgttttcgacggtggcgttgaccttggcaagaatgatgtcatcgggcttgagcacgatggccgtagtggcatacttcgacgcgagggcctggcagtggccgcaccagggtgcgtagaacttgaccatgaaaaagcgattgttcttgatgacgatggtgaagttgcgctccttcaaaacaacgacatccttgttgtccacctcgggctccttgacacctcctctgacgagtggtcgaagccggtgaagtcgtcgcagtcgcactcgttgtcagcgtcctcctcgtcgaattggtggggatctagaaaatggtcgtgtggagaagtggtggcggcatcattgggttccttgaggaagctaagatcttcgttgttgttgtttttgttgtcgttttgtggggggggggggggctttatcgcagagagtgagggagaggaatgagaagagagtggcgagagagagagaaacaaatagcttggtcaaggagggggcgaggaaggcaaggaagcacgggagggaggagaaggcaaagatagtgagtgagcggggtgagatgacacaactaaaacatataaaaaattaaaccctaatttaaagacgattctcgcgaaactctctttgaatattacaatatgacgatgatttttctaaaaccatcgttgttttgaggtttcaaagacgttttcagtgaaactatctttgaaatgttggcaataattacaagattacctccgttatccaaacgacaacaatttttcaacaatcatcattgaccttgtgtcataaaaacatgtatttttagtagtgttatcatctttcctctctccattattgactttttgatctagtgctttctattggttctccaatatgcgttgtgaaatttagggtttagttcttttgatgctgatattcgttactttgattctcttatgaggaatttaagggcataattctttgatttgggttcacacatcctttgattctttggtattcttcgtcaattgcaaattaatagcacaaggaagatgagagtctagaaagctaatatggaaaactggcattggaatttgggaattggaaatgaaaaattctatgtcaattctaataaaactgacgtagaaaaataaacaagctttttacattataacatctacaaaatgtcaaaacaattggtgtgaaatatcccttttaactaatgtaaaagatctaaatctaaagtgttatagcgttgtaacttgtaagttattttgactaactttttaaattattttaaagtttatttgttacacaagtttatatatttagtagtttttagtgttttgcgtaaactactttaactattaactaacttatgaaaaaaagttaacggatatgttagttttttctttcttttacttgtatcctctctaatttatttgaattatttttattgtgtaactaaatgtattcttttatatttattaattaattaacttattagctaatcttacaaaatatttttagaaatttacaaattttcaactcttggccagtttatgtgtttcaaagatgcttataatcgtttttgttttgatctagggatcaagattttcagcttggtcattactttatctagggattagtttgctttagtgtagaggtctagaaaactagaaatacctcaaattaatttaaaaggaaaaaaaatctacaataaacatctttagaatcttcacaggtttgtagctagctataagctgaactacaggagtagctcgttgaacatacaaatacagttagttggcatgcatggttgtccgtgcactctgactatcgggagttctgtaggggagtgtaggtgccaactaaaattaaagtttagcagcaaatattatgatgactatcttcaagaacacataggtcccctgccctctaatgttttaaaattaaatatgcaaaatattaactctttgtttggttagagggaaaaagagaggaaatgaaggaaaaattttaaaaattaatctggatttcatatttttattttaatttaaatgttttttctttttcattctcttttctcaaacagaccctaaaaattatattattcaatttttttataattagtataatattattttttatgcatcatattacttgtaggttgtatgttaattggtagtaggttttgtgtgatgttttttgttagaagcaaatttccgcaatcaaaagttatatattagattaatcttcaagtggtagagattattagagtgagtttgatttcttctaataaaatctttttttaggtatgacgagataatcaaatccttttcattatgtttaaaaattcaatcatttaccaatagtgttggaccttatttgtattttaggtgtaatgttgatgtaataagttttaacttctggaaattatattaaaaaaatactctgaacttagaaacctatataatcaacaactatttttgtcacaacaaagtcatattgaaaaaaaggtgagaaatgaaatatgaaaaagaaagaaaaaaaatgaaaagtaataaaagaaaaataagttaacttataagttattttttatgaaattatttaaaatttatttttatcattaataattaaatatttcttttacgttattttatatttatcaactaacttattagttaattttatcaaatattttcttagtttttttctaaaagaaattacttttttaaatctttttataacagattcgtattagttaaatttgcattcattcctatattaatccagcaagccttacagtccaagcttaagcaaatgctatatataggccatcaaaatcttcttgtgatgaatttggtgacaggtggtgaatctaaataatttatcggggagtaacatgttaatcaatgtttttcattaacacccaatggtaaatttactatggtttgtagttgaaattttgtatgtattacttcgatcgaagagctacttattgaaagtacaaaagtatatatattcagctaagcatagactgattaactaattaactatttttctaaattacatgcctgtttgatgtaattttttatgaatgtgtgtaattctcctctccaatgtccccaacattttagtgtacttcatagagaaaaataaaattacgagttttcaggtttttctattggttatatagtttttcgttttgacttgtgtaacagc

SEQ ID NO: 2310 - DNA, 924 bp, Glycine max
  Intron number 1 from transcript Glyma20g20950.1 (locus Gly ma20g20950) derived from phytozome v7.0 (chr-ID Gm20; pos 29703063 to 29703986)
ccgcaacaaattctccaacgctaactcaaactcaggctagtccttttctttttgttcaatttctctctttcttgtggaaatttgtacccttgtagttgaattggataatggatattcggtgatttcgttgatcatgtcctaaagttgagatttttggggtaaagattgtggctttttgtgtgattggattaagtggaaagggggggatgatgggttttgttgtttgatagattgtgatttggggtattcttaaaattttttgatttttgtatctggtggttgttcttagaccttagaattgtgagtttgagttatcatgattgtgtaaagtgctgatgtttaaaatcagaagatggatttcttggcaagtggttttgtcatactttatttgcttgctgcccacagttatatgtgagtttagttcaatattttagctttgtaggtggtccttaagtgatgaagtttgaacttgtggctagtgttttgaattttgtgacatgggtttggatttgaatccttgcatgttattagagagtaccattgttcaaacttcagtgaacataaggcaaatctcaaagttgaaattgtcactggtcgtcttccttattcagtggaacaaagggactcacttgaacaaaggctaatctatgataactttggagagaaagacacagaacagttatcttatagtgacactgattctacttatggacagagaaaaatgaaaacattatatttttgaactttggactaaacagttatcttataatgacactgattctacttttaaaatgcctataatagactgatagtgatataatgtgaagtatttgttaaacttgcctgcatcatatgttcttcattttaaatttgatgtttttaattacagctcaactcaattacattaaggaatctgaagagatt

SEQ ID NO: 2311 - DNA, 2746 bp, Glycine max
  Intron number 1 from transcript Glyma03g32900.1 (locus Gly ma03g32900) derived from phytozome v7.0 (chr-ID Gm03; pos 40623211 to 40625956)
cctttcgtcaacctaaagttgtcgccgagattattgtaagttcaaattaaacaaaacacactaatagagtaatagtacggagtttcttaatttattgaccaagaatctttcctaaagaataatattgttctaaagtgattaacgaattagcaccgtagtccatacactttaatttcttaaaaggcactccatgataggacaatttcatacaatatccgatcatagactatcatgtttagtaaaaaatttattatcataataattattttaaaaattatatcaataataatataatatgaaattaaagtattttgtttaagttttattttgtcttaatcctctagttcattagagaataaaaattctaatttatttagagtttaattaagagataagtaaagtctgacaaattatttttgtcaaggataaactcaagtagtatctaaaaaaatcaatattaacttcaacacattaataacttgtgtttaatcatgtgattctacaaagactaatgagtagcttttgatttagttgaatttaaaccgttataaaaaattaatgactagttttgcttttatttttatttagaaaagattttaaatgaataataaaatacttctataataagcataataaaaaataatttaaaatatcaaatttattatttagaataaattatacaggtttcatcaaattatccaaatttcttatttattacctccgcacttactcccttaattgtttaaaaaacattaggcaatatttccttgtaaaggagattggtataaatattaaaaactaaagagaatttgtgttatttcatgaaatgctaaagatagtaaatgtaatttgctctattatttatacaaaaattattgttaattcaagtagaactcaacttaaattccataaataaaattttaaatttaaactttatatatgaaaaaaatatgattgagaagaaacatcttatccaaaagatagttagtaagatttttttgataaaaattaatcattcacaaaattaatgaatattttacattaggctcaactcggcttacatagaagcctgatttgacctacgaacttatttaaaagtctgcttaaagacgtctttgactaattaattattttataacctaatgaaatattaactaaaaaaagaaacttataaaatttcgtataagtaatgtacaaatccaagaataattaataaacaaaatcatattgaattcaagttgttaaaacacaaagtatatcaaaagaaaatgaaaaaaacaacataatattaaaaaatatatggatttgagatgatttataccaatataaccaaataaaaatatttaaattttctgaaaatgtctttacaaaacattctttttttttggaagtattaatttgattgcattattcttttaacttgagtcttttcctttttgaagattttttacttgcaaatgaattttttaaacactttatgtcacttcattttgtcattcataatgtcatattattattattattattattattattattattattacttaaacgcttgtcaagtttaacaagttttttttatagtttgactttgacctttttatctaaaaaaacttttgaagaaacttgagcttagtcttcatagtaatcaagtcaaatcgagccgaaccttaaataggtggagccaaaggtccttgacggctccactcattttcatccctactcattgctaatggtaacatcaagaatcaaagtatcaaactaaataatgttattttagtctaaattgaatatgataatatttttcttttattaaatattttttaatctatgtgcataaaccttaaagaaattgaaaataataattttgtggatttcattttatatttaataatttactctcttaaatatttccttgtaaaggagattggtataaatattaaaaaataaagagaatttgtgttatttcatgaaatgttaaagatagtaaatataatttgctctattatttatacaaaaattattgttaattcgagtagaactcaactcaaattctataaataaaattttaaatttaaactttatatatgaaaaaaaatatgattgagaagaaagatcttatccaagataattagtaagatttttttgataaaaattaatcattcacaaaattaataaatattttaaatgatgatttaaaaaatatacaatctgtttctcatatctttagatgttttagctttttgttttatttcacaattgttgatgttttatatatagtttgcaagtctaattaatgttttttctttcaaatatatccttcgttaattaatatctcattactaatggtaacatgaagaatcaacatatcaaactaaataagattattttagtctaaattaaatatgataatatttttcttttattaaatattttttaatctatgtgcataaaccttaaagaaatgctaagaaagtattttttagtacattttttttaatattctctaattgaaatttattgaaaataataattttgtagatttcattttatatttaataatttactctcttaattttacaattttatataacttttaatttttcacttttttatttatttaatttttagtttattcaatttcaatattttgagtaagtttttttggatttttgttgagaattcagttatatataataaaatgatttcagggtggaattttgttggggccttctgctattgggcg

SEQ ID NO: 2312 - DNA, 2331 bp, Glycine max
  Intron number 11 from transcript Glyma19g18330.3 (locus Gl yma19g18330) derived from phytozome v7.0 (chr-ID Gm19; pos 22208822 to 22211152)
atatccttcacagcactgagataattgcaaaagcggtatgtcatgtaccttcttctaatcaacataattctaatatcttttaatgaaactaatgagtctgtaaatctgttatgatggttgatagtctgtattaatgtatcatttaagatcatgatggtatgatattggtcattcaaattgtaaagtggtttaaagtgctatctattccagattagctgctttatgaatgcaattgctagaaatattataaaattatttatgtgtcttcacctaacagcttaagcttttgagatagttaattcatgacgtgatatcaaagcttctaataaagttgaatttaagacaacctatgcttcatccacgcttcaaacctaaagaccctgacatagtggggcatgttagaaaataacagaatctttcatgtgtctttactctttatgaaacagcttaagctttttggtatcattggttcatgataatccaatcttgatgttgggtcaaagatgtcccgcatcggtcaaagtaatccttataaaacttggcaatttcttcttcttgatttaacatttggagtttagttaagcctaatcctattctaataggaataaaatgttttgtccacttttcagttgatgtgtggcttctttcatcttaaatgctgaagcaatagaatcaatttgctaccttgactcttaatgtccttttaaataattaaactgtcatatcaatagaacttccctatagatcacataacaatgaaagaataaaacattttgagaagaaattgacatcgttgggtactcaaatatgacccctttaagagatttgagatccataatccatgttaaccttggaacttacaaaaccattgtagcggtagtgaaaccaaaatgcaggaattaaaaggaaatgtaccagagaagaaataaaacaatagtttagaattaaaaggaaatgaacaagagcaacttctatgttagaaaaaccacctaaattgtggtcacccctaaatagaggggtgtgttgtaagtcccacatggtgggtagctgtgggcaaaagggagacatgttgaagtctcacattgagtaaagatagtgacgagatagacaatataagttggattttgtagggttaatttagactcataactcactttctaacattatatatagtccaagccaaggtagtgaaaatggagaaagtaagaaagtctatatcccacctagaaatttaagccatacaatatctaccttagaaagctattgatcatttatctagttcattgagttctaattttgatagactcatcaataatccatgttaactttggaacttacaaaaccattgtagcggtagtgaaaccaaaatgcaggagggaagattggttgagctatgcaaagagggttccattttcaatcaatccttagtagatagaaaaacatgggaaatgaaattactaaagtacatgttaccttttctgttttgctttttgttatgatcaaagaatgaggaaatgacaagtacttttcattattatcatatactcttggctttggaaatattttgggcttcatttctattaatgacttaagtcttgtttgaataaatttctcaataagcattttataagagaagaaaataaaaagcaaaatgaatcaaatttctttcataagttaaaattaactcatgcttctcaattttgggaaaagttatgagagaggacttctatagaagttgcaatgcataagttgattttaagtcaagggagtttaattcattttaccttcttattttcttctcttataataagtacttattgatgagtctatcaaaactagaactcaatgaactagataaatgatcaatatctttctaaggtagatattgtatggcttaaatttctaggtgggatatagactttcttactttctccattttcactaccttggcttggactatatataatgttagaaagtgagttatgagtctacattaaccctacaaaatccaacttatattgtttatctcgtcactatctttactcaatgtgagacttcaacatgtctcccttttgcccacggctacccgccatgtgggacttacaacacacccctctatttaggggtgaccacaatttagatggcttttctaacatagaagttgctcttgttcatttccttttaattctaaactattgttttatttcttctctggtacattttcattatggttcagagggatcacccctctaattgagttgggcacattttgtggcatctctatttaataattaatatctttgtctaatttgcaggtagattctgctgcaa

SEQ ID NO: 2313 - DNA, 2870 bp, Glycine max
  Intron number 4 from transcript Glyma14g05270.1 (locus Gly ma14g05270) derived from phytozome v7.0 (chr-ID Gm14; pos 3730175 to 3733044 reverse strand)
tggagaaaatataatcatcgctaatatcgatacaggtatgcatattgcttagtttttttttttttgttcttttttagtagatgcatagtgctttagttgagattaacatttattagagattatgaaattataaatattcctttaaagcgtcactgtcatatgatatatttagttacatcattttaatagttattctaaagtaacatgtgatatgacttgttgatatatatatatatatatatatatatatatatatatatatatatatatatatatatatattaataagtagtagtatattttaagaaaattacatttaactatatttatagaaattaaaaaatattgtatcctattttttaaaaaaaatcctaagaaaagccgtacgtcattttacaacgcaacagctcagcttttaaattacattatattacatttattccgacaacaaattgatcgaaaatttaaggtgctgaactgatattttattattgtgtttacttcttcagcaccaagccaccaaatatcttaattatgttttaatttaaggtgctgaactgatattttattattgtgtttacttcttcagcaccaagccaccaaatatcttaattatgttttaatttaactattgaattaattcgatatctagatatataattaagacattttttctagaaattttaaaatattgtttttatagttacaactgttaaattgcaatttgatttcccctttattctttaacaaaaaattttatctccttttaatgcaattctggtatttaaaaaattcacatttatgatttaatctttaattttacatatattttatttcttttaattttagttcaattgaaaaactttaaacctaacatattcatttaaaatattattaaaaaaattaattaattaaaatataaaaaaataagcatatagaaaattaaattaaggatatgacaaaaattgtatatttttttaaaaaagagaaaataaaattataaaaatcaatggaagaccgacattacaatttatcccattacatatatatatatatatactgtgatcacctatccatctatcagctcaaaaacacgtcggtgagtcgttttaggtttagtttaagtttgcttcttctaaccaaacccattcattttaaataaaaaatgagaaattatatatatctatgcaaaaatcaaagtaatatatttaaataatttcattattatttgtaagagaaacgagaagacgatgttcttataattatttgaatatttttcttcaattaatgtattttttgttgtaaattattaatagcctgttcgtaatcgagattttttaaaaattgtttttgataaaaataaaagaaattctaattaattaataggtcgcaaatagaattttaatcatttcaatgtcgataaacttaattctttaagcatatgcatatgtaacaacatgaacaattaatattattttaaaagttatacaagggaaaataattaaatatctttaaataattaaatatcaccaagcttgattttaattcaaacattaaaacctctcttaacaacaatttaaccatcaagattataagaataattatgttgtactttagtttcgatttttattattttcttatatatccctaatgtatccctcctcttttcatttgtatcccaaataccaactaaagtgaaacaattcctcaggtttacattggcattgctatatatattgtaacgttgaacctacaaacaccaattttcaaaagtataaacaattaaacacacttgctaaaaatgattaaacatacgagcaatccttgaaagccacaacacaatggaaaacagaatcaatgatggtgtccaccagtactatgtgtcttaattagttcctaccattatgaaacgataaattacccaagtacacacaacgacaatgagacacaaagtgatcgacaaagaaattaaagaggatgaaacacaatgaaaaggtaggacttattagtggcacgacacgattgtttctgtgtaactgtgcattcgggttgttagacatggtgcaatgacaaagagattaaagagagagacccaagatgcagagattagagggaaagggagaaagttcaatgtcattgcttacataattacgttaatgctggaaaaaaaaaatatgacaggaaataatataccaactctcttctttacgttagcattatgcataaaattgtggattcatttttccagaattgtgagtagatttttgtggaaaagtaaaacatcacccattaattgactaattattgttaattttttccctaaaaaattattggttattattatttttttatttttatataattttaaaactatataaaattattttaatatttataaacaaaataaaataaaaatgatccccctccaaaaatgattcacctcgactgtgcttaggacaaccactgtatattaataatatataacagtatatgatattttctaaaatataataataattataaaagtaattttgttaagataatctatattaagaatgatactataataagttttacattaatttgtttgtattgtgttcattgtgtttcaaaaatgtctcgtaatttaaacatatttgttatgcattattctctttatgttttaccttagtgtgtgccaatcacacctattaaataatttattttaacaaatggatggatttcattctcactactataattaaaatagtttacattttatataaaaagtcattaatttgtactccaaagtccatcatattcctcttgcaaatacattagtagctttttgaacaggagtttggcccgaacactccagtttccgcgataaa

SEQ ID NO: 2314 - DNA, 1412 bp, Glycine max
  Intron number 4 from transcript Glyma04g01110.1 (locus Gly ma04g01110) derived from phytozome v7.0 (chr-ID Gm04; pos 679319 to 680730)
catgtaagtgtcattccttgatttaccgatttgattttcctatttgttttcatttgatgtcttgtgctgaaaatccaagtgtcatgtatctcctttcgtcaatcaccatgttgcaaatttgcaacttgtgtgtcattcaaattatacagattttcttttcttctagtgttggttatttgtcaaacaaggttcgtgtcaacaagttaatgattttgtattgatttatatttttcaacacagcagcacatatgccatttgacatctattgcttgtaaacattgaattttttataattttttctttttctggagaataaagacaatattattgctccagccgttgtttgatgtttctgtagccaaggataccttctcggaaggtttatttctcggtgatgtttaaagggttttggtccacttatggttgacatagtttctctggacactagggaggatagatagttaactagtttttggtataacacaatctggtaaactgcctactaagcacttatgttagtgataaattacatgtgaaagtgtgaaacaacttgtagggttaggataatttctgctggaaattgaaaaatgtcatattagcagtgctgaaaacttgcaactagaattatgattctgtttaagttaaaaggtgtgtgtataaagaatacattacaagaaagtataggaattttgtattctaatgcgaattagctctgaaaatcacatttgaactgaacatttgatttgagattagagcctgagttgaaacatcgtctggctgccagtttttaccttgacatgtacagtgtgcattctttataatagatgcacttttaacttcttatttccatccagtatatgtagttttgatagcttattcttgctacccatttaacatagccttagaatagcactttcaatttcactcccacttgttgaactgtagaaagtaagatgttataaagtaacttggtctcaaagaaaatctgttaccgagctctaacatgataagaaatcttcttgggtgacttgtactgctctttatatgcatgttacataaggcttatgaaggatggtgatacattatggttaattgcatacttattgtaagttgcagtcatttgtataatctattagtaggtctattgtaaaagttttaaatttggtatcattgtagcatgcttttgcttggtaatgcttgattaacttatagttctgtttacaatcttaccacatttttctttgtcatgtttcttgcttctgtcttaaaatactttatgcctttatactgcattatctaattgatactttctgtatagacatgatctctccagttatgtctctaaactctaattttgttttcaataataacgtgcagggagaccaaaattctcctggtctcataccactggc

SEQ ID NO: 2315 - DNA, 5061 bp, Glycine max
  Intron number 1 from transcript Glyma03g40880.2 (locus Gly ma03g40880) derived from phytozome v7.0 (chr-ID Gm03; pos 46492807 to 46497867 reverse strand)
gtcgtgacattgaggacgaaataattcctctgcaggttagttcaacttcttaaagtttataggaatttatagctcttataactgtttcttcactgaaaaagacatataatttgaacatctctctttttttatgttagcatctctttaattatgagctacttgaaaagagagtggaaaaataaaattataaaaattggtctgctggctacgtgttttaatgaagtcactttgttaaagcttgttgtatcaatagtttatgacaaaccgaaaaaattactggctgagtcgcggacaatgtcgctttctttaagacgtttcgtggcactgccaaaaaatgtgtaagtagactatcaaccacgaagtccccaggataaaacagctcagatcactgtatcagatttccactgcactgagggaaccttttctagaattacaccctcttgtatgacttgaaaagtcactctaaagccacccaaaaatatgacttgaaaagtcactctaacagccaaccgaaaatatgacttgaaaagtcactctaatagttaaccgaaaattatgagttgaaaagtcactattatagccaaccgaaaatatgacttaaaaaatcactcttatagccaaccgaagttatgacttaaaaagtcgctcttatagccaaccgaaaatatgacttaaaaagtcactctaatagtcaaccaaaaattatgacttaaaaagtcactcttatagccaactgaagttatgacttaaaaagtcgctcttatagtcaaccgaaaatatgacttaaaaagtcgctcttatagtcaaccgaaaatatgacttaaaaagtcacttttatagccaaccgaaattatgacttaaaaagtcactcttatagccaaccgaaatttttagaacgacagaaagaaagagggagaagtttgccggaaatgcatcggctgaaatatgagagggagaaagaaaagttgaggaaatgcttctcaactagggcaaagaaaaatgaagaaaggaactctctctatatatagggagtgaaacactattcaagtgtttatcctgagcgatgtgggacttaaaaccttttttccttctttttttttcctttctttttttcaaactttcattcacattctcctttgttctaacaatcccccacttgaaatttgaaaagaagattttcaaggatttcataaaattatgcataaacaaaggtgtcatacaacttgaacctttgcatagtgagtaagattcagattttactagagtgactcgaagtcttgaactctatctccgacatcaaaccacacacaaccttttcataggtgtattctataaagcccgtgcgttaaatgtcatgcacgtctatcccggtatagtgaacgctctagaaatttttgcccaaaatttcatatgaagcggcccccacttcaacattcacataggtgagtctatcaagagtactcctgtagcctaggtactccactcaacatagagtatatatctcattaagaattacgatttttttttttcataactcatcctcttgttacttcaggaatcatgctgctttcacttataacagcatgttcatctcatatcacttcataacttgttattacccattgaacctagtttttgggatctccagtcatttaggtcaggttaccatcatgaatgatcatcgcaataagggcaatagtctcattcttttagaagtgtaatggactttctctctagctaatcctttcgtcaaaggatatgctaaattatcatcagtgcgtacgtgatccactctaacagctcctgttgagagtaattctctaacagtgttgtgcttacgacgtatctattgtttcttaccattgtaataatggttctcattttttttcaatagtcgcggtactatcgcaatggatcaacacagctgatatcagtctttcccataacggaatctctgcaagtaagcttctcagccaacttgtttcctcactaacagttgctagtgctatcatctcaaattccatagtggactgaggtacgatagtctgtttctttgacttccaagaaacaggcccaacaactatgctaaatatattagttgctggttgctttggaatcatcagaaagagtgttccaatctgcatcattgtatccttcaagtacaacgggaaaccttttataatgtaatccaaggtttatggttcttttaaggtacctcattaccctttcaatagcgtgtcagtgctccatactaggtctactggtaaacctgcataataatcctacaacataggctatgtcggatctagtacaatcagtggcatacctatggctgtcaatgatacttgtgtactcagtttgtcgtataccttcaccagtgttcttaaacagttttacacttggatcatatggtgtactagcaggtttacagtcaaagtaatcatatttctttaagatcttctcaatgtagtgagattgattcagagaaatttcctcttttgacctagtaatcttaataccaaggattacacttgcttctctaaggtctttcatatcaaagttgttacacaacaatgatttcacatctaattggtttgcagccaggaggcaagtctactaaatgccgggttttgttagattctaaagaatccatctcattattaatgacttcttgccacaagtcagcatccaaagaagacaaagcttcttggaggtttgatggatcctcctctaatgtataggtcatataatcgggcccatactctttagcaattcttgctctcttacctcttagaggctctatatctgattctggttgtgcaagattttcactactaataacaagaagataactggatgaagtacccccactattccttaatttaaaagaaaatcagaaaccagattctttctcatctctggagtatgcatcacatctttgagaatcaaagtctttccaaaggtaaactttagttcaacatctctagttccagtaaccatagaggtgtgggaatcacccaacaacactttcttattcgtgtatgttttaaacatagcacgatcatagcagacatagcaggaggcgtcagtgtctacccaccatccatctgatcctccaatcatattgatctcaattatcacagttatgtatgactcttgagcaattttctgtatctcatgggattgagactctactaatttatcatcagtcatttgatacttgaggtagcggctaacaacatactttttagtcccagcttcctcagtatcatacttctcttttagagtcagtcaaactaatttggcagacttatatgggctataatcatagagatcatcagctaacccatttagaatgaaattcttgcataggtaatcattttcattccaaagagtcaagtccatagtcattttatccttcacttccttctcaacatctttaggcatcactggaatatcaatgttcaaaacataggcaacttttctcatagttaaagaaaacatcatcttttgttgccaacgtttgaaatgataccattcaaacctaaaaggtttgttgaggtcattgttgttcgagccagtaatatctacggtagccataacagagccgaaaacgtcttaaaattgttgtaacaatagtttatggcaaaaccgaaaaaattactggctgagtcgcggacaatgtggctttctttaatacgtttcgtgacactgccaaaaaatatgcaagcagactatcaaccacgaagtctccaggataaaacagttcagatcactgtataagatttccactacactaagggaaccttttttagaaatacaccctcttgtatgacttgaaaagtcactctaaagccacccaaaaatatgacttgaaaagtcactctaacagccaaccgaaaatatgacttgaaaagtcactctaatagtcaaccgaaaattttgacttgaaaaatcactattatagccaaccgaaaatatgacttaaaaagttactcttatagccaaccgaagttatgacttaaaaagtcgctcttatagccaaccgaaatttttagagcgacagaaagaaagagggagaagtttgccggaaatggatcggctaaaatatgagagggagaaagaaaagttgaggaaatgtttctcaactggggcaaagaaaaatgaagaaaagagctctctatatatagggagtgaaacactattcaagtgtttatccagagcgatgtgagacttgaagccttttttccttctttttttttttcctttcttttttttcaaactttcatccacattctcctttattctaacaaagcttttattgatacgagagcttggcattggaattgtactatatagtcctcttggtcgaggctttttcggtggcaaaggagttctggaaaatatgcctgcatatacaaccctggtacaatgttttaacagttacttatgtgtttctgttgcatactgtagaattttttggacgtgaaaaattaacgaaaaataaaaatcaattcttcatcttgaacttgaattaaaacaagagtcatctataagagtcatccattctaattttaataatttatttttctcctttttttataatatttattgcaatttacattttctttttattttttattatattatgcaagtgaaattattctttgatccagaacgaataaaaagaatatatgaccggagaaactttaggcacaagcttcttagaaacatggtgaagttcaaccaatcaaataaaaataaaaaacggaaataataaaacaacaaaagcgaagcagaaaaaccaaaaacaaaaagtctagtctaggtgacatcaaaatcggtgaattcaaagtaaactttaattttgttctgttaaaatatttccttccaaccattcattggaaaaaaatatcttttgacagatcattatagtatagcaaaataatatcattactctatactctacagtataacaccaccaataatgttataaataaacgtatgcactatgcaccatgtaatagttatccagcaggtgaaaggcagggacgagtcgaa

SEQ ID NO: 2316 - DNA, 4951 bp, Glycine max
  Intron number 5 from transcript Glyma16g20030.1 (locus Gly ma16g20030) derived from phytozome v7.0 (chr-ID Gm16; pos 22599618 to 22604568 reverse strand)
cagttgctgccacaaggtcagttgtctttgcatttattgcctcttgttgaaactgtgacattatcaatatcaactagtgttactgtgttagacaacctttgggatgctctcatctattgcttcctcctaaagcataagaaagaaacatcttgatgtgtagttatcttaggtgagtggatgtgtgaatactaaatggacatgccttctactgaactcctggtcaaaagcattccttttccacaactttatctaaagctgaagcaaatccttgattgagatgaacaagtgagaacttaaactattttgtgctttttaattacagcatttattaaattaataataaatcattgaacttaatatagttttgggagaaaatttaggagtttgagaatggaattaattaagtctctcaaatgttgtcttacgctcaaatgttgacatattgccaatactctacaactaccaaatccctcttatgatgcctacctattactttgggtgcaccacaaacaatatactacttacataacctacaaggctgtcataattactgaattccttcttaacaatggaatttgataatggttatgatcattgtcagattacctttataataaatttcaaaattacttgatgcgttcatgaatcaagtgatgaactaattttcatttcacaaagttttggatttcatgataagaaaagaggttttatgccaaagattgccaagtgatgagaccagaaataaagaaggtaaaaaaccaaagcataataagttgccaaagattgccaatctcattgtttatgctgcaaagaattccctctaaaatagctgttaactgacacaaatgaagttaaatgaaaagtatgccgtgaaaagtgtaacaaaaaaattatcctctcaagcaagttcgtatttggttcatcaagagatcatatttccttggtccaccaaattaacagaagagccagatgtggacctcctattgtctgtattagagaggcccaatctgcatcactatagacggccaaggagagaggagattgagcagaagtaggctgcagtagcttccaagttcaactgaaccttttagatatcttagaatgtgcttaataactgtccagtgtggattgagggggctgagcatgtgagtagaaatatctttggattctgccagaccagctttatgaagcaaatctctaatatattttgcttcagaaagcagcacggttccattatatagatatttaagctcaataccaagatagtaataaccttccccttattaattagggactgaataaaaaatggataatttcctgtgatgattatatcatcaacatatacgagaagatagatgcaatgaggagcatttcttaagagaagcaatgaaggattacatttgctgtgaataaaaccaaagccaagcagagtgttggtaaatctgtcttataccaggccctaggggcctgatcaaacccataaatggctttttgcagggtgcacactaactgattgttagagaattcacatcctggtgggggtcatgtagatctcttcctctagataaccatttaaaaaggcactgcttgcatatatttgctggattaaccagcatttagttagtgcaagaatgaccagattgttaatggtttgacaagtgctaatagacctgaaaaaaaccaacatttatttaaacattcaaaaaactgatacaaagaaaggtgctatcttagatttataatgctctaaaatctgacaggaatatagataaagctgtattgttgacagctgtgtaactaacttaacagcttgctgctaaccaccttaataacttcctcagagtcagttagataactgctctttgtacaatactaaactgcccccattcacccacccacctgaagtgggtgagactcataatggactgcaagcaccttgggtttgtcccacaacaatatcctggtaggggagaggggcttcgtaagaatatcagccaacagatcatgggcaggaatatactgaacagtaagttgcttgtcaagaacttactctctaacaaagaacagatcaatctccatagcttggtgtgagcacggagaatatgattgtgggcaggagagactgcactctgattataacagtatatgattagtgtagagaatgagacccctagtttgatgagtagggtggtttcaatccacaaaatctctgcggtagcttgagccaagaataaatggaatttccaagaataaatggaatttccagaaatgaacaagttgttgataaaaatttgctaatgatattagtgatggagtgacaatagttaaaggtgggaaaaggaaatagaaatggatgacctacaatgcataaactagacatattctctttcctgaatctgatacaaaccaaatggattaactactaccttgtatctcgtaatatttatttttgttcctattaagaatggattcttagggcatgtttagtgcttaggatgggataaaataaattgtcgtgcttgattttaaacaattatttggtgcactaatagaatatgattaacttctcctattttgtatcctgttgggtcagtaattttttatcttatggggagagctgatttagaaaacaattgtatatgatagacttgacttggcacaccataaaattcaccaaatttggttttaatccccaactttttttccccagtggtaattgtttttgatttcttgaaaataagtggaattggatgccaccttgactccactaacatttttgctgatatggctaatggctaccatgcgatagccacgtggcatcaaggactagttctacctaatttcaatagttcaaggatcaaaatcaccatctataaaaaatgtagggactaaaaccaagtttgaccaaatcttcagaaactagaaacatatttactctattattattcttatttaaatgatttaactataataataataataataattaacatacatttttactaataaaaaactagcgtaccccagtattcctcgctatgcaaaggtttggaggagggtcattatacgcagccttacccttgcatatgtaaagagactgattctggattcgaacctataaccaaccgatcaccaagacacaaccttaccgctacatttttactaaatataaaaagaataaaaagtgtgaaagtaagtgagacacaatcagaggggaaaatgagagttagcaaaaaggaagagcacttaaactgtagacaaaataaacacaacatcagggaacacaaaaaaaacgtagtagagactagataatagaaaggatgagacccgagaaaagaaattggtttagattgatttaagacattattttattaaaaataattatcatttatgtgtttttggttcttgaagaattgctcaataatttataagtgtgtcaagaaatcattattacgttgttagatttcagcttaaaactaattggcattaagtgaagttgcccaacagatagttgaggcatgcgatgtgagacttgctaacattgcctcaacctttcctttttttctttccacctctgggctgtgctgttttttgtcggtgcagagtactcgccaccaatatcgcgattccggccttcgctgctttcttacttttctgccttagagagcgctttattcatgggtgaacagtatccttcgccactattgaccttcgttgactgccgtcgagccatgtttatctggtgaaaccacatgactggaaccgcctttcgtttttttattgggcttaccacatttgtaactaggttggttcatatcacatatatactctagcttgagggggagtgttagactaaatactctttatctcttttttattatcaggtagtaattagtgatttagtccttattattcattattagattgatcctatgcaatcaatactgatttgctcattataaataaaggcttagtgtggtcattctagacacacaacattacaataaaacactgttatatacattaaagtgtttttggcctgaaagacttggtcaaaattgcttttagtccctaaatttttaaaatgccacatggaaaccattaaccatgttagcaaaaatgttaatagaggtaggggtgagggattaattccacctatttaaaaaaaccgagggcttaaaccattgagaaaaggaccaaaactccatatatatagtaatttatttttatatatattatttaggatatatatatattctataagatatatgttcaacgtattattatgttatatatatttaaaaaaactttggcatattatattaaaatatattatgaattaaaagttaaattaaataaatactatgcaaatatttttttctttcaaattagtaagaataatttgggcccgtttgtttaaacttatttattttaataaaataaccagttttctgcttgttttaagaagcaaattgtgggcccatttgtttaaaattattttgttgaaaaaatgtttttttaataaaataagcagcttttttgctttctgcattttgtggaggttcttaacccccagaaatcacccactcccgtagtcatcaatggaaccaatgaaagagggacacctacaaaaacatattttagccatttgtttattatgttttagatgtaggctttatgaatagatttaaggtgctccatagtgctgtcaaccatatttcagcatcagttgcaattgcgacacctgttgtttaaagaaatgtaagggtgtatttccagtgatcatttcagctgtaaagttttgttatttttttatttactatgtgaccgtgcagatatgaagaaccttaaatatagttttgcttgaaatgatgaaagctagattctcatgatttaactttttcaatgaaaagcagtgagggaatacaagtagagtacattgccgtcttca

SEQ ID NO: 2317 - DNA, 1095 bp, Glycine max
  Intron number 2 from transcript Glyma13g33480.3 (locus Gly ma13g33480) derived from phytozome v7.0 (chr-ID Gm13; pos 35314215 to 35315309 reverse strand)
aattgaacaaatataagaatcaacatcaattggtaaaaccatattttttccccctttttgatttttgttagtgttttgcattttaacatttttttgaaatcccgacttaacacatgacaacttgcattttttgcatcgtgcatacgtgctcggtgctcccatttttcgacttaaacgactgtacaaccgaacaattacagtgacaaattggtaattcccaaatcccaaaaccctagctcaatttgggatatataaatcaactacgagcctcatcctcacacatgtttctctctctctctttttttatattttaagatctgatcatttttcttaaccttagatggatataacttctccaattttttttgttttcaataagcgattttttgttgaaagtgatgtgcatctactatgattctctttttcactaacagtggaatagagaatacgaaaagatgcaaaatcaaccggttcctctatggactggcatagtcccaattctcaatggatttttgctatttctcgtaggttccacaatttctaaccttttaaccaattttcgctttcccccttttgggttttgattttcattccccaaaattaaggaatccattgcaagcatcttgattttgtgatgttaatgtaaacttgaaaattttagaggtctctcttctaagattgcagaggaaagcatggaggggggaaacaattaaaagttttttgtttaaatttttctgtttattggggattctttattctagagtggagataaatcctcttgttcatttcattatgttgattcgttcatcctcgttgaaaccgaatgatatagtttcttctaattctttgaatttgaactatacaaccctgttctgtcggctcttgttttcctttcttggtggcttcagatttgctcaatagtttacaatgactttagtgtgcttgaatttcctcatggatttgtagttagatcttgattgttcgagttggacttttcttttgcttgggaacatagactttctcagccttacctggatgattggatacgcattcagtttttttttaacctgttgtcgtgattttggtttcagagcc

SEQ ID NO: 2318 - DNA, 7749 bp, Glycine max
  Intron number 1 from transcript Glyma09g28470.1 (locus Gly ma09g28470) derived from phytozome v7.0 (chr-ID Gm09; pos 35431199 to 35438947)
acttcaaccgcaactgcaccttgtccaccacacaggtcatcacctccgctccatttctgttctaattgatgaattatatttgttattcgtttggattctctgaaaaaaggaatacatagggatgagatagaaaggaagataaaattcgagtgaaattaactgattcggtagtgaaattggatgggctctgctcggttttgaacgtggatctgatccttaattgtggtttttgacattgcaattttttagcatttgattctccgttattgtcattttcaaagtcctcatgttttgttatttggatttgatttgctgttgttagatcagaaactgtagttagtatgttaggctggaagataggcgcgtgagcagttttgatatgactgttacacgagaaaagctactccatagttaaataattctctcaataatcatgcatgctacataccaaatctaccccggatcaagcaccatgaactggattctcagctatctgatgaatcatatacctacacgaaaccttgtacccatattggtaccacgtacctgataactattaaccaatctaagtgagaacaactcacattgagatttatttggctcccccctctatttacagtgttcttgaggaaaattagcaaaatactgccccctaagaatataaattttaaccatgaatgtgaggggagcacaggtataggaataaaggtagaaagtcgcatgggcagtggttgtcaccctttttctctttctttagatactgagatgttatcagtgttatcaattgtggaatgcggaaaatggcaaaaagcctatcggggtttcaaatagcgtgctatagtggctttgcccgctacagaggctgccacagtggagcggtttggtgtagcggccatagcagagctatgtgtttaatccaaaaaagccctttgaacagagagaccttaggggcttttgtaggaggctgtttttgggatttcaatttccaaaaattaaatctacagctacagtagtgatggaaataataaagaagatttggatttagaccgaagatgatcattcctgtctaggaaacttatatttgatttttggtatttatgttaaaatgccgctttatttgcagtcaccagtagcctgcttcagttgtggcctctttgggggctgccttaattgcaacctcaaaggtggtggtctagtctcatatcaactagagatatggcttaaatagaacttataaagcttggacaatctttatcttacaagctgcttttgtggggttgagttatgccctaggttcaaattttaagaatttacttgtatgttttgtttaagacacgtatgactttttagttgttaattatgaatttcatcaattttgagtaatttttatcatttttgagaatttatatgtatatagtatacattacacaaactatgtaaatttttttcaaattagtaatttttatcatttttgagaatttatatgtatatagtatacattacacaaactatgtaaatttttttcaaattagtgacttccgctatctactatttgctatcccgctatagtgttttcgaggctatccactatatgccgctatccgggatttaaaatattgaagccgataatccactattacctatagcagataacgttgtgggcaaatagcagaagtcgcatagctgttgaaatattttgtgttatatatatatatatatatatatccattaaacatatataaaaaattaagctgtatgcaaagaaaaataaaattcataaaaattggcataatattttaactcaaaagttcaattggcttgagactcgctagagaggacaagaggatgcaggatacatgccgcaaccacaacacccatagcggccacaatagcagacagagtcacaattgtggatctgagaaattctgcaatgctatagcgctagtgcgctacagtgactatttaacaacatttgaagttattacaatgtttcaatcgacagatgatatacgattttgaaatcaaatcaagagaaaatatagggatgatattttcttatagaagttatcattttagatttgtgtatcgttagaaataacttatacttgcttttaggagataaatgagaatgtttcactgatggattgcagtgaatacttaaatatcttcacaaaatcattcatagaaaaggtgaaataaacgaaatagttgttggaagatgaaattaactggatgactgaagtacatttcatttagctgggatatttatggactgtcttattgaactgaattcagaggagtaaggggttattggactaagaaagttgcagatgaaaactgtatgttctcctatagagaattctgcattaaataatacttatacaatttgatttctacatttgtgcattaaatagtcaatctgcaataaatgttatcctacaattgggataactaattaaggagataattacagctatataatcatgcaagatttgctgttttgaatggccaacaaatttgtgtcaataataataaatattctataatttgtgtcaattaataactaatattccgacaatcaattccattgacatcccccctcaaattgatgttggtaagtctaaaaacatcaatttgctgactaggaaattatgttgttgatgtgtcaaggattttgtgagaatgtcagcgagttgagcagatctagaaacatgcatcaaggtgataactcgatggtcatacacctcccaaattgagtgacaatcaaccttcatatgcttcgttctttcatggtaaacaagatttgtggcaattggaatgacacttgtattgtcaacatgcaatgaagttcattttgcttgcgaaaaaccaagctctgaaaggagaccgcgtagccaaataatctcaaagcatgcagcagatatgacacggtattttgcttcaatggatgatttggagactgagtcttgtttcttgcatttccaagagattggagcttcccctaagaacatacaccagctagtagtggatttctgtgtgtctggacatccagcccaatcggaatcattgtatgcttgaagttgtgttaatgcaccagcaggaaagaaaagaccacgactgaaagtactaagtagatgcttaataatatggtgtactgttgaaagatgcaaatgccgaggaaattgcatgaatttgctcatagcaaatgagatgtctagtctggtgatggttagataaataagacttccaaccagcttacgatagaaagttgggtcttgttgaagcacaccttcatctcgtcgcaatttcagataaatttccattggagagtcaacaagagtagaattagtgaggccaactaattgaattagatcttgaatatatttgtgctgattgacaaaaatgcctttctgttgaaagtgtacttctaatcccaagaaataagtgagttggccaaggtcttttatgtggaaagttgaatgcaacagagtcttgattgtactgatagcctcttgatctgatcgggtgaccacaatatcatccatataaacaagaagtatgacaattccttttaagctcctttgtatgaaaagtgacgaatcatacctgctttgtatgaaggaaaaaccaagtatgacaattcctttcaatccatataaagaacgttttagtttgcaaacaacattagacaaaggtgaaggcataccggtaggaagtctgatgtaaattttctccttgaggtcaccatggaggaatgcattcttaacatccatctggtgtatttgccaagattcaaatgcaataatggcaagaatagtgcgcacagtagtcattttgaccacaagtgcaaaggtctcctcataattaaggccaaattcttgcttatttccaagaacaacctgcttggacttgtattgatcgattgatccatctaaacaaaactttatattgaatacaaatttgttgccaagggatttgacagaagaaggacaggttacaacatcctatgtttgattttcttctggtgctagaagttctgtttcaatagcttttctccaacatttatgctccatggcctgtctataggaagaaggaataggaacaaatgttatagttgttgtcaatgataaagggaaagaaaaaccatagttttctggtggtttactaatgcgagtactgggacgtaaagtagctagtgttggatgaagcactcgatcagcagccagagattgatcgggagggggccttcaaggtatggatggtggatttggtggaacagcctgacatctttgatacaccaataaaggttgtggtgctggttttcctatagaattgttatggaacaatggcaaaacagatgtggatgtagaagagggagtgtcttgattagtttgaaaaaaatatatatcttcttgaaagatgacatttttagaaactcgaagcctatgtagattaggatcataacatacaaatacaaatcctatatggagggtagaataaccaagaaaaagcacatttaacagattgagctatgagcttggtgcgttcttgtgggagaaggtggacataacaaatacaaccaaaagtgcgtagattggaataagtgggtttgtgaccaaataacctgaagaaaggagaatcattgtttaatgattgagaagacaggctgttaataaggtggaaatcagtagagagaacctgacaccaaagttgaggtggcacaaaagattccaacaaaagggtacggacaacatcaagaagatgacaatttttcctttcagttaccccattttgttggggtgtggaaggacatgacctttgagataaaatgttatttgtctacaagaatgagatgtatattcccccctgttgttggaatgcaaaattttaatcttggaagaaaattgggtctggacataggcatgaaattttttgaaaacagagaatgcttcatctttagagtgcaaaaaataaacccaagtgaaacaagtatagtcatcaataaaagtgatgaagtatttgtaaataacttgggatataaccgttgcaatcctccataaatcactatgaatcatatcacaagactgatttacctttgatttatgaattggaattggtagaattttacttttcccaagtttgcaagagttgcattcaaattgaacaacactaagagatggagaaattttattatcaagaacaccagatttcattaagtcatgaagtacacaagagtgtgggtgaccaaggcgcttacgccatatgtggaaattaacaatagctgaattgcaagaaacaaaaggcagaaaagaacattgaggctgagagaaataaaggggaaaaagatgtccaactttaggttcctttgcaatcatcttccctgattgttgatcctgcacaagacaaccaaatttagagaatgcaactttgcaatcattgtcaactggttgaccaacagaaataagattactagtaagaccagaggaaacaaaacaattgattaaagaggagaaaatgtcaccaatagctatgattggtagactgtttccatcagtagtatgaatttaaaggttatcaaaatatgttatgacatttttaagggattcaacactttggtcatgtgattggatgcaccagagtcaaaataccacagagtacaagaagaaaaaggtttacttgaaaatcctaaagcagaaaatgctgaaattatcatttgttggaccattgcagaggtcattggttgcacaaaatgagaagcattttgattcatagaaccaccaacagtagaagtaccagcctcaatagtaaaggctgttttagttttccttggtggtcttatagggcattctttaatgatatggccatcctttttgcaataattgcaaaacttttaggacaatgtgaagcaaaatgtccaagttctttgcaacaaaagcattggactaggtctcgacatttaggttttccttgtacagcagcatatgctactggaaaagagctagatttttgttgttccatggatgcttgagttaggagatgttgttcttcacgaagaggctcattgaggcatgtatccaagggggacaggagctctattcatgagattggaccgaataccctcaaagtcagatctcaatttcataagaaattgatctcttttttgtagactcatgaacttgttgcactgcaatttgaccttcatttgacaaatcttcatagacaatgtcagtgtattcagcccaacgattcatgaactgggaatagaattcagaaattgagagactatcctattgaaatatggcaatttcatgttccagctggaaccttctagcagtattattctagctataaatcttcttgagataagcccacatcttgactgcagtgttgaatggtcggagattgagaataatgaggatcaattgagcctatgatccatgttaagacttaggcgtccttgacttcccacgcagcatattcgttcgactggctttctttgttagaaacagaactggtgctgtcaacatgaccccaaaggttcttacctttgacaaatatctggagctggaatgcccagacagaatggttcttgccattaaggcgaatgaataagacatcatacttgtcactagacataaggctaaggggaaaaaaagtaatcacaagagagaaattacaaaaggaacaagggaaaagaactggatagtcttgcaaaaccaagaggctactaattttggatagaaccatgctaggatcgcaacctagactgataccatattagactaaaaaagttgcagatgaaaactgtgtgtttcctgtcgagaattctgcattaaatagtactcatacaatttgatttctacatctgtgcattaaatagtcaatttgcaataaatgctatcttacaactgggataactaattaaggagataattacagctgtataatcatgtaagatctactgttttgaatggccaacaaatctgtgtcaataataacaaatattctgtaatttgtgtcaattaataactaatattctgctaatcaattccattgataagggtatcatgacattgtataacttttaggttcatttgtcctgtaagatgttacttggttaatgagtggtgatatgcagtctaatagaggtatcatgttttgaggctccttagaataaagtctcaatacaccaactatgcaatttccaatatataatgataccttctgtttcaaacaaatggttttggatgatgatatctttgttgtttggaggacccagaaatactcaactacatgctggtgttagattggttttaggaatttacagaattgaactaaagcaaacatagggctttgagtagcataatgatgttgtgtttctctctcttttcttatttgtttcattcacagtacctgttattattggggattggttggttatgacttggggaatataaaaaacgcctgaagtatcagttttacttgatatttttgtgagatctgattaactcctatgattaggaccattaggctgtttttagaatctcactctagtccctacatattctctcttttatcctttattttggattttttttactaaactctgcatcaatctcctcatgttttcttatttacccaaactaccgtcatattgaaatattcatttgattcatctaacagatttctatttgtaaattgtctttcacagtttaactaatatgctctctgtctgtgatcagagactat

SEQ ID NO: 2319 - DNA, 3769 bp, Glycine max
  Intron number 7 from transcript Glyma17g05100.1 (locus Gly ma17g05100) derived from phytozome v7.0 (chr-ID Gm17; pos 3471971 to 3475739)
tgcatttggttcaaaacttccattttaattggtctgtaagtaaaactagttaattattagttctggaaatgcacgtttgacacgtgctccattatgtacagtgatttaggagactaatgtgaattggtgtctagagactagcatctacattttctatatatgtttaaagttcaaaattattcaaacaacgcgattgaataaatgcgtatatgcgaataagtttgtgtttgtgtttaaatggcttggacgagatttcgaatcattacaataatatcctcatagaacagagtatattgtgcatttgcctactttttgttaatttctcacaaagggttttaattatttgttactcagtgttttatgctaaaataccatttatgtttaatttctaggataaccatttcggaagagaatttgtcttccttgaagttctaagttttcggatataatacgcataaaaatttaagttaataaacgacaagaaaagaaaaaaagaaaatgaaaagagtaaaataaaataaattatcagtgcatatacatctttattgaaaacctcgtctcacaatttgaagttttaaagggctggggtatctttctaaatctgaagtgtagttccgtttttcacgttaaatctgggtgccgctatattggcaacttgcaacctgtatgaagctgtaatttaaaataagtttttagtgagggaaattataattttattatttaatatcattataagatcctgtaaaaaaaaacatatctttgtaagattcaatttttatcaaactaattatatcattttcttattagaaggaattaaatcaaagctaataaatgaagaatatttttttttttttatattttatcactttctaaaaatgaggtgttaagtacgtatctataatccatgtgcaaacaagaggaagagggctgagaaacaaagcccagacttgagtacaattggcaaagaccaaagagaaggaagaaatcacctcaaaagatggatttttagctaccctattggcctattttccacagaatgtgaaatctcctgccatattcatcctggacaatgcttctctgaaaaagggtcttgttaggaaggtattttaatttactggctgtatttactaaaatccagagctgtcgtacatcaggatggacatgagtaagctaggtcccaagatctcgcacgtacgactgggagtattctttgttaagaggacaagaggaggactgacaaaataaaggactccaatactcaagtaaatacgtaagttaagaggagaatatgaatgaaatgagtgtgaaaagagtgatacgaaacctcacaggaatagagtgaaatgggagctgcgagtcgtgagtccttatttgtagggaggtgtaagggctgtttgagagttcaattgctaagggtataatgcccttactcctgcaccagagctgacttggagggctgacacgtgtctcggaaggccaaatagcttgacacgtgtattttgtggaccttggataatacattggctaataattatcatattgtgaagcttttactttggtttaggcttttacttttggtttaggctgtcagctctcattgcttagcatgtgtcattatttatttttttatttatttgtgccttttttatgatggtttagaaatggaaaattttaaactcagatgaggatgcacagtttctgctaaagcaaaagaagaatctaaatgattatcggcctgacataattcacgaggttggttgttcgtattatcttccaaacttgcctttcaagtgttatataacaaatttttaactgtagcgaacagagtagataaagtagaatatggataattagaaatggtgttttgttatctcttgatacaccgtacagatttgcataaataacttttagaatcagaattaactctttgacttcttcaggctctgcgatgcattctagatagccctcttaataaagctggcatggtaggggcaatatatgttaaaattgatcaaggaggaatgtttgaagtcaagcctcatgttcaattacctcaaacatgcagtcgattctgtggtgtcataagtaaaaatttttacaatattctttcctctattcccaactattatgttgtagtttgtgcaacttctttatgcttaatgaaacttattcttgtgttgtaccttagtggacttgcttcaaaaatctttggtgcgggccaaacatacgaatgaagttcttcttcatgttgttgaggaacctataacgcatcatttgcctgtcaactcttacacagtagttgggttatactgttttaaactcttaaatatttttggtattatttttattttatcctgttgtgggttttgaatcaatcatgggatgcaggtctctcctctacttcagaaaagtcggttgacatagaggaatatgtctcactttggagcaatgatttgagtcttgtctttgtggtatattttaattttacaacatgagttgatgtggtatgttggtttcaaacagtacccagacagcttctcatgtgttttcaggtaggcacaatggtcaatgggaaagtaaaaggggactatatgcataattatatttcaggtttaattgctgaaaaaattctttttatttttgaatgttagaaactagtttactttattgtattttgtttgaatatgctgcttggaatagaaatgaaagagaattttgggatttcatttcaacgtttattccagtgtcagtgaacaaagatggagatgtatacttgagcttgaataatagctaatataaatttcaagaaagagtctagggtggaacaaagagtgaaacatatactgcttatactactctgtattatgtagtttgagtttaattttttcatgaggatgtggacgtatggccctatatgaatatcaagttgaaggaatagcaaaattgtgtctcttatttgctttcttcctttttatggccatacattttttatttatttaaattcttaaaaaatgatatttatttgtattttctgttttgtttgacaaaagaggggttgtaggatattcttcaaatagtacaatgtcttgtcgacacttacgactcctgcctcttgtaatatatatatatatatataaaacaagattctggtagaagggaattgagtgaattaccatggaccttatttggtctatgtttttacttcatttcaggcctaattgaattgggagaggttccattcagttgaatgaggtgttcaaatatttcgttagtagggaaatgattgcagtgcatttatctgtagctgggatttgcccaagcataagttgcataagtgcagtatagaaactgggtgaaggttgataatgattcttgtaattatttttgggtggttatgtgaattggtatttacaaactgggatatatgactaccaattttggttctggtatcttggaggattcattctatattttatcttttcctcactggtttcttaacaagtgtcggtcttctgtgactggttacagatgaaatactatagctcatccctctattgagaatactagacgtcttttttatgtgagcggttctctcatatatggtattttgaagaaatcacggttagaggaccatctctctcgctatttgggcacgagaagcaagaattatgaaaatttagaatctggtatatcaatttgtgggattcagctgtatgccggttttctttgtgcagatatcatactcctgttggagtgtatctaactttct

SEQ ID NO: 2320 - DNA, 1882 bp, Glycine max
  Intron number 1 from transcript Glyma10g31560.1 (locus Gly ma10g31560) derived from phytozome v7.0 (chr-ID Gm10; pos 40042034 to 40043915 reverse strand)
aaagaaggcaacttatattacgttatttctaacaggtcttaatcttatatcgtttatttttgttgttttaatttaaacgaatctatgctatgctatgttgtgcgtcatggtttcggatataattatggtgttaaaatttatgatgattggcacctgtgccccttggtcttttggactttttaagcagtcgattaatttgtgtctctatcatggagtgaatggatcgtgtgttgtgcttgtgcttagacatgtatatgattgtatgtttgctctgatgtatctattcttttggattcaccctccttaaataatctgctaggcttgctcttttgaaaagcttattagggagttactacggggtttgtaagggtaacgatacgacacctgagagctgagatgagttatcaaatatttgttgattattgctggtatcatagtagtctatcttaaatagtggcacgtagtggtagtcctagaaaaaacgttatagcaggatggctgctattttgagccctaaatcctcattaataatcaaggcgggaaattgggcagagattgtaacagatgctggaaattgttgtttcttggatcctttgtagaatagttaacagcatgatatagtgatgtgtcatatggctggctgtggcaaaaggggcattgtgttacaattttgtggagcagaggcagcagcctgaattataggcaatagtggacaaattgcagccactatggtcaacaagtcattcaattcttgttttgtcccctttttgtttgcaagtcctcagatttttaagatggtatttgacattccatacccctcccccctctcaatgaatcagggttcattcagaatccttcattcttcaaagaatgaaatgttaggttgctactctatagggcaggtgatgcattttctggctaagttcttgctttttcagcagtcccaacatgttttctggcagccccttaacctcggatgagtctgctttttcttccagactctgttcatagttcatacttgtctgctccttgttttgctgcaacttcttccataatttcgtcctcattattgtctcttttttgccgttaattattaattccgaccccttagtggagtgatggcatcgtctcagtcacaaccagcccaactcagctcctcagcttcagccttaccttgttattgacttgttaattatgccttagtttgatgttgattgtgtgtctgcattttgattattaatgatggtatatatttaatttttgccaattttataatatttgagcatttatagttatcctgctgtctgggattgactactaccatccttcatgaattacatgatgtttttccatatacataatatgtttatgacttgttctattaaattattatctcatatctgtgtatttttgtactgcatcctgatcctgccataaatttcaacaacaaactttcaactgtggttttatgagctcatttttttttctgaagagtttttgttaattaagaatgtctaaaaaaaaaatttaaagataattagttttattttgaaaaaaagctaaaaactataaaaaaacagttttattgcatgtttgattcaacttctttttgccagttttttagagaacttttgaaaaataagtgattatatctccccaataaatctcaaccagacacgtccttagttcttttctcataagctagaatgagtagattccgaaaaaaaagtaatgaaaaagaatctatatgatagtagtgcttttgtcaaaagcttatctaaatgcaccctatagtgtattacttttcacatgtatttgtgtatctatttttgatcatgtttttttgccaccccatgcaggtggttttcaaggtggcagagtt

SEQ ID NO: 2321 - DNA, 2442 bp, Glycine max
  Intron number 3 from transcript Glyma13g24970.1 (locus Gly ma13g24970) derived from phytozome v7.0 (chr-ID Gm13; pos 28258909 to 28261350 reverse strand)
tcatagcaggtactttgatgtcattgcttcattttgtgacctcaaatgcttcatttttgctgcatctaattccaaagctgcctgaataattgtgaagttttagattggtattttttagctctcttgcattccttgcataaagcttatactatgctaggctattcaacagtataatctggcatcaactaatagtaacaatattttgattttgggttatgcacttacgcagttggagtttggactccacttttacctaaataagaaatcttttaattatcaaatcttgcagcacataaataaattaaattaaaccagcggaaatccttgatctgtataaactttatgaacatcatgatcatataatatatccaggacggtgtctagcgtgtggaactaaaacttgtttcgcactgtgtgagagtctattttttcctttttttattttttattttttttatattttctttcccagtttgccccttaccctaagcctaaacctgcagtgcgttgctgatgtcaccaagaagggtctcttccactgtttatcttcactattttacttcttttttcgtttttcctcttttttccccaaattttgttcttccctcctctccgacgattaacatcgaccacaaacaaaaattgcatgagtatgttgaaacccagataaaaaaatcgcaagtgagtatgtttaaacccagataaaagaattgcatgggggtatgttgaaacttaaatacaaagaatcatgagcttgtttcattcacaacgcacattttctcaataatcaagtaccaacaatttcggatatagaatcaaaatggagaaccgtcaccatggtcgccattgatgttagagaaaatttagatctgcggatttctagatctctttgatttttgtggtcggattcaaatttgtgatttttttgttacaatctctgttttatgttgtggggtatggttgtgttggtgagggaacagggatttggtgtttgggagcaacgaggatgtgggggttgaataaggaggagtgccgtcgtaggcggcggcagcgaagataaaggagataagaaaaagagataaggggtgagggtaaatcggtaaagatgaatgaagaaagaaaaaaagaaatctcaagcatctaatttaaaattaatatatttgacattctgtgtgactttcgcaccgtgcaaaatgagttttccttttggaagctagacaccgtctatattcagacatgtattagtacgataaaattgtctttgagttttgtaggtactttgcaatgactaatgaataaccttcaatgccttgtatcttgtgtgtgacattctcattaatttccccattgcgatgtagtgttgatcccatatatttaaacttagattcctatggtataacatgttctcctatttttatttccaagtcatattcctcttgtgtcttgctaaaattgcaatgcatatattctctcttattcctaataagcaaaaatcctttgttttcaatgtctctctccaaagctcaagtttaaagttgactgcttctcttgattcttcagtcaaaactatatgatttgcaaaaatcatgcaattagggatagtcttttgtgtgtccctggtaagcacatccttgactagattaaacaagtaaggacttagggctggctgagtcttgatggtatcaagtaagggaagttcttagttttgcttcatagagttctcacattagtagttaccctatcatgcatgttttgtatagtccagggaaagagtgattttcatataggtgaattcaattattacaagcgagcaggtgcagctatttatagctgccccaaatacaagtctaggttagctgacacatcagctagctgtggctatcagctcgctttatctaactttactaaccaacagctgttaggagataagctactctgttttacgctaatacccccttgcaagctcaagagggttgtgatgcagaggaatcaccctcaatgagcttggatataaaggcatggaaacattaacaactaagctgcttgcttaggaccttctcttgaataaaagtagatcaagttccatgtgtttggcctgagcattcaaaacaggagtctaagcctgggccatgatgctcagattgtcctagaagacttgaggagctgagtgactgacatctaattcagatagcagagtttggactttggatcaaactccaaatgattttaggagcagcatatcctcaaatatgacaacatattctttgacattatttggcggactgtccattgattgagtgccatttggatgttatttctcatttcttttttcattctgagctttcttttttaccatctgagtttctttttactttaggaagcttaattaattgtattcatatcttctgcagattctcctcgtgattctgtccagtttattga

SEQ ID NO: 2322 - DNA, 1263 bp, Glycine max
  Intron number 2 from transcript Glyma06g14450.1 (locus Gly ma06g14450) derived from phytozome v7.0 (chr-ID Gm06; pos 11354444 to 11355706 reverse strand)
gccatcgcaacatttcctgctggggtacttggtaaattttatctttcgtgcaatcaagtagcgtctgtggtaatcaaatgcttatatacagacaattatgttaaagagtaaagtacataataattcttattttagtgaaaattaaaaattttaggtgtgtttgactgtgtttttagttttagaaaaagatgagatttgtattatgtactataacagtaatgaaaaccgaaccaaacatctcatgtaatctatctaaactctcccgctattagaccgtgacgagtttggagaagaaaagggatagtacaagaaagaatacaagtaacacaaaactataagtagaaatcaaaactacttaaaaaatgttcaatttaaaaataaaataaaaatatattacttttgaaaacaacaatttccaaaaaaaaaaaaatgcttttaccaaacgagtattttttttcttgttttttaaaacaaaaagagttttcaaaattaaaaaatagataacccatataaaaaaatgctgacgtagtatttcataaaaaaattattttatcaccaaaaaattaaaagtttgtatttttattctataaaatacatcctgaatttattggccgaaatttaggacatatcttaacagtcaaatgacattgaaagttatgaatccttttaaatggcctcaagttcaaccctttgccctgcagtaacatgtaagctcacgaaatatgttaattgtgaacccataaatttagattcataacatctagacacaactttcaatgacattttatggggttaacgtttcagatccctaaccttatcataaaattttaatttaatttgaagaaatacttaaaaaagaaatacaaacaagtaacaacacgctcaaatatagtactagtatttttttttcaatatcttgaatattagttgaaattcatgagatgtactaaattaaaagtatgacttattaaattgaaggcaaaatctacctcttctattagactccaaataaattcaaccactagaagggaatatgaggaaaggaatgcatcacatgcatagtgcatttctaaacctcataaacatgcactaatgaatcataatattatggcctttccggtcttaggtccatggaatcataatatcatgactgctaatttattcattcatatacattttaaaatagattgctacatttgtaatcaaaccagctgcattaatctccctgatcacgtttaaacttgcgcagagattagttgttgg

SEQ ID NO: 2323 - DNA, 4960 bp, Glycine max
  Intron number 1 from transcript Glyma18g35370.1 (locus Gly ma18g35370) derived from phytozome v7.0 (chr-ID Gm18; pos 41561546 to 41566505 reverse strand)
cctctcgctttcgacctccacggttgcggtacggtgcttctacactctagttttaatgagaaacatgtttttgcattcaatttggtgtttttattagatatgtttatggaaattatgaatgagtttatggtactctttgaaaatggttatagtttgcgattagggctgttgtttcaatgtttcttgctcaaaataacatggtgttgcattgaatttggtgttttgttttcaatgtgatatggggttttggtagtagttaatagtgggggaaaaggacatgatgatacaaatgcaaaagacatgacttaggagagagataaatcataaagaggaggaggataagtacaagggcaactgttttgcggagttcaggggactacaccttatcaacagaaagataaggatgtacaggctaaaatagtcacagagttgcatgtaataatgatttgatggttgaaaatcagacagagcaagggcaaagaggggttgaagtgatgcaaaacagagttacagtgcaagcctaaaatcagtttcaacagatcaagctgcttcatgtggttcgctttcaaagtgaattctaattcttaaattagttttagggtacttaactccctaaactggtgctgtcgaggatgaagttgggttccagtgaatttgaaacaggaaatgtggctccctatactgtcatatggatatagtctgctatttaggtgctccatgtctcaattgtgaagttggtaagaaccttgggagaaccacaccacataaggtagccattgtaattggagagcctaagatcttttataccccagactagaatcccatacttctaatgtgagactttagtaccatattttgcaattggatcctaagtcctaacatcccaccacactgcacaaccctagtgccatgcaggttatttatgcacgagtcctttgactagtcctgggagaacacttaaatgctggcatcatcacttgtgctgatcgtttgcaactgggaaacatggtggaaagctctgaccttggcagaaccaaacctcaaaaggtagctgtatagttagagagcccaagaccttatataccccacactagaatcccatacttccaatttgagactcaagtcccataccttacaattaccattggatcctaacagaagttccctaccaattgaggagctgctaagagtggcttcgctcctttatgctgcaagaggggccactgtacaaaagtaccgaactttattaatgtatcggttttgtatgaggcaattatgatacaagaatttgttatttggtatgatgttaaagttgtcagagtagtctagtataagattgttatgtttgctagatctgttagcttctgttaagccagttaggatttaagtttattgacagctacatatatgcatacagctaagcttgtgctgcaagcatcctgcttttataaatactgtccaacacttagtcaatcaagtggaatacatttcattcagaaaacatatcacactctctcactcagttttcacacactgtaaaattctaacatggtatcatagagcctctttcaatcgttgccaatcatcatggattattggcaaaatttgttcacttcccttgatcctcaacagtccatcattctcctcaaatttcaatccctgcactgacaccaattaccttctctcacctcactctatccccgtcactcaacaagaacaacttcttgcaatggctacaacaaatgaactatttgatccagctatctgaggggatgaacttcaactttctaattcaatcttagcttgctttgttggatttcaccactcctatcaggtttgggatgaaattcatagccattttcatgcactcgtgcttgcaaaatccactcagttccacttagagatttgaatgatgaagaatggagcaagttccacctcagaattcttttgcatcaaacctctagtagactcattgtttgccattagaaatccagtattctatctagttgcaacaattttgaggctagtcttggaggcctccatgactaatacttttcattatgactgttactggtcttgtcgagcctctcagtgagggaaatcaagtgatttcttgttctaaaggcgtgatttaaaaggaacaagcaaagtgctctacaggaactgttgtctgtcaaagttgctcattttgttgttcatccttcatcctttgttcagccatgttgttaccttacaccatctcattctggtgttcagccttttgtggctaaccattccacaaatgcctatggcttccctctaacttatgctgatcataataatgacaactcattctgaggacttgaaggttgtaacttgtaatgacagagcttgtggctgaggtggaggacgttttggtggttggagcttgatccaatgtcagatatcccataaatcaggacatggtgccactgtgttgtcactgaaacataaacgccttctcgcaatatggctttaactttccctaactactcccatgaccatgatgagctcaacacatgccctatcagtatgttccaccactggctcctttgctactcccatgccctcattcatttgtgcctagatgcttaatcctttggtgctatgcctgctgcattgagtcagattcatccttgtgctagcacagctgcctcatgctctgttctctggttgtttaaattcctctcaggcctggtacgtgaacatgaataccatgcaccatgttactttagatccacagaaccttctctcaagaatacctatttgagtggctgagattcaattctgttgggcaaggtttgtcctcttcatcaatttgttccacatctttccatcttccctacaatccaacacatcacactctcaaaaatttacgtctggttccagacataaaatctgatcagtgtcagtacatttgcccaacataatcatgtattcttttagtttcatctttttcattgccttgtcaaatctcaaggatcgtggtgctttttgtaggacacacatgggaaggatggacactataaattctcaaatcttactagggtgcacaaaacatttagattgatgatggtaatacccttttaactgttgctgatggcagtatcctttgttgggtactcctctacttagaaaggatacttgttaacatccttcatctaaaaaattctgtctctcgatgttaccttttattaggaacaagcctattttactcaatcttatccttaagggtgagtgtgttagtgaagatcaggggattctttttgaaacatttggtcttcctggtctcaagtcaaattcccatgaacttgagtcaaaggaagcactgactgaaacagaaaccctagtagttgaagataaccatgacctcccaattgctatcaaaggattcagaaaatgcacctgaaagtcactaggtcctctctcaaataacctcgtttaaaattttttcagcaacccataaaacctttcctgcaaatcttaacactatcccaattcccaataatgtttttgaggcattattcaataaaaattgaaactaggccacagatattgaaatcgagggcattggagaagaataaatcatgggagttggtctgttggttgctttattaattatcagaagaaaatgtcaaatgggtgtatacagtaaaatataaggcacctgggtcgatttagaggtacaaagcaatactggttgctaaaggtttcacagaaaccaatgggattgattatattcaaaggttttacagaaactcaagttgcaaagatgaacattaggtcattacccggaagtaacacactttatggctcgtgtacacaagccgaatgacgtcttgtgatccttgtagctgaccttacttagtgggacaagactttgttgttcaggtgactcaatctaggaaaggtatttttatatctcaacaaaaaatatcacaaatttgctccaggagacagacaagacagcttataaaattgtgagtactcctatagatttgagccataaactgggtagtgtagatgaaggtgctacagtagataatgagatgcattgagttgagaacctgtacatgttattgtacttttctcagaggaaatcttgtaatttgaaggagtaaaaaacataatgtagttgctcattctagtgttgaatttgaaggtgtgttttgggctatggctcaaggtatttctgaattactttggcttgagattattttaggagatttgaagattaaatgggattgatttatgaagctctattgttgtgataatgtcagcaattacattgctcatattccagttcaacaagatcgaactaaacacattgaggtggacagacagtttatcaaagaataacatccaagctgagaatggagaattcatgttcatctacttgagggggaacgttggaaattgaatcatattaatattcaattagagtaagttcaatgttatcataggatatggtgttctcttaatttgtcacttgtaaattgtatttgtcatttattattaatgtaatcctcgggactataaattgaagcatactgtttaatgaaacacttgctaggggtggcttttggtgagctggacttttagagaactcaacatcccagcccacatagctgttccaaaatgagttgataaatgggttgaggttggctagcccattgagcttttttgtttaaaaaaatcttaaaagtgataaaaaaaaacactgacattttgtataaaaatatatcagattcttggtaaatattatgtgctacaagttgtgaaggtaataattgagactctgaagttgcgataattaacatgactgatggaaaatttatgatggtggacatttttataaaacaggagtaccattgttttaactttatttgtttttgttttttgattagtttttgtcatgccttatttgtgcagtgtctgaagc

SEQ ID NO: 2324 - DNA, 1320 bp, Glycine max
  Intron number 1 from transcript Glyma02g31110.1 (locus Gly ma02g31110) derived from phytozome v7.0 (chr-ID Gm02; pos 33751780 to 33753099)
atagactacatctctctccactgacgtggtgagtctggtgacatccctttttatcagtgatcattttgatggtgacatctcttcttaccaacaataattctgttgatatcacctcttgccaatgatcattttggcagtgagatcttttcccaccactaacaatcatacaagtggtgagttttcttaccatagtaaatcatattactggtagtggtggtgattcctcccatctcactaatgaatcatactggtgatgaattgtctatcggatgcaatataaccaggttcccacagacaaatcatattggtggtgatttctgccctcgatgagtaatacctctgatgatttctctattggctgcaatatgaactagatttaatctcaaactcttatattctatggatgagattcacacttagcttcagtttttaagttttgggggctactagattttctttcagtttgaatcttccaaatgcttattctgatggatttggagaaatttgggccttgtctcttggtcattctagccatgtatatattgacttgtcttttcaactatggtctatggttatagctgacattattttcagaattattttcttttagttttttaattgtgacaatgttaaaacttttgtaagcattagcttcaagggaagtgcttgaatttatactaaatatctcagaatatattcaatgtgtcttaaaatattttagaatatctctaaatattatagaaatatttagaatgatattatctaatctgacataatatacttaggaagcaacctcaagagttgtttcataattttattatgtttccttatttagtcattgttagaaattttattttattagtgtgtgctgtgtgctttggcttgttctagcagtgccacatcagcactttactaaatagaacagaaagccggcaaaagtaagcaattatttctccaatataattcgaaccaaatatgcactagatagcatcattggattagcattttatatcagataattagacatcacaaatccataatacacctttttgattctaataacctgtaatttagagtccctgttctcttttcctcattcactaccaaaaccacatatgacttcgtaaaaaccattagcagtcaccctactgtcatgatttttcccacctgagcttttaaaaattattatatctgtttaaattcaacaaaaatctaccagccaatcccttcatttcctttaaacacgtgattgaaataataaaactgaagcaagaagacttctgtcattttatgtttgacaggaaacaacttatcaagagc

SEQ ID NO: 2325 - DNA, 1736 bp, Glycine max
  Intron number 6 from transcript Glyma20g35050.1 (locus Gly ma20g35050) derived from phytozome v7.0 (chr-ID Gm20; pos 43345031 to 43346766 reverse strand)
agtgcggctgcttgctagtgatagctagattggtacaatttaacattgatattccttgatgcaatgtattgcaatgctggatttcatgacattcttctttttatacatgtgtacggatgtacatgtatatgtagtaatataatatgaaaaaacatatagcttggtatctttgtcactggtggataaacattatcttgacatgttggaagttatgatttgggggtatttgtttaaaagaacaaaatcatttattctctaaatttatataggggatgggggggtgttgatgtgcatgtgaagatgctagtatacataaattaaaagctaaaatagaaaccatgagggggaagtctgcacttttgtcaggtaggagaaaactaaagtaacttttgccattgctttatgaagatggtggtgtcttaggcttactgctgtctttactctttactttgttatatcattgtactctttagagcttatctactccaaaccttaaagtatcttcattttgtttttctcttttatttttaacaatcaacatatgcgatataggtttctgtccatgactagttttttggggttggattgtgtgctgtttagtttttttatagttgactatttgtactatattatgtaggcagatgggattgaatggctttatagatcctaagcttctggttgatttggttcttaacatggaatagatcctctttgaccatgtggtttggggtggaatggaaataggctagtttaaacaaggttttatttaaatgagactagcatgttaaaaaaatccaaggctaagcctagccttttagctgtcataggctttcttttaggtcgagtctggcctttttaaaagcttttggtttggcctattagtctacttaaaagcctatttcatattaatgctttatgtaggtgtgacctatctttaaataaactaatctactaataggccaatgaaaaaaactctgtaaaaagtgtaaaacaaactataaactatgaaaattagaactactactaaaagtatcaaatagaggtagaaataggtagactagactttataagagttgagtctagcttgtttatatgatgtaagcataactaaataggttaatcttttggtaaaaaaaaggttggccttttagtccttaggctttttgaatgaccaaaaattaggcctttttaaccaaataaacttttataaaagtcttagcctaggttatttccaaagaaggcttagtctggcttgggcttaatgtaggctaggtcatagcctcccatggagtggtctgacctatttccatccctacacgtggtcatgacttaatcctcaccatgtcaattcttcataatataaaaattgaatttttacattagatgttctttatccatgcttaggatcaaaggatttcattaggaggagaccctacttgttagagataaaaactgttctagacctgcttttgggttaatttgattcttgacagttgagggaaacataggcttttttcatctgtttattctttgttatttacttctgatcaatattttgtgtatgtagaattattaatatcattgatttattcttgaaaagttccaggttgtatagatgtacatgttcttgttttctctgaatgataatatgggctatttgttccaatcttaaaaggacaaaaaacaaaataaactgcagcctgattgaaataggactgttgttgtggttgtaggta

SEQ ID NO: 2326 - DNA, 1055 bp, Glycine max
  Intron number 3 from transcript Glyma03g32210.2 (locus Gly ma03g32210) derived from phytozome v7.0 (chr-ID Gm03; pos 40009246 to 40010300)
agcaccattgatcaagcaaccagacttcgtagggggtaatactaagatctcttacactcttaattggagaataatagttaagagtgtcttaaggaatacaagcggcatactctttattattgattgaaattcatgtgggactcaccaaattgtgtggtccacacatttcatccttaatgggacccacatgaaattaacctaataataaagaatttgttgaaaagagtgttctatagagcgtgttgatagcatttctcagtgtcttttgtaaaaattcatcaaaattacagcctgatactattatgtccttcaaatatgttgcacttttccttttgccaaaactaaaccttgttgtaagttgtgtgagaattggttattgaacaaaggcgatagtttactagtcataggattttcatctcctgtggtgttctttcttttgattcaagtttataaacttttcgaaaatggtagtttttcctggcatgtatcctatgcttcaaagaactagattattattcatgccctagtgtattcacatcaaacaaaagaaatcaaaatagtaaaactccagagaataattgtttaaaattattgaagataatatttgacgattttcaagttttggtgaattagtttgattcatctatagatgtatatcttctgagtccttttttttttggattttttagggttataagtttcattttaatcatgttgtagaacttctgagggaaaagggtggaagtcacaaatatctttacctcatatcataggcataatgataatctgattgtatgcactaaactaaacttgtgtttctctatatattctgtccacatttatctgattagtagttatctgctggtgtaattcgaaaattgtactatttgaatgtattagtgtcattaaaatctttctaattggccttccaaaaaaatatctttctatttgctatgattaaaggatatgatttcatgaactctttttgtttgttaagcctgtacaactagtctttttgccctccatttatatttggaaatttgtatttcaggtac

SEQ ID NO: 2327 - DNA, 1551 bp, Glycine max
  Intron number 2 from transcript Glyma07g35010.1 (locus Gly ma07g35010) derived from phytozome v7.0 (chr-ID Gm07; pos 40130664 to 40132214 reverse strand)
accgaagggtgggttgttgcactttcaaatagatattatgtgggcattttacctctccagagcttaagttgcaatttaaattagtgtagcatgtttgtgttcttgccattgcggataaccagtatatcataagtgtaaatggcaaatagaaatatcaacactatctagaagatggtttgttgtgcagaattattttccttagttaaatttccaatgcttgacatgcctggttggcagatactttgtggatggtttttgtctgtaatattggtagtttctcctgtttaaaagcatatgcttggttttggattgttttttaaataaatgaaaactagctaaaattttctttctattgacttgtgatatgaattatgaacacctagaaattttatggtgttgtcatattttgtcttcataaagtcatagtgataaacatagctgagaaacccaagctttaagaaatttgtttatttatatgcccactgcattttttattatttcaaaagatttttgatgataactattcttggaaaggttgagtttgtcttacatttgtctaactctaatatactacactctcaatattgaaaatgttttgggtgcatattcagtctggaaattttttctaaaattctgtgaagttgaaaggttgcatggggagtggtaaccagaataacagagaatgaaatgagagagagatggacctaaaagaatgagtattgatattgctggaattgggcatgaggagagaagtcctccaagggaagtccccatgcaactgagcagagttcagttgttcttaatcttgacctcctctcattctgttccatcctttactatttagcaacctaccataacagaataactgtcaacctactgactcctttctgacaaatctaactactgggccttttctcactagtggggccctttttcttacaagaataaaccttccaaattctgtctttctctgcctgggacctaacagaaattgtctaaggacttatatgtttcagaagatgtctatatactgagtgcagaatttattgcttttcaatagggatttgtaatcaataatttctattgtctgttttgcataatattattattttaggtgggttttctacttcgcacgaaatctggttttgaacaggtcaatctattcatttttagtttagaggaaagttttgtaatggaaggtgaatggatcttctaaatttgcatcttttgtatcttacattttataagttaatatttctgtgaaatttttatcatctatcccacatttttattccatttaactcttttatcttacattttatttcaagttccaagttgcaactgctgcttaaacttttctgtttagtgaagtttcaaaatctttaacacttctatgctttattatttgagttctataattatttgatgtaaggaggttcctaatttatattaagagaatgtagatgttaaagctgtatagttttaaagattacttaatcaaaaactcataattcacttgatgaacttttgcagaccattgcaacggtctgt

SEQ ID NO: 2328 - DNA, 2819 bp, Glycine max
  Intron number 1 from transcript Glyma20g05700.1 (locus Gly ma20g05700) derived from phytozome v7.0 (chr-ID Gm20; pos 6816836 to 6819654 reverse strand)
tgagcttgtcgaaagaggcattattcccttccaaggtgattattgtttaattattaattttctctcactttttttttaatactgacctaattaatactcatcaaatcaaatctttccattaacattttacacagggagactcaaaatttgcacactagatgtaacagtatatctcttactacatacaacacaataataacaataataataaaactaacatgaatggacaaagtaaaaacaatcaaaggattaatccactggtataaagctcttttgcatttatatgaggggaataatctatttaatatgagtattcgtgtttgattctcatcatatgtgtataatcttcttgagtcaacaacaaccatactctgtgaaagaaattagtctcaagatttgactaggatacagagtgacacatcattcttactgcatcaaatctagtaggtcctttaaagatatcctttaaaggtatacatgttattatattatactttaaaaaaaaattaatcatgaagtcagtttattaaagatctttgggggggggggggggaggggggtgttgtcatattagttccttagatattttcttacaaattaaaattatcacttttggatttaattgtaaaagaatgttgtcatattattttcttagatttttgtctctattttttttggtgaatccaagacgtatgtttctcaatccacctgatcaaagactaatatcacttatggtatctgactatcactagcccaagagaattatgtgtatagagagaaacaattctctggctaaatagatggtttccccacatataaatacaatgattaatcttgaagtgatttttttatctgtaggaatcaaagtctaacataaaatgaatatgataacattttaaaatttttagggaataatttagtgacaagttttttagatgaataatatgataaattttaaatctttgaaagactaataattaaaaaaaatgtaaattataaaaatatgctagttaagatgacattacaattttacagaattaaatgttatttcgtttatttgagtgagaataaaaatttaaagtctcaaaatctttgtttttgctggaatttgtatttcatattaatcacgtggtttgtatctagtatgtattgtcctatgggagatattatgaaaatattttgttgttttgatcataaattaaatagcttacaacttgaataaatatttttatgatctcttccattacttacagaaacaaattatacttaaatacttatatacttatttgataagtatattaaataaatacttaattaattaagaaatttatccaaaaacactctaaactaaattgattagaggatgtttaattaattgtacctaagtcatgtaattttgatgttaggttcaaaaactaaatttaattatttttacctggattttatatatatatatatatatatatatatatatataatttatatttaggttcaaaataacatctcataaaattggtagcataataatacgtcacactctttcaacgggaccacaaagagagtgatttcaactcaacgtatcagggttatcagacttggacaagtgattgattcggtcaggatgttgaatcattagatcagggatcaatctagtgagtcattaattaacctatataagctagtctatattataaaaatataaataatttaataacatgtaaacttatacacttgagatttaaaatttaataaaattcaacatatttaaaaacataattatgaacttgtttaaaattttgaacatgcaacatatttttttgaatttagtatatataaaaaaatttaagttagaatttaaaatatgtattattattgtataatgacaaacataatctaatacatgcaaattagtcaaggaaaaaatgaagaggataacagctttatcatcttacatttcaagatatggttatacttggtaaaaaatataagtaaatttataaacaataaaagtgtaaggtataaatttatttttctaatataaatgatgttaaaattgtaaaaaagaaaatgcatgataaaaaaaatgctacactgaattgtaccaggtcatttggagaacacatccaataagtggttcagactcattgagagtccaattattctcgggtcatctagtcgaccagtcagttcgaatcgaatttaataactacacaacttacacgataaaatataattataaaagatagcacaaaaagctcttgatatttatatacatgtattgaagtaaaaaaaatgaatgtaggtatatatttattaatctcaatgtaataaaaatgatattttatacatagtttacaccaaattagtcaattaatgaatacatttttatttttaaatttgcatcataatctaataaaagatttcatttttatatctctgatattatatataagaaacgtaagataaattatcaaaatcataaatttaaattttattctaaaaatacctttaaattttattcttataaatgaaagtcacatttaatattagtattcataatacaataagtgaatgttagtaaatagagttaaaaataaattaaagatataaaaagaaatttaatatggataagcttgaaaattggtgattatttcttaattagaatgaacgaaaaacattttatttctcacctcattcagcaccaaaaatgataatatggcattcgtatcaaagtaaaagaaatccaaaaaataatttttgaaaaatgactaaaatattcaactcgtttaatgtaataatatttttgttcaaaatttcag

SEQ ID NO: 2329 - DNA, 1333 bp, Glycine max
  Intron number 1 from transcript Glyma15g08820.1 (locus Gly ma15g08820) derived from phytozome v7.0 (chr-ID Gm15; pos 6236361 to 6237693)
tccttcccttctctctcccccttcctccatttcaggtacttctgttgcttaattcccatctgggtatttgttcttttacacttccatttggttccttcactaataaccatgtgggtcgttttaaatttcgttttttttttcctgggtgaatttcattgtaccttgtttcctatgattttgtgtagttttatttgggaagtgctgataggggttgatgttgtttatgggttaaaatgtttttgtggtttggatttaatttcacttgaacatgggtacgttttggaacggaagttcctcttgtgggttttaaaagagatttacttttctgtcaatttaagtcaaataggagttgatgccactaccaataacttcgtcgcaaactaccaacattattttcacagtggctttatattactactattatttgtaatggtaagtaacactttaaaatgcttgcattttttgtcttttggttttcggattaagtacagttagagacgtcactggtgatgtctgagtatgtaatgtagttggaatagatccaatgagcttgcttcctgcttcatggctgcattctggtgaattccagatttaggagaaccactttatttttattcctatgatccctcaattgcaatttttatgatgctaaacgggtgcagcaatgcttttaattgttgtgataaaaattcttctttctgtaatcattgtgatctggtattattagtacctagtggtatccgtaacatcttgatgtgacacaaacataattgattccttaacttttaaaggttgaactccttgtccttggtcctcctggctcaaagtaaaggatttatgtaggttatgatggagaagagactcaaatgggaccaatagcttgtgtcagttaggaatacctcaatgacaccctttcataaacatcattaaggacattaggaaactcaagcaatacttcactcatacattaaaattcaacatattttgccaatgaaactttctagctaataacttggcaaagaaaaagagaaattgtgggcagaaaaagggaagaaaccagagctgttaacattttgttattactaactgactagctatgaattatttggtgcagttgttcaatgttgcgtatgaccatagttgttgtgtttaatctgactagctgacttcatctagtggaataaggcttttgttgttgttgagcttttgctgttgatttgcttaatgtgtatgtataaagataaaattcttgttcaaatttagcttgatttgatctcaactaaattttcaatgttaaggcttgtcacttggattggatttgacatctaatttt

SEQ ID NO: 2330 - DNA, 1443 bp, Glycine max
  Intron number 2 from transcript Glyma17g26590.1 (locus Gly ma17g26590) derived from phytozome v7.0 (chr-ID Gm17; pos 27861461 to 27862903)
ctacacatattctgaggttgtcaaagccaacctaggtaagcaagaataataccaaaaggctttaatatgtttaaaattcatgataaatgattgaattttattttaaatttctaaccaatttttctgttattttgagttttgatatattaaaaaatttattttgatcctgtctgtcataatttaagtaataatgtattatctaacaaattaatttttcaaacattattcattgttaggatgatatcatgttattacttaattaattaactataaaagatttaaaataaaaattataataaattatagaattaaaataataatttttttattaaagacataaaataaaattcgatcattaagtactttaaacatatttaattcatacaaaaaatgctagcaatatattttctttctgatatacaatactcttttaaatatattatttatcattatagattaaaatttattgagaacatattgtctactattattcattaaaatttattgaaaatcatagattatgtaaatcttatttttaattatatgattttcaatccattttgatcaatttgcttaattttccattggccttttgcgcgcttatcctgttttatcattactttttgtagtacttgcctaaatatgatacatttattttaattctgttgtttcttgttaatttatttctacctggactaaatgagttcaaattattgattatattttttaaaaaaaaagctaaaaatgttgtgtttatttgaactttgaagagaggaggagaaaaataatgtgagttttacgagagttacacgcctcttacactggaatatattttagtggcagacacgtatagaaatagttttaactagatgtctgaatgtgaaaatttgattctttgtatgtattgttcaaagagacaataatttgtactttttaaaaaatacagtacaataatttatgtcggtaattaagtggctgagacttgacactttgggatagggagttcgggcttttcaagtactctgcttttgtttattgtcaatgcaaacaaaaattcattgtttcttaacagagatatgtcacatgactagggatactatttttcccgtgacaaggttttgtattgaaaggtgcatttattattttttctgtttgcatttataagatttaattatctattttattaagatttaaaaaagttattaatataattaatagtaattttttcaaaactattcttattattaagatttttgtcgattttaattatttgtcaatataaaaaaaagaagaaagtgagtataattctttgttaagaagtaaagtacgtatacatgaatttttctcattaataattgtttgatgcacctttatatattttaatttgttacccttcttctgtctataggaggaagaaaatttcagctgtgtggattggctcag

SEQ ID NO: 2331 - DNA, 1037 bp, Glycine max
  Intron number 7 from transcript Glyma18g25560.1 (locus Gly ma18g25560) derived from phytozome v7.0 (chr-ID Gm18; pos 29332451 to 29333487 reverse strand)
aaagtcttttattggactcatctgatccagacgaggtgggtttcatttgcttgacaacattgctcaaatatgaggtcaattatatatgttttcatggctggattttttatgatggtattttaagttacatagaattaagatttcgaaatttgttgacattactattattattatcattattattattattaattcccatcctttgaaaccaaatactacaaagtatagagttgaagcacactgagatttgtagattgttaatgagggtttaagctgtcttatgttgttaaagggtaacaagaaaatttgttatgaataatttttcttataaatacttttgtcaacaattagtcattaactgtttatttttaatatgctattgcatggtatcaatatcttgcagttacatggtatcaatatctttattttcagttatgtgtatagtgttgagaaaggatattgtttggattaaattgcatggtaggggcttgaatcccatattggaagtatgagattctagtgtggggtttataaggtcttgactctccaactacactggccagcttttgtatttaggttctccaaagattcttattagatattgttagatgtttaaagttgaatatctaagattgctacatgcatttaacctagggcattaatcatacctaggatttaggaatttgagttgttgtcatacaaacatggtaattttaaatatctagatttcttattccccattgtcttactccctttcatgatgtttatgtacctaattcctgtttatatacctaactcctgtagaaggatggattaaaaaaattcttctgctaaatacttgaactttacagctgttctgggtgttttaaattgctgtagatgctggactctaaaacttttcttacatgttgttctactttactgctgtaattattctaatcattatttgatcacatcttaatatttttggtagataatcattttgtgttttactatgttcagattgataggaagaatcttaccgatttaaaggtcta

SEQ ID NO: 2332 - DNA, 8785 bp, Glycine max
  Intron number 2 from transcript Glyma16g22530.1 (locus Gly ma16g22530) derived from phytozome v7.0 (chr-ID Gm16; pos 26016665 to 26025449 reverse strand)
atcaaaccctacgaagctacggtatttccattataccatttcgacagtgttattttattttaaatgtttttttattaattgaatgatgttagggtaggtgttgtagattctgttgagttcatgaatgtggttctgattgtatttaaattaatgtgtaactctttcgtcaaataaaatggctcaagtcgaattggagtaagggttatgatgggttaggatttaaagggaatatggcatcaagtttctttaacccatttctaagagaagatgagtgtgcgatgtggaagtgaagggtgttattttctctctctgagggagattagtctcgtctctcgagtttcagttaacaaagtgtttggtccagctttttttgacttttcttttttccttaaaaataatttgttgcaagtgatccatttttggcatatcaacgagttttacattagctgcagaggacctaatatagctctcttcctttattttgggttgggactaactatgaaaatgaaaccttaggcaaagttgtgataagaaccttggcagaaccccacactagaattccatactaacaaatgtaggactcaagctagttcttgtagaaccttggcaaagctagttcttgtagttgaagagctcaaagccttataaagcccacactagaattccatactaaaagatgtaggactcaagtactatatcttggaattggatccgaacaagttattggtgtgacactgataagatgacagaaaatcggttaaggtgtttaggaaaggctactggaagcaccattgaggagagtagattgcatgatttctagtcctataaaaactaaaaagggggagagggagacaaaggacacttgaggaatttgttaataaataacatttctaaagatttggtctttaagtaagctaaatggcattgtgcgatccatgcagcaatctcacttattgggataaagctttgttgttgttgttgttcttttttcattacaagagaagttgagcatcaaacatattgtttgacaagcacgtatgcaacatagtttttatttaacaaaaggaaataattagcattttaagaaaagccagttctctctctctcctttttttttttgatcagccaaaaatataatatattcattaataagtactagaggtactaaatcgttacatatttttataagtacaaatcatagctgattctctaacaagccttgagattacacaagctgaaagaaaactacattagggtaatagtgcagaactgtatcctatttccctatgttcgtgtccgaagaaaaccatctttgatatttgaagaccactgattaaaatgagatgtgaaattcttttctaagtttctgagccatgtccatagcaaaaacactgtttcgtccattatattatgagcattgaaaacaacattggagaaaatgatgctatttctatgcttccaaattgtataagtcagtgctaaccaccacgactgccatctgtgcgcctgcactccgtcatagactccatagaaatgctggagaaaatgctgtctcagttgatgcgggaatacccccaccagattcacccacgccaccgcttcccaccacaaagggataattttgctgcattgaaagaataaatgacttgcactctcttctgccgatctgcaaaaaggacacaaatattcttgcaattcaacccttttcttcttcaaattacctctggttggcaatctgtcctttagtaacctccaagcgaaaatagccactttcgatggtaccctaagcttccataattccttatatccaccatcctgcccctctcctaacacgctttctctagaataacttccatttggttctgctgcccatctccattggtcatttaaatctgggctgattgtgatcccttcaatttcttgtatgaatgcgactgccaactctatctcgccatcaaacagcggcctcctccactggaaaggccactcccacccttcttctttgaaagctcctaattgctgaatgagatggtgtttctgagccgatatggtgtacagtcttcgatatttcactgataattggcttcctccacctatccacttgtccttccaaaatttgaacttgtccccacacccgaccttccaagaaattgatctattcagttgctgtccctgaagagtgtgttgatttaccatcttcaagtccctccaccacagggattcggtactaaccatatgatctccatctagactcctccatcctccatactttgagtcaagtactcttgcccaagtctccccctggttctgaaacaaatcccatttccactttcccagcaatgatacattaaacgcggtgatatccttgactcccagtcctccttcttcctttggtaaacataccttctcccaccgaatccaagcaatcttgttttgatccgacacacctccccataaaaaattcttttgtaatatgactagcttgtctacaacctgtttaggaaccctgaaaaatgagaaaaaataaatcggaatggatgttaacactgaatttatgagagtcactctctccccaaaacacaaatgccgttgtttccatctcgctaattttctctcacatttagtgatgatagggtcccaagtctgacatcttctgggattggcactaataggaatgccaagatatgtgaaaggaaaagacatcaagctacaattgaggtaattggatgcaccatgggtccattgctccgacataccaaatgccccacaactgcttttagcaaaatttattttgagccccaatgctagttcaaaagcacgcagtatagctttgatagctcttacattctccatggttgcctctcccaaaaatattgtattatctgcatactggagcaggctaatttcaaccttttttatgcccgataagtatcccttgtataggcctctatcaatagcctttgacattataccgcttagtccttcagcaacaatgttgaacaaaagaggtgataaaggatctcactgtctgagtcctttctgcggtatgaactcacatgaagggctaccattaaccaaaatcgatatcgaagctgattttagacatccagacatccattggatccactttgaaacaaagcccattatcctcatcatataaaacaagaattcccaggacattgaatcgtaagccttctcataatccacttgaaaacaaagcaaggtttttggcatcttttagcctcttcgactacctcgtttgctatcaccacactatggagcatatgtctgccttctatgaatgttgactgtcgttcattaatgatgctatgcataactttcttcaatttgttagccaacaccttggcaagaatcttatacgtacaccctatcagtgagataggcctgtagtcattcagcacttgagggtccgctaccttcgggattaaagctatgaaagatgcattcaaacccctcgggaatactccattaacatagaactcatcaaagaatctgagaaaatctggtttgataacctcccaaaattgcttgatgaatttaaaattaagcccgtccagacctggacttctatcacttccaccgctccacacaaccctttttatctcctcctccttgaaacgctccactagcatgtcattctgcatagaattaatggctttgaaactgattccatccaaagttggtctatcgaaatcatcttcctggaacctccgagcaaagaacctcctgacttcctctttgactactgccggttcatccttccacacgccatccactatcactctgttcaaacaattggatctccgccttgagtttatcagcaaatggaaatatctcgagttgcaatctccttccttaatccacctggatctggccttctgtctcaatagggactcatgtgtttgggctgcctcccataattcttgctgaagccgctttctaactacccgttcgctgtctttcagctgatacctcttccaatttaactcttcctctatcttcttgaatttgctgaaagtgtccccaaattgttctttgttccacacctttatcttgagtgctttgattttttcttttagcacgtaacccccctacccgctttgaggattagatgaccaactttcaattacgactttgttgaaagatttatcggatagccagcaatctagtaatctgaaggattttgggccccagtcgacatttttggacctgacaggacaggacaatgatccgaaaaattcctaaccaacattgattgggtggacgtaggccatttggccagccattctggggaaaccatgaatctatccaacttgcttttagctgtaccatttggtctaaaccatgtgaatcactttcccacccaagatgcctcttctacctccaactcctcgatccaattgttgaattccgcaatgcttccatctaccagccccctttgagaagaccccattctctctgacggcatcctaatgtttgttaaaatcccctaagatgcaccaatatccgcttgggttttgatttttcaactgagctacactatcccacaatacccttttttcgtgaagattgcacggggaatagatattgacgacatgtattaaatgtgattcttggccccacttccttgacagcaatatgaaactagctcctaccaatctgctttccaccttgaaggatgtctcattccaaacacagagtatacccccaactgaattagctgttggatattcctcccaactgaaatcagattttccccataaggcctggcacattgacttacttatactctccttttttgtttcttgtaaacacagcagatcaatgcgatgctcgctaaccatccttctgattgtcggccatttaacccccctccctaaccctcttacattgtatgagatgatactcatggggtccatctcttaattcccaagctagctgcctcttctccatctctttcctccatatcctccaacatttgaacataatttctttttgaagttcctgttgtcagccccagttcagtaaccatgttccacacactctttgcatgatggtcgtgattttccgcctggttttgtatgttaagcctttgctgtgttggtgactgatccatgttcccttgttgatcctgaagtccatttgcagcgtttttttgctgacttggttcagtatcgagaagtactgggcttaaagtaacttgatttatgatagcaccagcagtgtgggctgtgtttttttcttttccccctttttgggaatacactagccacggagtagaaaatctagcttctcgtgaaaatgggactttattatgagtggaaacagctttaggggcagtgtgaatagcaaggcccaggtccattggcccctttacctccaagtcacatgacatttggattgctgatttaaaactacattgaccttcctcaagctcttctcctcaaacgttcactgtctcctccctttttccattttcgtgcaagttgtgtgtaatggcagtgctgtcacagttgccgaggttctgttcacccccttttacatgcacaccttccccttggacctctgccgccactgcgctacagctctgcgcgcactgagctttggtttgcacagtgtccgtgcctttgatgacccatcggacaatagcattatccattggtccgttgctttgaccaaacaccctgttactctggtccgcgctgtccgttcccagtgttagtggttgtgaatggtttatcaatagcggtcgtcgaccttcctcaccacgtgccgccatctcctatctgtcggaatccgccgctgtgccgccagtcatatccctcgcacttcgagctctcgtctcggactttgctgggtcatcactgtccctcccacggcgggcgtcatcctcttgttccttaactcccgtcgtgggatcttcctccatccctattacttctacgcccacgtcctcatctgctgtttttctgcctgctgtcgagtctagtacttggaatttgtgccaccgtgacggaaacgctcctccattcgacacttcgtcatctccttcctcggagttaatctcctcagatgagctgaaatcacttcctctcctttgctgccacctatctcctgagtgcccacactcttccgctacgtgcacctgaaatttctccccctgtatgttgacagtcactgtgtgttgtatcagcggcttccacggcgttttgactaggatccgtgccacctctaaactccttcgttcctctacgcagtcttcaacatccaccacatcgccaatacccgaaactatttgttgaatgtgatgcctatcccatgctaccaaaggtattccccaacattgaagccaggtcaatctgaacccaggccgtagtttgggattccatttctctatggagtaaaataactcgccccatccttcatcttcatcgttcagctttctcgttcagctttctcttttgtgagactgaggagcaaaaccatatcacctccgatgtattttagtgaaatgttttgtccgctgtcccaccatatttcatcttctaagctgtcaaagcttgctaggttttgcagcctgcccacccatgcctccttgagccactgctggcctgttagcggtatatcaagattaacttcggatgtcgaattgtgacgaatatcactgactttggctggtgctctcctctgttctgctctttggttattccgagtaaccatctctgcatacgaccctctttggactcccaccttcgtttctgcattcctgctcaggtacatgtatcttttcccctcttgtggttgtctggcctctgctcttcccccttctgctgtttgtggctcttccttctttgctctctcatatttaggcacattaacatacatcttcattcctccaaacaccatgctgtccagtttcttttgaatctgctgtatgtctcgcacccctttaaacctcacgaacccatatctccttccttgtctgtttcttttccgaggtatgaaaacctctcgtacgtctcttgtctgctttaaatgataccataattcttctgcagttgcgtcttctgggaacctggtgaaatagaacgaggtaatgtccttatggtctctccaattcgctcgcatgtagctatgatgttgtcctgttgttctccctccaatggtcagaccggaaccctccgtcattcgtaatctggcactctctctcctctctcttctagtcctaactctctcccacccactgtttctctctctactctctctctctctctcctttctctcttcctgctctctttttctttctttgttgctcacccttgagtcctctctcataaattaaaaagaaatgaaaattttcaaacaacttttactttactttcaaagattttatttgaattttaactttaaagtagatttgaagccaaaagagtaaaaactgttggaccaataatagcctaagtcatgcttacacatatttaaataaccatatgtattttacttttaccacaataataatggattgattcctttcttggtctcagtacagttataaagtaacatgttaaagctatattaggtgatactttgggataaatcacctagcctttgatgtgttttattcttctttcattagtgaagtatccttatttgtttagtgaaattgacatgcccaaatcaatgtttgacaaagtaactaggttaaactaattattaaaactgttcagcagaactttgtgtcatgccatatagtgtacccctacttttttgcgaagagttatacgtatgtgtgttattcaatgtttttaaatggcggcaccatggctgccatggtggatttctgccaaccactataggcaatatgtgataggaagcctgctgtggtggcaccataggctgcaatggtgtgtttatatggtaaaattttggccttcctccatattctgccttgataacacttgtgttatttggttaaatgttttttatttgaagacttggaatcagaataccatgtttgaatttatgtttgatagggtattttatgtttgtgaagtttatgtataagggaggtatgggtaaaatggaaaaataggataatgttattgcatatgtatcctcgaggagaatgctcacaagtggcattgtctaaggaatcaaagtgggaagttttcatggaaaagtgtcagtgcgattttttattcaaaccttttatttattaattatttaaccagtgctcttaggttacttgtggcatgatccttatttactatttcatctgtatcatgttcgtcattttcttgaaaattgtaaatacttttatattcatgccacataagattcttgagtctaatatcttctcttctttgcatcggtgtggcatagtaataatataggattaatttgttgacaatcctcagagtgctttagcttgtattattatacaggaaggtagtttgtatattgtaaatatttttcaaacatgtcacacacacagattctttagactacaatatctctctttgcttctgtgtggcttttaataatgtagggttaattttttgacaattctcagaatgttttgccagcatagcttgtattaggcagaaaggtaatttttctattgtgttcctcaaaaccagcctacatctgttcacactgaactctaaggttattgagaaactattcgtcaaatgagtggacataactcaaatttctatttatctttataggtttggaggcagatcacactgtccatttggttcgt

SEQ ID NO: 2333 - DNA, 568 bp, Glycine max
  Intron number 1 from transcript Glyma18g50280.1 (locus Gly ma18g50280) derived from phytozome v7.0 (chr-ID Gm18; pos 59464674 to 59465241 reverse strand)
atctattcccaaggcctgtgcagttctatttaaggtatgcatgtctaaattaaacaaagatttactaaactactaaatctgtttaagttttttttttaatccgaacctgtttattttaaataagaggaatgctgacaaaaaaatttctagtactgtttttgtgattggttgagatgtgatacccatcaaaaatagtaatttttaataaatttcaattaatttaaaaaaaatatactaaaaggaaaatgttaaaaagaatatcagtagtatttctcttcatagaataactcacttctcactccaagcaggtcaatcttaaacatagtgttatttgtttaatacaatgaagcatatcatttttaataaaattgagtgtatttttttatgcaaagtatatttatattttaaaattccttttatatatataagaaattgtgtttactgttttattccaaatctacaagatttcagaatagacttgactggaagtttttaacaaatttctaatcctccatttttttaattcttacagatgattttacataattggagtgacgaagattgcagg

SEQ ID NO: 2334 - DNA, 4952 bp, Glycine max
  Intron number 1 from transcript Glyma13g20870.1 (locus Gly ma13g20870) derived from phytozome v7.0 (chr-ID Gm13; pos 24383744 to 24388695)
agatttcacgctgcctcaatagctctcactttcaggttcgtggatggttactatgtttatgatgatggtgttgttgtgggtttagatttgctatgttgcttgttaaacggctaccttctatgttatgacaatgatatgatacgtcatacatccaatctagtaagttgcgattgtttatttatggtatgcggggtgtggggaagaagaggggtatataagtttcagccgtctaattaatgaactttaattgtgacattccttttctgtttccccttttatagctccatactctattgtgattgaatccgtttttcttttaaggaaagttgtagtgtttattgtttagtggctttttatgccatgtgtctattactgatgcactttttttttgacgtttttaccgatgcacctttagataggagaaaaaggaaaaacatttattctgtgtcattaactattactgtgagaagttggtttatgttaaaatttcacttaattggctcgtgacttttcacatatagaaattcaaacatgcacatgcacatgcacatgcacatgcatgcttgtacagggattttgacttcattattgttcattgtctagttcagagctgagtactgaaatggcaaagtttaccagaattgaaattcaaccggagattgtttgtttacttattaattatgaaatattaagtgagatatatatcttttaaatagtaaaatacctagtacaaaacaaaggttacgtgggtaagggcatgtgttgggactataatgttaattttctatttaataactgttataaagtttgtcctctgtctcacgaagtttttaagaaatctgagttatggttttgtacttttgcttgtttcttattattaactttatttatttattattgttgtcatgtgcatgtgattctattttaagaatgacaacgtaattggaatttggaaccaattcttgagattgcggctgacggcttgtggagaatatggtttttagggtcaactgttctcttgtttcctgatttgtttggacaaatgcaacgcccttcttgatttaagataccgagtatatttctgtgatttaacatgatcaattgcactgtgccctctaacaacaaaatccagagttaagttagatggaataagagttatgttcaagtcacatgaccatactagaaatcaaaaacagtttgaaagggcataagaactcctaatgaacttgtgttctgacttctgagaagatgcccttagcttccttaatgcatcattttcatggatgacctttgtttctcaatagaagatgaatgggtaatatttcttggggacatgctctcataagtcattagctgcttgcatcatctaacatcttcctttctacaaaccctcccattaacacctggaaaggaaattgcccttttgtgaggttaattacacaagatagtaacttgtaccttccaaatttcagaaatcccatgtattgtttaatatattatatctaatgattattggtagggcatattttttatccagagagccaatgggctgccccccttgatggattctttttgggaggaattcattcatatcaattatgatgtttgtctctttatcatttacttccaaataataaagtactcttacctaatttattctaattggttagcatcttaaattatgatgaaattgtatgactatctcagtatcaaatcttcataggaatttattacaaccttttgcttccttctctggagttggtttaatctctgtcaagtgctgtttagtcttgagtgtggtgcatctttctgaaagatgaaaaccagtttgttgcatctttcttaattatgaaaccctttgtttgagcatgctcttcagaatctaactaagcaatgagacaatttctaagtcaggcaatttgagtccattttaatgaattcaatccgaagattctgaatgctctttgctattgatcacttggtcaataaatatcttcctgatgcttgtatatcattagacactgaaactagtgttgtttatgctaatgaagagaatattagcactagggaaagagacgtatctccacagtaagccgataaaacatattggggaagtaatattttgcagggagttaaaactcatcaggaaattattgagtctgtgaattattagaacttcaaggtcaagaagagatgaaatttaaaatatggttcctatagaaattatttgaggtttttttttttaatttctgctatgggacaacatttctgatgcacagaaaggaacaagggctaaattcagttttgatattgctttaagccgattggcagtgttttaaatcctggatagtggcgcggtcccaaaattttctatagagggatagtgggatagctgccattttgaaatttttatatagtttatataatgtatgctatatacatgtaaattctcaaaaatgataaaaatactcaaaattcatgacactcatgattaacaataaaaagttataggtgtgttaaacaaaacaaaaaaagtcaaatacaagcttcctagataggaatcatcaaccatcatcttctaaattcaagttgtctttatcattttcactactattacagctgcagatttcattttggaaaactgatatcccaaaaatagctgaagccattacaggggtcgctgtagtcgagcggccatagcacataacaaatagtgtgctgaatattatgcagtgctgctcccctacacggctatagcggtgctattttaaaccctgtgtattagttatgttacttatatgcaactggctaacttaaccttcatttggatacactggtggacctatcttcatgggaactttaatatttatattgcttccccccacacccccccccccccccccccccccccccccccccccaaaaaaaaaaaaaaaacaagtgttgctggctttacttttgtttggatggcaggtgatacattgcaaatgatcttcaattcttcacaaataaagtatgaatgggtttagtttcttagatcataagggtgttgcaattgatctaataaatcaggaagcaaagtgcaattgagccttcttttaactttttattcatgcattagccttgtttgcttctatcgtgttgctttctagtaacattatgatgaaactgccgtctcttggtttttgtaacccttaacatgaaaggctggaagaaactgaagggtacagaacacattttcaccctgaattctctggatatagacgaattgggtatactgttactgtttcttataagcctctgcatgcctttcaaattcccaacaagtggaaaatagcccctttcatccaaaattggctcaaatctctaaaatttcaattgaaaatccagttgcccagaaaattgagagaatttttatctgctgtttgccaaacccctgcacagctaatcccattttttcctttctttattctggaaaattgagtgaatggaatactctggaagtttaagcgggtaatttttaaagtcacaacacaggcttatttggtaaagttgagttcaagagggtgttttgcattgtattccaaattctataatgcttttgaattaaatttttgagtaaattacactcccttttcttgatagatgcttaagccacattcctctcctgtattttaaaaaattacactcctgtgagaattatgttaacctttaatccattttattgtggactggccttttaggacagttttcttctctctttttttgggacaatgttagttgttagttttcctctcttgacaactcagcatcgtagatatcctgttttaaccccctatggtcaactttgggaccttagaagatgatttgaagattttggattgatacttgtagcagaggtttttaaaacttcattgaattttcttaagacctaaaatcaataataagatgttcaaaattagttgtcagtgacattaaaaattagagaaagggaaaaaaaatgcctctaggaatctcatttatagtttctcacagtggctaagatgtttgtttaaaattaaatggactaaaggatagtatattttatctctcatgggaggagagtataacacatttatctctaacgggaggcgagagtaatatttaaagttagaggggagggtaatcatgtgaatgttatgtaccctaaaaaattttaggcttctttttaaaatctctttacgttatgcattgattccttatattgaacaattttctacttcctttttttattgagatcagttagctgcaatatcagtatggatgttttttcatatcagacaagtcttgggtacttttattactcttttaagagttgttgatgcagaattttgtctcaaaaaatattctggaagatttcgctatatagccctttttattaatgggtatcatataatggcttgtacatattttttttcagtttgtgtcattgtctgaatatttgttcttcctagaacttaaatgaaggaaatgaaagggtgaaacctaaaatttaaaaatcctgagcaaacaagataagctcttcaactggtcgatagtcatttgttgagagcaccatgaaatacccttctagtgtcccagcatatgaacccctctaaaatacccttagttgagcaccataataagtctaagaatatggtctttagttaatataggattgaggacttttacgtcttaatttttcttttatcctaaaaagaaaactttaatcaaacagcttctttaatttaccactgtaaatttttattcatgtctttttaatcagcatacagggttaagaatcgtgaaccgtcagaactgaattttgtttactgttattatttttcatggtttaaatgttctttcagaagtctttgcttagactcacttgttttgcaggttgcagaacgagccctcttcttgtggaataacga

SEQ ID NO: 2335 - DNA, 591 bp, Glycine max
  Intron number 4 from transcript Glyma03g26450.1 (locus Gly ma03g26450) derived from phytozome v7.0 (chr-ID Gm03; pos 33877378 to 33877968)
ttgttggcgtttgatcaatggtgtaatctggtgcccactgttttactgttgcgaggtttggatttttcattaaaaaaaaaaaagtgataggtagattctttgaactttgaaccaatttaacaaaagaaattatagatagaatgagaaagatatgttaataaaatattaatgtgttgcagagagaagtttatatatttcctcttttatctagtgacttgcatacgctcctgtaggtgaaattgaggggttgttggttgtcatgaattttattttagagtcttcatctataaaaacccatgagaggaaatgaaatatttcactaattatcttctattatatatatatatatataatactttcactaattatctttcttgagctaatttgttaatcagacgttgacaaattaaaggggcttaattttcacacctttttcgtttattatggtaaagaaaattaatagaagagaggaccacattaaattgagattgttcatctagagaaatctagagaaactattagaacaattttaatggtagattgtaaattaagatcttagattattttttcgtgaatttcagattatcaagt

SEQ ID NO: 2336 - DNA, 996 bp, Glycine max
  Intron number 4 from transcript Glyma20g17440.1 (locus Gly ma20g17440) derived from phytozome v7.0 (chr-ID Gm20; pos 24515232 to 24516227)
gtattgaaggattgtcagtgttgaagacaacccaggtaagcttgctatatagaaacaagtgctttgattttcatgtggtgtttccaatttctgcaactctattacagatgttctcaaaacaatatgtggttgtcggtacgagtggcatgatataattttaagcttgagataaatgctttaaaaatgtgaccatttgctcaaaaaaaattctgcacacatcatttacttatagtaaatgcattatacataaaacatgggattgtaacacaggatgactgattctgcattttatataatttattcataaatacataggaaagtaacacaaataggctgagtacttttaaaatcacaacttgtatttaaacaaactctattgaaaatatataaattgcaactatatcaaggcttataaagtattgtagatttttagttaaaatcagtattacagtaccatatgtatgataatgattctaccaaaattttcacttgtgtagaagatgaggttactcaaaatgattttcagtaaaataagagagagaaaataatttctaaataacagaaagagcaaaagacaaaatcaaacaaataaaatggcaatgcacttcaacacaagagtctaattcgaaagctgctgcattacctggcatagcatcgctacacccctttttcatatttttcatgttgaaatttccttggtgctcaaagggtgaggaggatcattcttttatttgtagttctgaaattggttaaagaagaagttacatatcttcatggatgatatgaacttgtccagatggtagacaaaattaaactgtttgggttatggaacttgtaaaatttgcatgagcatatagattcatacacagcatttattagagagctggttttctgcatacttagaaattacaagttgatgttcaagtttatttatttatttatttttgtgacatgggagcagtctggttttgtgaatttcataagagacaagtacac

SEQ ID NO: 2337 - DNA, 3466 bp, Glycine max
  Intron number 4 from transcript Glyma01g13950.1 (locus Gly ma01g13950) derived from phytozome v7.0 (chr-ID Gm01; pos 17442684 to 17446149)
agtcactacagaatattgtcagtcaagcccttgttctctctctctctctcttgaagtgatttcttagaatgtgtgtttgggcctaactcaaccccaaaagttagctcaaggggtgagggttgaccctcactatatactctaacttggctttacttttagccgatatgggacttgggttttttccaatacaccccctcacgcccaacacttttgggtttggtgcatggataacaatggtgggtgaccctttgaattaatcttgaatctggacaatggggtacgtagtttttatacactgataccatcttagaatgtgagtttgggcctaactcaacccccaaaagctagctcaaggggtgagggttgtccctcatttatatactctaacttgactttatttttagcctatatgggacttgggtttttcccaatatgattttatgctaattttttatttccactattcttgaaggttgatgctagattgattttatatatggtgctgtatttcaaattacctgttagtttagaaaaaaaatgtttagtttcaatttttgaaacaatttatattagagtttgatattgagagagagagagatttgagattgaagagagagagaatattattcaaccgaatcattaaatgagtacaagctctgttgatatagagcctaactaacttaacagaattaactaactgtagttagttagttagttacgacagttgattacaattgtgcaacaactgtcaatagtctgtcttaagaaaaataaatctatcagagtatgtatactctaatatcccccggaagctcatgaggggttgacttcttataatataggtttgagcctaattcaaccccaaaagctagcttatagggtgagggttgcctcttatatatctttcttggccataattctagatgatgtgaaacttgggtttttcaatacacccctttcatgcccaacactattgggcttgatgtgtggatgacatgttggatgacccatttaatggatttatgatagactttgataccataaacaaatctagaagagttgcagagaaacgaagtaattgcagaaatctaaagtgaggtgaagttgatcattgtattcaacccaaggagaaaacagtaagccatgaagaaagctaaggatcgaacgctagctctgtgatatcatcttataatgtggttttgggcctaactcaaccccaaaagttagctcatagggtgagagttgcctcttatatattctttcttggccttatctctggccgatgtgtgacttggatttttccgatatggttgaaggcttctcaatcactttgagcttgtctctgaaagtagagaaggtaggagtgagagccttggtgaggctgtctgcacactaatcagcggcaggaatttggaccacttgtagtagtttggtgagcaccttctcttgaacaaaaacacatcaagctccatatgtttagttcgagaatgaaggacaggattatgagccaaagccattgtgcttgtgttgtcacaaaggaatataggagaggcagaccttaagctcagaaagaagagataaaatccaagtgacttttactgcagccaacgccatgcttgtgtattcagcttcagtacttgatcgagcaacaacagtttgcttcttggaccaccaggaaatcaggtttgatccaaagaagatggctgcaccagaagtagacctcttatcatcaggatcagaggcccaatctgcatcacagtaagcatgaaaggagaaagggtgcttagaggaagcaggttgaaagagtaagccccatgaaatagtccctttaaggtatcgtagaatcctcttaactgctgtccagtgttgttcaaagggtttggacataaacaagcagactttattgactgaaaaactaatttcaggtcttgtgatggtagcatacttaatagattttgagatagaaaagagagggaaaaatagaaaactgtcattgatgcgaaatgaaaaagtgaaacctagttggtgagagaggcttagggagggcatcaacccattgttctatagcaggattatgatacactttgagttctttagctaagactttctccttgacaagatgtcaacctccacgtgtttagtccgagaatgaagagctgattatgagtgatagccactgcactttcgttgtcatagtagatctctgtaatttgaaaaggaatagactactctgttaaaagagtttgaatccatgtaacttcagttgtagcttgagccaagcttctgtattcagcttcagcagaagatctagtcacaatttgttgtttcttggaccaagagaccaaattgggaccaatataaatcactgcaccagaggtagacctttgatcatctgggtccgatgcccaatagcatcacatagggctttaatagtgaaaggctgagaagaagagcagccttaagatgcagatcatgatgaatggagccttttaggtatcttagaatgtgtttaacaaatgtccactgagaattcgtaggattagccatgaactgacagaccttgttcacagcatagctcaactcaggccttgtaatggttgtgtattggagagcaccaacaattgatcagtagagagtcgggtcagtaagtaaatgcgagcctgctttggttaacttgcaattaatagtcataggggaagaaatagattgtgcttctgccattttggttttctgaagcaaatctctgatatatttgctttgagtcagtaaaataaatccatcagtcactgacttgatttctatgccaagaaaatagtcaagtttccccaactgtttaagggaataatgagaatgaagcttggtggtgagttgctgaaccagaacattggaggtacgagtaataatattgtcatctacataaacaagaatgtagatgatatgtcctttgtctttataaacaaacaaagaagggtcacactggctaagagagatgagagagaagggaagagagagaaacagggagtgggtgagagagagatcccgtctaaactacgcaaggaatgggtacgattaacatgatgtgatgacagtggtggcatgatgaggggagggaaggagtagaaactggagggacacatcagatgtttattctttctacttcacacgttttccgaaagaaatttacttgtaaagtatggtattcttttgtagaatattaagttcataatcttgtgttaggtgtgcagtaccgttgaatgtgactggagcatgacaaatactgctaatcttatgaagtagttctctatttttctgtatttggatttatatctgttcttatttgattttgtcattctatgtcaacttccttttgtgcttttgttatttttttctgtaatcctttcatattaaagctgatagcaattggcaaatgtgattcacatttttaggtgatacaactaagaaaagc

SEQ ID NO: 2338 - DNA, 1502 bp, Glycine max
  Intron number 7 from transcript Glyma02g38790.1 (locus Gly ma02g38790) derived from phytozome v7.0 (chr-ID Gm02; pos 44143751 to 44145252)
tagccgatcacaacaattagttggccctcaaaaaggtaatttatatctcttctgttcaaaaggtacatttttgtatcctgcatagtccctagatttagacacattatgcatgaatatgttttatgtgtgagccttgtgtttattcttctgttgctattgtgtcccctggcccccgcaaccctctccatcaaaataggccatctctggctaatgacccatctctggaagatgaataatttggttctcttatgtaacctcgctgttccaaagtctccgttctttatttccatctctttgattattcatctttgtttccttctctgttctctgtattcctctatattctgatatttgagtctctctcgctctttctctgttttgagcctattattcctgttttttgagcctgtatgttctccgagtctatgttcttttttttacctctattaagtggttcatttctgttcattctgcagtttttttgctatattttttgtatatgttattctttattacagttgccattgccatgcttccgccatagcctgcaacactatctgctataatgttatggcataattttggctttctgccatccaccattaatagcattgattagaatattattatttatgttagaatgtatataaactatatttgtgttgattaaattagaataatcacttaccgatgtgattattaggctaaaagttaggtttttctgtccgctaaaattacttctaaattattgtaagtcaataaatactgcaacatgtgcgtactgtgtagcctaacacaatttccctataattctctttaatattgaaattttggaggtttatatttttgtcagtaccaagttatgtttcctttttgttgagttagtagtttcatactcatttaaaatatcatatctagttgtttttccccctcctgaaaaaatggttgttgatagaggggcacaacgctgtttgatccacaaagctatcctcatattgtggaatgaggcttgttgcttcatattgtagaaattttatcatgatattatcatagcatgattacatttatgtagaaaaacctcccatgccttgtaggtattgtgatgcatactgttttgtgtatcttgttatgcaagttgttatgtgattgtaaagattctgtcattattcattacccagttaataaccatattctggtgtctttaattgttgaatgtgtggttttaattttaagatattggtaggtgcatatttgtatagatttgcatggatatgctggtaatggtgtgtgtacttataaatttttccctggtgtagccatttatgatgattggttaatgattgactttttctcccactggtgccaattactccatgtagttgatcccagttggtggggatttcttatttattagatgctgttaggttgacttgcactagagttataattagtttctgtttccaacagctggttctaataaggagtggaaaccaaagccaaca

SEQ ID NO: 2339 - DNA, 3781 bp, Glycine max
  Intron number 3 from transcript Glyma13g32810.2 (locus Gly ma13g32810) derived from phytozome v7.0 (chr-ID Gm13; pos 34876586 to 34880366 reverse strand)
aatccggcttcagaagagaaggtaactgtttttacaccatcacccacttgactttaagcttttgggcaatacgttactacattttcataattccagtccagtagttctcaaaaactattcttgttcaatttatttcaaaggatacctaaactaccacctgagtttagtgagcaaagccacaactcaacccatccttccaatctgaaaaggaaaaagtcttgtatctccatttttgtagtttccgcatctgctctaaacaaactccttggcactttattttgcaccaatcataacgtgtacatgataggtagcagtatttgtgacctgcaaccccaattatttcactactttgatggctataaaattgagactgaagccccccaatccaccatctctactaccttccgacttcccaagcattcccacactttcaatgaccttcttagacagagaaagttgaaccccttagacctcctctgctttgataagctaaaccccttggcattccccaccttctttctctaacaatagcatctggtattgttctttctacacatgattaggttcatacatttctttttttctaatcttttcctgcatttctttctctaacaacctctcaaatcttcccaatctcccgttaagttccttcattcctagaaaggtcctattaacaacagtacctctgtacctgttctcatatttccaccagctttagtctctccattaaattcaccttttgtgttagcctcaatctagactgttcttgggccaatgtaacttatataacaattttcagagtggccccaccagaaccccagtctttgccaccgcttgattcttctctaccatcaacgacttctttatcaattctgagagaacgtggctcatacagtgtcacctccactcgtattcctcctttaatcagtacaagaaaatgcacatgaaaagttcttgctcaattcccctaaaagctcctgaatatctttcaaaactctaaaaaaaatctactactaactctgtttcagacctagacggatttcataatggatttttgaatattaagggttggaatctctttactactgttaccttaaatttctcccaagaagtaattgggttgtaattttcccactattgaaaccaagccgaagctcgaccctctagtgccatcattatagcttgcatttgctccacttctactgttcctttcaagtcaagtagtaaagcttttaaaaaaatcaaatcaagccttcaaaagacactagttaaataagtcaggctagtttaatgcaaatcctagcctgggaacatttctatagttaaaagcggctcaattttattggctgcatttagcatcataacctacatggtgcccggactttggatgagaaagaaccaaaacaagggtgaacgacacaaataactgtatttaattcaacttatttcgtggacaactaattacttaatttttgcattaatctttttagagcttttggaaaaatgcgattatttcttctgaaataatccgaaccatatatgtgccaagtacattgaagtttttcttatttaagaaggggtaaggaaaactaaggagaactaatcaattgattaaaatcaatccaccaccaaatcaagagaggttagacaagaaaattgaaaacattatattcttttagttaccttctatacaaacaatagcaggtacgttcctgttttacatcttacaagacatccaggttccagactagagagtaaaataccatatttcttcttttcttgctgctcgacagtaaatcattttggcttagcttaagggagttggataggctcaagccatggtaatgacatctgcatgtgccaaaaaagtaacaaataatggaccccatccccttcccctctaatctctatacttaagaaacactagtttcttacaaggaaaaaccacttgtctaatttgatcacttctccttattagcttgcatcatgtagaataaaagcgtagcaagtatccttatactaaggatactagggtattcaagcaaatgtttccaagattcccctccttgctattactagtaatgattactagaatttatcacaattcaatccaaagaatccaaaaaatactatttcaatgttataactaacattttatccagtcaaaaaaaaaaaaacaactcacattttctcagagacatcatgagttgtcatgattcttggcaagtatacgatagctaggatttcaagcatctcatagcctcatttaaattctttagtggcattactatttctcttacatcaaacaaagcatttcatggaacaaaatcaacttcaaaatttatttcttcatgactaagcttacaagacagctattttgctaaagcatgattggggaaagcaactgtaaaggaggcatacaatggatgcatgcctagcacacaatgccaatgtgtgggtggaataaacaaaagtgacaaacaacagaaaatgaagatgtaaacaggagatcaacagattattagaaaatgaggagaaacttcacaatttcaagaaagcaatatgagaaatagacaataaacttcaagaaattaataaatgatccaagaaaaatacaaaccaacataggttaggtaagtgacagatataaactaatatcaccgtcatacttggatagtcacaccttattctatttattttcaaaaggcaacaaccacaaattaactagaaaattgaaggctgcttactctattccaaccgccaaattcatgtagccatcctaatatttcctagcgcccatccataattagtagatgagcgattcactagtatgcgaggcattctagtatcagatatatggaactcaagatacacgtgtacagccttgttagggatagcaactaggatttttacgcagggagccaccatgatgggttattggtgcagtacttataataaaaacaacttgtcttatgactctgacagaaccctctctccactattaatttaaaacataagagaatccaaatcctatcaatttttaaaaaaatcatgtggtcaacagtttgatttttgttgccccattcgtcatattaaatttcccgcaaaaggtaaagtgggcaaatacattgcctacgcttgccaaaacagctctgtcataaaggctcgttggagaaataaaaccattaataggccttcagctaataatttaagcttttagaagttattcttattaagtatcgcaattgaaagactcaaaatacacatagcatatgtagaatacagtgatttcagatttcacacctactaaattcccagggtgccaggattccaagcatgggcatcaataacaaccaccacacatactggtgtcataaaagtaccaatgaatctcccaaaaaaatgagtagcaaaccaccctctattgcatctatttacccaattttctgctagactctttggcctcataaaggaaagggaagcattgggcatcaatcaacctcttaaagaggtacaaaacttatcttccttgaacatgaaaatgtaacttattcgtctaattgaaatcaaccattagtggaataatatacttagggagattgtcaaaaacatctgaatgttggttctcaacgctaatgttactatgttagtcttcaaattgtctaccctacaattcttgcatttaaaataatttccttaaataacaactgtttaatatatttgatacctgcatttctacttgctagttttggcagacagaagcagcaagcttgaggcagca

SEQ ID NO: 2340 - DNA, 1988 bp, Glycine max
  Intron number 2 from transcript Glyma07g08180.1 (locus Gly ma07g08180) derived from phytozome v7.0 (chr-ID Gm07; pos 6812235 to 6814222)
tcttacctctctggaactctaatagatgtgagtttttttattattattattttttagatttgattctgtccattgttttctatcgcaacactgctttgctttttcttcaaatcagtatattagtagtttattagatgatagttgatagttttagagaattatttttagaaaaaatattatatcattgattttttagattatcaataggggtggaaatgagctgagtagtttgtcgaggaccttcggctcggcctatgtaagtctcaagctcaagctttctaaaaagtctttataaaaaaaaaaaccaagctcaaatcataaaaaaagcttgttaagcttgacaaaccggcttgtttaactaataataataataactttattttattaaatcttatcttattcagattttattctatctagattttattttattcagattttattctatctagattttatttcgtccagatcttatttcatcccatcttatcttatcttgtccagattttattttatttcgtttatgggcttggacttaaaatagatttgtaagttttgggattgaggaccaatataacaacactaaagttttagtttagggagtttttttcggagaggagaataattctaggattttagaattccagtttttattattgttcatgcacactgttcacgtagaataaaattcattttctgcaaatcatctctaatccatacattttttaatattatgctctttttattttcttttcatatactttgtgctttaatgacttgaattcaatatgattttgtttattaattatttttggatttgtacattacttatacgaaattttataagtttctttttttagttagtatttcactaggttttaaaataattaattaatcaaagacgtctttaagcagacttttaaataggctcgtgggccaagccaaacttttatataagccgagccgagccttaaaaaaaagcctatgacaggtaatgagccaagctcaagccttacttattcaactcaggccgagctcaagcctagtaaagcttggtttggcttgactcatttccacccctaattatcaattacaacatatcaattacctatttataggctcaagtcaccaggtggtgaatatttctatattactctaggtctttctaaaattttcatgatagattagtatcatgatagttttagatttttttatcttatagatacatttataattttggattgttctatcatattcatacacattatagttttaagatattctattattttcatatatattatatttaagaatattctagaaatttgtaacaatttcaacacaggagatgttaaataaataacatgaagttcaatcctttagctatatatggttaattatacatttcgaaacagcagagcaaagctgaggatgttaaagctatgaggatattgagatgtttcaaaacaacagtatagtgttgccttatagctacctatggtatagttcagttagttagttgagtatgtctgatatattataaactctctgataccttggtttgacttttatagataaaaaaatagtattgcttaatatcattcaacttcattgcacagtcttagcattccctcaaaggattgcattgaatcggttcaattaactatgacattattgattatgctacaaagataaggactatagtattttcattaatagtcaacaaatcacactttactctcaagtgcacttttgcactttataatatccaaatttatatataatttttcccccacttagaagagacgttaaatgatgtcagtgttgtcaactgggtactctaactttaatattagtctgtttggatataagtcataagctcttttgagagtttctctactaaaaatataccattttcttgttcgcatgccttcttcatgcttgaacttgaacatccctttaacaaatgcaggaagaagtgctagtta

SEQ ID NO: 2341 - DNA, 925 bp, Glycine max
  Intron number 4 from transcript Glyma07g08060.1 (locus Gly ma07g08060) derived from phytozome v7.0 (chr-ID Gm07; pos 6704706 to 6705630 reverse strand)
tgacaagttccaacttctacaaaggaagaatcaaggtaagctttttgacttttgagttaatcatgatttattaaatatagttattatatcgagttattaaatataattattatatcaagggtttatctcggttgaacaatatatatgagttattataatcattccgatatttttattcaattcctaagaataaaaaaaatgtaaatattataaaagtaaaaagacttaccttggttcataggcatgtgcagaaaggccagtatcaatatcctattcctatcttgtatttaacatgtgtgtttttatgcagaaccttcctcaaaggtccccagcttatatatcttgtaccacccactatctggccaatgtgcccaagtgaatggcaaaaatgaacttgaagttggtagctgtacgtgagagcaaaaacagatgggttcgtagtagaaatgggactgaaatccttttacatggcactaagaagtgcttaaccgcagccgctgaaaggctttcagttgttgtttctgatgagtgccaaagcaaaaacagttcttgggaaactgtctcactatctaaacttcacttggctactacggatcaacatgagaagcaactttgcttacagaaggattctaactcatccagcattgtgacttcaaaatgtatctgcataaaagatgattctcaatgtcttgatgatccccaaagccagtggtttcagcttgttgccaccaatgtgtagcccaggttaactggtttaagattaggattgcataaattaaatttattattattattattttatatttagtcctgtagaattgctgtatcactagagcatccagtgatatatttaggtttaataaaatctcatcataatttctttggagcagaaagtgtaactgaagctcttcttctcctgctccaa

SEQ ID NO: 2342 - DNA, 1641 bp, Glycine max
  Intron number 2 from transcript Glyma20g00450.1 (locus Gly ma20g00450) derived from phytozome v7.0 (chr-ID Gm20; pos 236826 to 238466)
gaggcaatagaatcttgtcctgtcaattgcatttcgtaagtgtgtgtatatataccattctggatcaagatgggaatcattataactattttttaattgttacataatcaataccttatttgttgtgatttatatcgtgcaataccataatatatagagtcatattatgtggtaaattgttgcacaccttcaggttatactatcttaaagttaaatttcttaaaattctaatctggcatggaaggccccattaccgttctctcctgcaattttgatacttctaattataagaactactagcttgtttctagtatctttgttgagttgcaaagaacttcagaggattgagttataacctttcttcccaaaatgggagattgggagaggggtaacctaattagctgatgattagctgatggtttgttctagaatttgagcttacaatactgatgtataggtgttggcaattgatatctgaatttatcatctttgctaggaaatggttgtgcaattttcctgcagatagcatcagggatgagaaaatgttatgaatgaaaaagtagctatatgatgaaagttggatctgcttgataattcttattttggttccatacaatgttgataattccttactttgtttcaagtatattttttgctgcttttttttttatctttatatgcaagggtaaggctgcgtacaacatccctcccccataccttcgcatagcgaagaacctctgggcaatggggtacgaagtttttattgtctgccaactttttactatacttctattaacaactatttttgaaattttaaattatttacagcttagctatacagagacaaaattgtttcggaatttagacagcagatatgaagcttattgcatataaagtactggatccattgatctagttaacttcttaccaatcatatctgttcggctaagattctcctggatttaactttgatccattaaatgttgatttttgtgcacaaattagagatgatgatgttgattgattaaggagttctccaagtaaccaggttagaatggttctctttggactgcaatcttagaagtaatgttacattggttggaccacagtgcttgaaaatttatagatagccttcattttttagttatttgagaatacgacattcttttggattcatactggtgttcctctatttgctaattttttgtttgttcactttgattttatttaaaagattatttcttccccaattacatggaagttctctttcctttttatcttagaataatctgccatgttgcagccattctctcgtatgagtgaaatttcttgtttcaaatcaagaagaaagttacaacttacaatatctctactttatagttgaattgttttgtaaagcaagatctttgctttcacctatttcacatttgtagtttgcaagcagcaattgttgaatattaaagagtagccattattctttggaagaattgtgacttaaggacaaacatgataattgtgttggtcaggagtttttaaatcacggttctccccttttcattttagttcttgttaacgaccattcttcttcttctttggaataaaatagggttgttgagaggtccaaccttgcagctttggagt

SEQ ID NO: 2343 - DNA, 1121 bp, Glycine max
  Intron number 2 from transcript Glyma09g20270.2 (locus Gly ma09g20270) derived from phytozome v7.0 (chr-ID Gm09; pos 25111819 to 25112939)
caagcagttaggagtgtgtatatccctggattcaggttactttgccaactcttcttttaacattttttttgtaactaaatcctaaaaaagagtagaattttatttcatgttacaatctcacagcctgggaattacaaataaactaccaatttcgtcctggaagtattactctctccctgagtagtccctagagtaataaaattattcaagtaattcttgtagtattgaatatctatcacttgggttactaaactgatgcatttcagtgaagtttggggactaatttgaagggttttctaataattggggaaatacttagcatgatttctaatattgctaggactacttaagaaggttatttactttagggattacttagagagagtcatagttcaaggatgaaattgatggtttacaccatggttttaaatagcggtccccaacatcaaggtattttgacactccacaattgtgactggatcagctgtactttctcgcaattgcccacaatgtaaaggtttttttggctcaccacaaccgcaatttaaaaccatggtttacacttattttttcagtggtgcagtatgcatggacaccattaattacaaaataaaaatcagtaggtgggtgcaagatatttactatatcaaaccaacgatcttatgtccatccctttttttttccttagcaccaaccttactaatcaactcaggtaataaataagaaaaacaaaaacattataactcaagatgttgtcccaataaaccaacttcagggcatttatcaattaatgaattctacaaaattgatccaatagtttctaacttgttggttgttcaattcaatctcttgcttttagctaaatttaagatgagaaacactagtacatataaatttatttgttccaggccttgaatgataaattataaataacaatttggttatagatgtctccaaataaagtttatagcatacttggcacaaagttattttagtattttacagttttaccccccccccccccccccccccccctttttattctggaaataatgataaaacaataggtatttgccaactaagaagaacaaggataggtggagactagaaaaagaaacacg

SEQ ID NO: 2344 - DNA, 1956 bp, Glycine max
  Intron number 2 from transcript Glyma18g17100.1 (locus Gly ma18g17100) derived from phytozome v7.0 (chr-ID Gm18; pos 17929405 to 17931360)
aaagccgtcaaattactcaagtgtatgaaccatatcttcaatgtttctcacacaacaccatctcttgatccgctgtcatttatatatgttaagttttatcattttaaactgaaggtttgattgtattcagccataagtgtcaatagcgttatagttggattgcattgcaaaatagttcttgggtgctatggaagtcaaatagtgttgtgattttgaatagcagccagttcagctgctatgacattgaaattgctgtcatttgcagctggagtgggtgcaactatgactggttgcaaagccctgtaatattgtgtcactgtctcctagggatatataggaggtaatttcaggatgttgcccccattgttgttaaataacagttacagtgctgccataacactataacatggtgttttgtgatcgctctgccacaagcaatttgtgaagggcggcctgctatggcagtgccataggctgcaatggcgtgtttatatggcgggattttagccatcagccatccgccattgataaccttgattgtcccctccctccctctttcattgaatcagtggtttcaaattaagccccaaatttctcatacttgcatgcattctctcttatgaacacctacctttctccggcggcattgcccagctagtagtgacataccccaggtttatgtccatccctgtcctctctgccattttgccagctatccctgttttcaccctctaattgttctcttctctttcctttcatttttttgttctctgcacttatggctgttttgtgctaataatgaatgtcttactgttagatacttttttttaatatatatttgagcatatgtacatttatacatttatagtatatacatcatttaacttgcatttaaaatttcacagtagtggtcatcccgctatttgctattctgctatagcagttttggagtaagcaacttcgcaccactatcatctaggattgataactatgtattcagcttgaaattttgagaataggttgtgggagttgcatgcaacctcaatacctctaatcattagcttcattacctaatggagcttcagttgttagggcaccagctttctaatgggtgatttctaagggcttaagagaagtgttggttttgtaatggctttaggctgtgtttttttctctttctagatttgtttttctcatcattattatgctgactgggaatttagttttaggacattaaaaattaggataataaaataatatattttttgcttttagctatgtatccaatgctgagtgctgttatagacttatggtcgttttcactgaatgagtagcatgattgcttttgcttgtatggttagctactaaaatcaatttctcccattgtagcacgttttccaatgtgaactttgtggttgaaattaatttggacacatctctcaattacgttcagcatttcaaaatcaattttatcaatcttcaaaactagaaaagtactttgttgagatgaacctggtacatgaattcctgggtaactaacttcaaaaagataccctttaactgtgaaacattataatagcaaccctgtaatttgcatctgaatgacacttgttaaaaccaaatcatcaatgatttgaccaaacttcaaatcaattttaccaatcttcaaaccaaaaagtactttgtttcagatgaacctggtacgtgaattccttggggaaataactttaaaaagataccctttaaactgcagaacattatatagcaaacttgtaagttgcatctgaatgacacttgttaaaaccaatttatcaatgttttgacagaaatgaaacaggaaaaaatagaaaatctctttaaacacgataaacaggataaaaaaccaatgttttttttaattaaataatgttttattgctgtgtcatttgatctatcctttaccttctgctttcaggt

SEQ ID NO: 2345 - DNA, 2344 bp, Glycine max
  Intron number 12 from transcript Glyma03g13310.1 (locus Gl yma03g13310) derived from phytozome v7.0 (chr-ID Gm03; pos 16859883 to 16862226)
caacagaatttgatttttgaggtatcattaacacttaacatgactatttattttagcggcaacttcgtgaaattggaatatgattgtaacaccttcaaaatttacaactccatatatatatatatatatatatatatatatatatatatatatatatatatatatattctctgtaattagtttcctgtgactagttgtctggaattgtttgcctgccattacttgcctgtgatgttttgtttgttaatttaaattcttttcaaaatgaaaaaattatttgatcaattagaattaatttaattacatgagtgatctattaaatgacaagttttatataagttttaattgtatagatttaattcttaaaactagtttaaactttattttcactgtgaagagtttcagtgtaaaattacactcgtggaaaccccaaaggccatcatggcacaaacccctcccaccaatggaaggtggccagccatgcaaaaggaaaaacctctccaaccacatcttttgctcccttgaacactcaaccatcacaccactctcccctcattttccttgtgatggccaaaacttagagagagaaaggatgagaattcagtttgttgcttccaccttcactcacaaaaaccatcttctccattgttcctttcatctcctttcacaatttcaactcatcttaccttcttccattggtgatgttccaaagcttggtaaggagtttttgtgtaaattcaaaccttggcagtgtatggtagttttcaccatcggattttcgtggtccctctttgcatgcatcatacacctcaccatttttgttacatgttgatttcaatggctaaacacaccatttctcagcatttttaatagattggttgttgttctgtttggtgattttgtacatgtgtggttgtttctcttcatctttttgacttttgaatagattgagaatgatccttatacaaaggagactttattcatatttttttcacaattttaaaccaagcttttttctctctcttaaaattcgaagttagaataaaggaggcagttgtagtttttaggtttaggtttgagcaggtgctactttctggagagtttaagaaaatctaatggttggagttttgtaaaatttgtcataaattgatctagacacaaaatgtgacaaattgtcttttagagtgcgtttggatagagaattttaattgaggaaagtaatttatcagagaatttgaatttctgtaatttagaattcattgtttggatgctttttacgaagaatttaaaattttggaattttagaacagaattttaaacaactaaatatctggaatttcaatttccttctaaaaggtgagaaattgaaattttcttcttacagtcttcttcaagaaacacagtatgaggtcctaaaatatatcaatcgggtgtgagcatagaggaacacgtataactagcacaccaaccataatttttttttcattcatttttttcatcctcataattttaattttgtttatccaaacacaaaattttgaaaataaaagaatttcaattgatgtatttaaaattcttagaattttaaatttctcagaattttaaatttctccatccaaacacactcttaaggtcatgatgaggtaaataaactcaaattggatctcatatgtggcatgcaagttgacctctctatttgtgattttgaaaccagtcgtgctcgtttttttcttttcaattttttaattttgtgttgatcatcttcgaaatgtgattaccaatccttgaacgagacaaaataagctttctaaacatgtacattagataaatttaaagtggtaccttctaatttaaaaaggcattgcaatatagaattgtgctaaaaaaaaatgttaagttggaaaaaaggatataaagaaaaatttacttggatttgtagaaaatgattttaggtgaaatttttaccttgatgaaaagataattttgtaagcttcaatatagaaaagtaaaacttaatttggttttggcaaggattagaaaaatgcaaatctttgaactagtgtaatttggaaatcaaatgttgccttgtagaacttttaggaaattttgtagatttttgctagaaaattgggataccaagttagaaaacagagtcaatgaactttgattttatgtaaaaagtttgtgaaaggatgtgactcttcacatttaaatttaaattccaacgttcaaacacactggtaatcgattaccaaatcattgtaatcaattacaacattttgaaatcaattggaacgttgtaaattcagttgaaggctttttgaaaaacattttgctactggta

SEQ ID NO: 2346 - DNA, 9425 bp, Glycine max
  Intron number 6 from transcript Glyma10g06430.1 (locus Gly ma10g06430) derived from phytozome v7.0 (chr-ID Gm10; pos 5144101 to 5153525 reverse strand)
tgagagaaccagttgggcctaataattgttctgaggtgaattaatttcattgatcagtattatttggtcatgtgataccataggtgtacagatatgaactaaaatatttaggagaatctgtttcatgttttaagtatattattctgttctctaaaaaaaaaagagtatattatgctgcgtataaggatcttatgtacttcattcattgttaatacatatggagtctgtaatgtattttcattattatataaataagagaggcaagagattgaacattggcatgatttgttaacaattgagtctcaggtgtctcagttcagatggtacattgacttttgaagtctgctaaatgcagattaaacttataagtatttatctcaaattggatcaattgagagttatcttcgtagtgttgttttcttttttagatgctaaatagctgtcctaatttgtgtatgtcttgaaagtaaatatactatttttgcctttgaggcttattctggaggaagttactggatttgtgatcctagttagtagttggaaggtgaccgatacatggaattagctgtagttttatcttaaccccaaatctgtgttatgaaaatgaatcatgatactagagattcctggaatcaacatgctcaattcggtgattgccttatggagtacatacatatattagattccattttaacaccgctgtgaagtggctcattttaacatcataccggttttataagttctacataaaccatgattctactaaaaaacgtttaacaaacttctattaagttgtgagtgacatccatgactttctaaaacttgcactattaaaagcaaatttaaagttacaacacattaaaaacaatgaaacgtaattacaccatgttaaagtttaaaaatactacattatagaattgaaaaataaatgaggttggtataagttctgaaataataaaatgtgactgtaaatgatggtggattgggaaattttatgttgcagaaacaataccatctttgtttttttatcagcaaatgcaggaacaatacttatatatactgtatgaatttgtgggatgatgataggaaccaaattcacaatgggcctttggagcctttagttcatgagatgcagaaaggcccaaggaaatggttagtgtattcccatagaaagaaaagaggggtagaagaggaataagttagtgggcagtttgttacaggagagagtgggcagttggttacaagagagagtgggagagagttagtgggcagtttcctttttgttatttagtaggtgtagggatagcttttggggggatcttttctgtttttggtgggaatagagagaacctacgaggtactctatttaggagctcagcactgggacaagggggaccttctcctttgtagtttttatgatttccagtctaatgcagaattactacttctcattttcctgaattctttgttttattattatctgttctgaggttctgtattattggtccgacctgccggatatatctctcaggacggtgaatgaaaaaacgtagaggaggaggaaaaccagcggacgaatcagcgatggacgcgaggatggaaaaggttgaaggtgatttggagatgatgaaatcgatgatggaggcgatacaagcagaagcaaaagaagcaaaggagaaccagtcgaagatcctagaactggtgacgaagagcttgatgatgaacatcaacgatggagaagagggagaaggatcacatggcggaagtcgcaaggccaaaacgaacggagagcatggtggaaagaggccaaatccgatcagtgctggttcagtttggaagagcttagaagcagaagcactagacgaattccgacaatcgatcaagaaggtggagctcccttctttcactggcgaagatcccgtcggctggatttcaagggctgaaatctatttccaggtgcaggaaacaagcgacgaggtgaaggtgaggctcgcccagattagcatggagaacgggaccgttcatttcttcaatttgttactgcttgagaatgagaacctgacgtgggaggaattgaagtatgaactgatgcagaggtatgcagggaagggaacagcatatgagcaattatcggcgctgcaacagacgaggagcattgatgactacattcaacggtttgaatgtttaattgctcagattcccaaattgcaagacgaacaatatttcgcttgcttcacacatggtttgaagagcttgcacgttgccaatctgttaacgagaggacgtttgatgaatatagcgagggccgtcaaaatggagatgactagcaaaaacagagcatgggtgggacgtggagacacatgtatggaatccggaactaggaccgcatcgggccagagaaatcccttggtggcaacgggtcgaactgggtcaagaaattacggaggcaagggaactaatgggccaggcccaaacgcaaggggagatggcgctgaaaaatataaacaaggacaatgagacagaggagccatagtaccatgaagctacaacagaagataagtggaattaatattttgtagtaattaatagcaggggggaatataaatagttatatttcgtagtaattaatatgtattcatttcagtttctggttccttttgagactgattgtagtctgtctttggaaccaggtgactgtggtttatgcctctttgtatccttagtacctctggtacttcattattaatataatttatttttgctgaccaaaaaaaaaaaagtggaattcccattcttcttctcattgacagcgaggcgacccataatttcatttcaaggaaattggttgaagctttaggttggacatgggaggagacataatcaatgaaaattttgatgggggatggccacacgactgaaaccagtggtatgtgtaaagaaatcaaaatagagacagaggcaggaaggttcacacttgatgctgtcttgttcgatttggaagatattgatgttattttgggtatgtcttggctaaaaactctaggggtaatgacagtagattggaatacgcagataatgaagtttgaaacagaactgggaacgaaaaccttgagaggagtaaatcaagaggagtctttgtttgccactttgtgtggggtacttgatgaaagacaggagtagaaggagaatgggctgaacagtgagcagcaatgagctctgggagacattcttaccagttttgatgatgtctttgtggaaccgaagggattacctcctgttcgtgtgaaggagcatacaattaagctgaaacagggacatgatccaatcaacgtaaggccatatagatattcttaccatcaaaagaacgagatagaaaaacaagtgaaagagttgttggagattggtcatataaggccaagtcaaagtgaatattcaagtccggtaattctagttaaaaagaaaaacaacaagtggaggatgtgtgtggattatagagctctcaacaaggccacggttccggataaattcccaatcccagtgattgaagaactactagatgagtttcatggttccacctatttctccaagttagatttgaggttcggataccatcaagtttgaatgaagaaggatgacatttacaaaactgctttcaggacacatgagggacattatgagtatctagttatgcgctttgggctaatgaatgcgccctctacctttcactctctcatgaatgaggtttttagaaagtttctaagaaggggggtgctagttttcttttacgatatattggtgtatagcaaggaatgggagtagcatatggagcaattgaaatgtgtcttggaagttctgaggaagcaacaactttatgccaacaaggagaagtgtaattttgggcaaagaagcatagagtacctaggacatgtcatttcaaagcaaggggtagaggtggacccaaacaaagtgaaaagcgtgctggattggccagttcccactaatgtcaagggagtacgtgggttccttggtatcataggctattatagaaagttcatcaaagactatggaaagatagctagagtggaatgaccaggctcaaaaggcttttgaggaactaaagaataagattacttcagtccctgtcctaaccttgcccaattttgaacaagaatttgagcttgaatgtgatgcatccggtttaggaattggggccattttgatgcaaagcaggaaaccagtggcgtactttagcaaggctttaagtagcagaaatgtcactaaatctgctcatgaaagagagttaatggcagtggcattggctatacaacattggtgtccctacttacttggaaggaaattcactgtctattccgatcaaaagagtttgaagcaacttctccagcaaagaattaccacggggagccagcaaaattggctagctaagttgttggggtataatttcgagattgtatacaaaccgggtttagaaaacaagggggcggatgcattatcaagaagcatgggggagatggagcttaattccttagcatacataccggtgtggttggactgctaaaatttaataactgaagtgcatgaaagttccacttggaggaaggttattgaagacttgaagcaagatcaaggaaagcatggtgtgttattcttcaaagacagattagtagttgctgaaacctcaagctggattcctaagttaatggaagagtttcatgctactccccaaggaggacactccgggttttatcgtacttataggcgtcttgcttcgaatctgttttggaaaggaatgaagggagatattatgaggtttgtgcaggactgtgatgtttgtcaacgccagaaatacttaacaacagcccctagaggtttattacaacctttaccaataccgaatcaagtatgggaagatatatctttagattttatcacggggctcccgagatccaaagggtttgaggccattctagtcgtggtagacaggctatctaaatatagtcattttattccattaagacacccttacacagcacgagccatagctgaaatatttgtgaaagaggcgattaggtttcatggggtacccaattctgttgtgagtgatcgtgatccgttgtttatgagtctgttctggaaagaattcttcaaactacaaggtacaacactcaagatgagtacaaggagaagtgaaggtggaagtagttcaaagggaattgcaagatagggatgaagctttgagacaattgaaaaatctcttggcaagagcacaagagaggatgaagacacaagcggataagcatagaaaggagatgaattttgagataggtgacttggtgttcctcaaattgaagcaacataggcagcattctgtggctgcaagaatcagtccgaaattaagcgctagatactatgggcctttcgaggtgattgagaggattggggaagtagcttataagttgaaattgcctacaagttccaagatacacccaattttccatgtgtccttgctaaaaaagcacatgaagattacaaagttgaaagcacactgcctagtggattggaggatgaccgtgaaggagaaattgaaccagaactggtgttggcaactcgtagtataatgaagagaggcgaaagagtcaactagtggctagtacaatggaaggggaaaagcgtagatgaagcaacttgggaagacgaattgacattgaagagccagtttccagaattgagtcttgaggacaagactttacttcaaggagagagtgttgataggaaccaaattcgcaatgggcctttggagcctttagttcatgagatgcagaaaggcccaagggaatggttagtgtattcccgtagaaagaaaagaggggtagaagaggaataagttagtgggcagtttgttacaggagagagtagacagtttgtaacaggagagagtgggcagttggctacaggagagagtgggagagagttagtgggcagtttcctttctgttatttagtaggtgtagggatagcttttgggggatgcaaaattactacttctcattttcctgaattctttgttttattattatctgttctgaggttccgtattagatgaatacttatattcgtagtttaaaaaccctgattggactggtcgggaacaagacttattatcattgggttgaatcaatcattgggttagaaatgctattaaactggtagttatgtcatcaaactggattaaaccggtataactcaactctgggcagactgtttttcactcaaaattgatgtcttgcatggcccaatacatcaaaagcctgctatactgatgcagctctgctgcgtctctattagatcaagtcatgcgattcaattagctactcatcagtttgatcattgatttagtctttaaccgagtcgataatcgatccaatttttaaaacattgcttatattatgggttgacttttttttattacatttcaaaataattatacatgtatattatattaagagagggcgagccctggtgcagcggtaaagttgtgccttggtgacttgttggtcatgggttcgaatccggaaacagcctctttgcatatgcaagggtaaggctgcgttccctcccccataccttcgcatagcgaagagcctctgggcaatggggtacgaagtttttttaagtatattatattaagaaatttttagaagtttgtgaagcagctgccccaaactcaaattaataggtagatccgctcatggttttgaagctattattcagttactattcattgcagagttagtcgatttatatgtagtctaagtatatatttgggttacagtatcaatgaaatgaatctttagatactctccatctgaattatatatatcattacaatcctttagaactataacgtcatcatccaaaatgagataagagtgccaacgaacgaacactcttttaatctttttcagcagtgtaagcatgttggagcatacatatcactaagaaatatggtctttttaagttttttctttttcttacaaaataactcatgaaagatattctagatattatgccacgccagcctttgtaagtattcagaaacaactgatagtaacaatcaaacatctttgtaatcgatgtaacaaagaaaaaagtaatggcatatcaactaattattcaaaggcttgtagttgcagtgatggagtaatccactcatccccatgagaaattattgtatgctctgaaaaggatcccaatcctcggctgtagaattgcaaaaactctcatccatagaatttgtagtataacataatatataatatattaaattgtaaaattaaattttattggttggatttataactgcatatcctgctgtttctttttaaactctagaggattgaatctagtctgaaattatcatctgtctaaaatcttaatcaatttcttcgtaattaatagctgaattttattaacactttaaagtgaatatcttgactacatgtcatgttaagattaatgttatggatcatataataatttcttccacaccacattatcttactattggtaagataagggatgttttaaatttgtttcatttttttttttatagatatcattggatccttttctaggtttatgaactggatgctcgtacaaagtttataacaacggagaataacacttgaaacaagttgcaaccaatttcatccccccaaaaatagtatatgtctaaaccaaagaaatcaaactattgatgccgtagtgctaaatgcagcttaagttttcatcattgcaagaagtggtactggtaacagttaattaacttaaaagaatatattgaatcatctgcatatacatcttcaagctgtaacaagaggcttaattagttataacaagaaaattaaaactcccttgattgttgtctatcatagggagataggaacatcaatattattatagtatttgtgtcatgagtgatccctttctgcatgcacctttgatgcttctctgctttacactctgcaacattctagaatcttctgtaattcttgagactgacaggggattgcaagagctcccttttgcctgagaccaaactcttcttcagcttgatcaagcagtcccaagaaagcaggatcattcaagtaatgtaagccaacaatgaatcttttggattctccaccatttgttgtaagaacagcaaaatatccttccctaacatcatctggcaccacactcgtggttgtggcttcattcaagtacctcagtgggggatttttgtgaacgaagtgtgaaacacccttttctattttcccaacaaaagaactaagcatcatcttcaactctgaatgatagttttttcttcttgataggatatagtgagttagtggtgaacttttgagcttgctcatctatgtgctgagtttgactatttatatacaatgagaacaatgtgaatcacataaaaagtcttgattattggtggcttcgcactaaggaggggcaagtgtacatgtagccataccgtgtatttattgcaattatttgaaacgtcaatatcttccttctccaaagcatcaagaagttttttttatcgttgtgggagagccaagattttgtggtccctatgtcttagtgttaccgtataataatatgcccttaatgttgtctttctctgcaagattttgattgatttgaatgcttgctgaacacatacacatcttctaaacctttcggattgcaatatttgttaattataaggaaaaaaaatactcgacatattttatatttattaagaaatttaattaacgttattaaattatgtcaatttcaattaaaaaaatattttttaaattatcttttatttaaacttgatattaaacacaaattttttattaaatgaagcacattttaaaaatagtctaattaaataaaaaattgaaatttatttatatttaagacttaaatacaaacatttttttttacttatatttaacatcagagggaacaatatatatgatttctaatagagagaaatcctatgataattgttttaacatattcttttaaatatagtcttttattagttgattttttttttggaaattataaagttttgtaagtcttacattttatttaatgaacaatatctctaattatttatgtaatttttaataatttctaactcaatggtagaaaaaagtgtattaaaaaaatgtgcaacaaagtatttaacactcgtcgtaatccaacaatttgattttcagttgagtgatagttatgccagttatttcggcctagctaaatgaaaattgtgtgtgtgtgtgtgtgtgtgttttttttttaattgattcgttgtgaatattgattcatctgtgtttcaatgcaggattttgattgatttga

SEQ ID NO: 2347 - DNA, 2667 bp, Glycine max
  Intron number 1 from transcript Glyma18g03980.1 (locus Gly ma18g03980) derived from phytozome v7.0 (chr-ID Gm18; pos 2751573 to 2754239 reverse strand)
tttttccggatttgagttggaagaagatcaaagaggtgagggatttactgttcaaacttcaatttcctgcttttgttcttaatctgtgcaccttgattctctgaattgcttctgtgagtttggttttggtaaactagggttttgaaagggaatcgtgtttctcgcggagaaatcttttgttttctgtggtaaataagctattggattgagttatctagttttgcaataagaggggttaagaggattgaagaaatttgaaaacttaagaaagttagagaatttcagacacgaagtgtttgacatgagttcggccctcaaatcatgagataaattgtgtttcaagtgtggattatgatagtagacactgcaagttttaaaaccatatcgatctatgcattgatttgaagttggaaatggactaagcttttgcaaaaaatttctgctatagctgctgtataatgaggacaatttgagctgcaaaaattggttttgggtgaaacaaaatttgttgggacgtttttgttgtaagtatctaactggaaattttcaacattcaatcttgggtacgaaattcataataaatttgagaacgtggttgtctgttttaagttttgatgagtcagcctactttaagagagaataacttgattcatacatatgattttgaagtggaaccaattttgttttaaagcttacatagttgattctggaaattttcagaatgtcttgatgactataaaattccctgcaaaccataatttcgtgaaattgactattctgttctgtattttgatgcagctaagtccaatttgaatgctcataacttgagccaggaaaattgtttttgattgaaccagtggggtttgaaagataataagttcttggtccattaagtttcagaattctttaaccacaggcccagggattgctcctggtgcataaaaatgcagaccatagtcgtgctgaattctgatgtaaatcagtctactttgaaggatcataagttgggtaaagaaactccaatttgtgtgatcctgagcttgttggaaagcttagaaaatctatttttggtggtaaaatatcagaatttatttcattgtaagtcaatcccagttgtggataaaagtggagtagtttagtaaggttttcaatttttatgctacaatttgaaatttacatgtattaggatgtgttgattcttatgatattttaaaacttgcatgctgtagtgtagtctatgatatataaaaatatcagttctttattcaatttgtattgagaatagtgtacttgcaaagtttttgtgttctagtaacaatgtgaagaaatatgatatgaaattgttggaatgtgatatgctgaatgacatgttattgtctgggatttgtttgaatgcaatttctatatgggttctatgttagaacacccacttttgctgaaacagagagaataaaactggcataatctgctttaccacagtgaaggaaataaatagcttgtgtgcatatggtatatttatttaagctactgggtgaacaaatccattagcaaaccgttgggcaaatggatcctttggcattcttctgaaattacagggtgaaggtgaacagaccctatattgtgataagcatgttatgcttgctaggctgagcttgccaattgaggcatggccctagatataatttggtcagtttagatttatctctagtttggactcatatacttattcattatagtatatataactattttggtgtaatggtgttattgatgctttggattttgtcaaattttaatgagaagtgagaacataactattttactttgaaaaagttatgaaaataatcagtgttatgagaaagtgatatgaaaaaggataattgtttgaatgtttacagtttacatgtatgcatgtgtgtattttgaggtgtcctcactgagtcttagtagactccctcttctaatagggatgtgaagaatgttgtattattccaattttatttattaagtctatactagttttgttaacccttttgatttgaattgctataaactatgacattaatgattttgtttcaaaaagttattattcatgaaggttattatcaagttttgcaaaagtgacttgtaaattaggaggaaatgataagctttggaattatgaagatgtctctactcttggctagtcatagacaatagatttggtccatgataataatggattaatatgaaggaaggatattgttagatatgaaatcattcattagcattcaagcaacggcttacattggtgcattattttgaaggtcttgtgtgcttaacttaatatatttttcataaactaagttctctcatggagttatattaatgataacgtttcctacttacaagatttacatcaagttttggaaatgagatttgtctgtgtggaataattatgcacggcctgataaatgtcgtttaggttctgttgttttacacatggatgtctcattgatgatctttttttttttttttgcacagatgtctgttgtgtttgacatgagttttgatgtccaattcagttttgttcatgttgatgctatctgtacgtaggttcctagttgcttggattgttcctctgggtggtggagactttgtgtatttttaaaatattgacaattcaaa

SEQ ID NO: 2348 - DNA, 2922 bp, Glycine max
  Intron number 5 from transcript Glyma19g42910.1 (locus Gly ma19g42910) derived from phytozome v7.0 (chr-ID Gm19; pos 48720318 to 48723239)
taccgtgcttcgggtatggatgaaatttttagtttctattgggcatgctggtgaattgtttataggattacattatagtatggtgtgctgtaggagtatgctaactagatttagggaggagagagagagagagagagggagagagggagggagaggaaagtgtttctgtattgataaggattcaacccaaccatagattggggaatgaagcagtacatataggcagttgcataacagaatgataaagctgttgacaattgtacttacaactgtctaatagaaaactaacctaactcgagttagttaactgtttctcttatacccctgaaaactaacctctgattacaaaagatacagaagctaagtaaaaaacactcagggagtaaaatactactctcttatacccccccacaaactcagcagtggttggcagaatgcttttcaaccactctgagtttgctcctatttattagaaaattggagggagatacagctctggtaaggatgtcagctctctggtctgctgctggaacatggacaacctgaagctgtttgccgagaaccttctctctgacaaagaacaaatccagctcaatatgtttggtgcaagagtgtagaacagggttatgaacaagggacacagtactcatattatcacagaaaataactggtggagcatgaggaactttgagctctgtcagcagggactgaatccaagttacttcagctgttgccaaagccaaactcctatactctgcctcggtactggacctagccacaatagattgatttttggaccaccaagagacaagatttgggcctaagaacgcagcagcacctgaggtagaccttcgatcatcaggatctgaagcccagtcagcatcacaaaaggcatgaacagagtagtgctttgtagaaaaaatgggttccagttccagcccaaaatgaagtgtgccatttagatgcctgaggattcttttgacagcaacccaatgttgttctgacatataaattgacaaactttgttgatagagaaactaattactggatgtgtgatagtagcatgctgtagagcaccaactacagagcgctacaaggtaggatcagaaaaacctcagagcctgttttggtaagcttgtagccaccaactaataggggtgggtaagtgggtcggcccgccccgcttaaggcccgcttgcataagcccgcattggcagcggaccgggccagcctgtcccgttttcttacacggaccaaataaattggtctgtccccgcccagcgggtcaaacgggccagtccgcgggcctagttttaaaagaatttcaatttcaataaaaatacaacacaatcaaattaagttcaatacaaatgtaaataaagtcttaacaattagtcaattatatcaataaaataaataatgtcttaacaaaagaaaatccaagcaataaatctaaaatatgaaatttaaacatccacgagctccaccacgaccacctcaatcatacgaacggcctccgtcacccctcccttgattaccatacgcagaatcatagtttgagcagtgtgtgttaccttgagttagatgaacctgagcttcagaagcagaattggaattcaaaccctcagcaagattcaatgagcccaaattcttcttgcgagacttttcaatgctagattcctcaaccagtagcatagaagtgacatcgtccaaacttagaggatcactcgaattgtttagaatagtacaaattgtgcgataatcatcaagcaaaccattaagaatcacgtcgatgtgagcgctagttaaaattgagtctccaattgatgcatgtgaatcaattcgggattgaatgtgtaacatataagcagttattgaacgattctcaagagaagaagaacaaagctcactatgcaattgcttcttcttcgcacacgcaaaggattgaaagtgctcatgcaatcgatcccacagatgccatgaggttacgcgattgatgatgcaaagaagaactgcttctgaaatagtcgattgaagccaagagaggatcaattgatcttgttgctcccagaaatgataggcagcgctaacgatgttgttgttgtgatcttcaacagtgagaaatttctgcggaatctgcggagcaagaatgtaatcaagaagaccatgcccgatgattacaggttgaacctgagaacgccatagaaggtaattggaatctgtgagtttcgctgttacattgtgcgggaatgagacagaggagcggtgctggcgtctgaaccagcggcagaggaggagacggatgtggtggcggagaagaattgttgtttgcagaagccattttcagaagcaaggatctaacctagctctttgataccataatgagatttagggagaagagagaggaaagtgtttctgtattgatgaggattcaacccgaccatagattggggaatgaagcagtaggcagttgtataacagaatgataaagttgttaggcaattgcataacaaaatgatatagctgttgacagttgtacttacaactgtctaacagaaaactaacctaacctgagttagttaactgtgagaaacagttaactaacctctgattacaagagatacagaaactaagtaaaaaacacttaagggagtaaaatactactctcttatatacttggtgtaactctttcttttcttttagtcatgttgtgagtctaactatagttggtagttagattgatattagttagacagttagttaggacagctgtttgacagctgtcactaactaactcaagttagttgacagttacataactgtaactgttatataaactgcatttaatgtgtattctattttaacaaattcttttctctcctttcagaaatatcacaattgcagtctgctgttattggccct

SEQ ID NO: 2349 - DNA, 5079 bp, Glycine max
  Intron number 1 from transcript Glyma02g25930.1 (locus Gly ma02g25930) derived from phytozome v7.0 (chr-ID Gm02; pos 26765426 to 26770504)
ggaactggtgaaaagaggcattcttccattcaaaggtgcactctgtctctttgttatttgatttccattcctcgacatataatatttatgtttgttttacctcttttttaacgggattgtaaactttgttctaattaataatggcgttaagcaaccctaacccatcttagtagtgcaattaatacgtggaatcaatcataataccataatacgtaagccaattgcaccaatcacaaagataggttatttaatctcatttttagttagaataaattagataacttctttttaaaatacgtgaaatttttttaaccccctttaatcgctttgcctaacatggttgctcaatgctcaccaatcgacatgccctcaagtttctcttttgataagtccgtgttcatgttacatactttatgtggaaagaattaataacttaacctgtatcaaaataaatcaataattcaccgaaaatatatcaataaaagagtaatgttttagtatataattagcgtacatttttatacaattaattaaatagaacattaaatatgatatttaaaatattattctattaattatgagctttcagttatatgaccttaaataaaaatattaaacatgataatttataattgtaaaaataataatattaaataaatttttattaatttttaataaaaataaattaatttaatcatgtaataaaaaacaataaatttttttcgtgtataataacaagctattgaatctatgacatgtgaattattcaaacactttattactgtaactcgatcgaagtgggtactattcatctccttttttattttttaagtgtattttttaaatttaaatttgactttgaatttttcaaattgtttaaaaaaatcataaaaacatatgaataaaacctttaaattttatttaatcataagaataaaaccaatctgcagcaaatatctttagattatttgaaaacattgggaacaaacaatttctttataatttgggtgacaaaagaaatataaaaatgttctccattttgatagttgtcgcaacctacccttcggcgggagggcgatgcgtgactcgcgggatgcgtgttccacgaaaggaatacgcgcggagtcgccaccaacgtttatttgaggaaaacgtcggaaaaactggaaaagacgcgatctacgaacttttaagtgaaaggttcgagagttgtatttacgcacggggaaggtattagcaccccacacgtccgccccaagggacgacagtctttaatcgaattgtgcaaacatgactttgatttttatgttccctttttatgtttttatatcctttatacccttttttatatttttctcttttgtggtcgacaagggtgtttccctttgctcctacgtattcctcaattgcgatgaggaaatcagacctacgtagttctttcttcatcaagtgattcttttttgttttaaaagatgatcattttaaggtgtttggaccttgaaaatgatccattttacttagtaagaaattggaatgacaaacttcaaaaacctatttttatggacgagcttgactaggcgagttgattttagccttagtttcactttagttattagtcaattcaattaagaatgagaaatcccaaagagaaaacgtctgattgattttccgctttattttactaaaagacattttttgattattatattattattttacctctttttttttattttcaacgtggttacggcacgaccgaacggtcggaattcattttaaccgaagttaacggataatacaatttaaacgatcggtggaaatttattttatttttaggttaagcgagaaataacgacgaagaacgatgaagaacgaatgaagaacgtcgaagaacggtcgaaacctttgtgaaattcttcacgaaaaacgttacggaaacgtttcagaagcgcctcggcttagattttcttcacggaaacaatttttctaagcaaattcgaaagagagagaagtgcctaagggactgaacccttttccttctcacttcctcccctatttatagcaaaataggggagatggttgccgcccagctcgcccagacgagcagggtttcttcctccagaagcaacagccttctggaggaatcttttggagggtccaactgggcctggttgctatttgcacccccatttttactaagtacacctcctctgcttctttttggtgattcttttttcgtaaagttacggaaacttacgaatttcgtaacgatacttgttttctttccgtaatgttacggaaccttgcggattacataatcatcccctttttgacttacggaatgttacggaacctcactagctgtgcaacgatgcctccatttgatttctggtgtgtcacggaactttacggattgtgcatcaatattttcttttgtttttcggcatgtcccagaatttcacaaattgcctaatgatgggtgccaagcaccttacacggaccaaacaaaggtcgcatgtcatcaagcaaaggtccccggacgaaattagggtatgacaatagtttactattatttaatttttttttgcattgaaaaagcatgtataagaattttttgtttccataatggcaaaattttgactttatttcttaaaaaaatttacaaaattattcggcaataaaatagttgcaaaaatattaaataattttagaatttggtttaatattaacaagtggcctcaataacttaagagagtgtgaattaggtttcaaaattttcccttaacaaattttgattctctctttaaatgatatatgaacaatttaatcgatgctctctaaatggttcgaccactccagattttttcattgtaaattctcttgatcctaacaacaattttcttttttgaagtacataagttagtttttctctcttttagagaagtttgaaaatagaagaatccttaattgatttggagtagcaagtgtttggccaaatgtttgttcctgagagaaaagaacaagacaatgaagttctaaaaaattttgaagattttcaaaacatatatatagggcattggtggcttttcaaaaaaaaaaaaaaacttacgaaggatgtgactttttcagaataacttttaaaattttaaattttaaatttcaatttcaaattcaaatttcaaattttgtattttgaattttgaactttaaatttcaaatttcaaatttcaaattttttgaaaaagatttgtaagataagtttggttttggtaatcgattggcaatgggaaaatctgtttttcagaaaatgttaaaaatattttaaaacctttttataatcaatttaaaaatttgtgacaccaaacctttgcaatcaccgagagactcttattagcaaagatagaccaagacttaattttcttcttgtactttattttcttagcatcatcaaaaccttcatacacattcattcaattaacaataattaaaatcttatactgcctccatttctaaatttaagactctttaattttttaaatttgtttgtctctctttttccatgttgtcttttaggttatataatttttgaccaaaatactcttaattatattacaataaatgttataaattagtaataagataaattcattctctcttattaggattagaaaagaagactaacccacattaattaattatttatttaaaatgtaattaagtgaaaaaagtgaaatgatgagtctcataattttaaggataactttttaaaaataatataaatttttaaaaaatttaatgtgattatctaattaataaactttcttaaaggatgttagtagttaaaagaatctggtataaaaaaagaaaataatattaaatcccgtaatgttaatattttattttaacaacaaaaataaataaataaatttagaataaaaaataatatcaaaaagtataatgttaatagttttggttaaaaataattaaaatacgaaaataaatatacataaaagtacctttagattaggtttctatttcatcagatcgggtgatgaagaaataggtataaaaatatataaaaataagtttctttaaatttacttcttaccattctttaaaacttgatacattgaaaattagcttggccatatttttctctaaatttataaattttgatttaatttattagttttatttttagtccatgaaaactaaaatacaaattttacttttagttcttaaaactccttaaatgctaccatatatttagtttcgattttttaaaaaagacatgtattttaaaacacgtatttttttatatctatttattcatcgcccaccttagtgagactaaaactacaacttccttgttagatataaggattatgaaaaattaataaataaactaattttaaaaaatgttttgaaggaacaacatattcattaagagcattatttgacatcattgtctaacatactcaatactaccatatatttagtttcgatttaaataaaaaaaacatgtattttgaatattttttagttaaatatatctataagagaaattttaattataaactgcttttaataaaaaaaaatgtattaatctaacaaatatacactattttttttttattttgttgagcaattctcgttatatataacttatggaaaattatatgggaggttaccaaaacataagccataaggtatataagcgaacaataataataaaaagggtgtcacataagtgtcttccttgtgatcagaacctatctagcaccagtaatggaggcgaatatagatatatagtcaagtacatattatgtaggatgaacaaatatcggtaagaaacaattctcgttatatcaaaatgaaattatgtatattagttgcttcgacagacacgttgttaattgatttttttgttttaatttttcttcatcattatgttgttaagtgattccttttcatgagtgtttctctcgaagtaaattatattcttatattacttttttatctttctggtacataaatgttaaagttatcttgtttaacttatatttgtcaattttttag

SEQ ID NO: 2350 - DNA, 1283 bp, Glycine max
  Intron number 3 from transcript Glyma02g45520.1 (locus Gly ma02g45520) derived from phytozome v7.0 (chr-ID Gm02; pos 49743329 to 49744611 reverse strand)
agctttccaccaagctaagtgaggtaaagtgtatattcattattgaattcatcagtactatagtagtatcttgttgttcagttttaatttctattgtaattatggcaatattaatacatttagggagaacagctctgttagattcttaatgtaatgtatggcaaatatgtttgaggaagggatttattttaagtgtttgtgaataagtcgtgatttatttgctagtagaggcatgctcaccttcagaaggaactgtgtatccctctcaagctattgctttcttctctctgcatatatcaatttgttctctatgctcatttgaggaggattcctgattctcatttggtttgtataagttatttctatataaactcttcctttcttgtataaaattgttttggaattggttgtatctcaatagaaagatttgctgtcaaagaattgcaatcaacatcttttgtagaaagtgatgatgaaaagtgggttccttccttcaattcagtgtatgtcctcagccttatttgttgctatcctgttatatatagtatgcaccacgcgaaattgtttaaatatcagtctctgggaaatcaattgatggatgtggtggcattaacttcaacattgcaaaaaaccaaactgcttttgaatttacctgtcacaaattatttgaaaggcatcaattttccttggttctgcttagtctgaaaatggagagtctcatagtcaaactccaatataatgtttgtatggacttaaatagtttgtacaatggcatttattaactagttcaaaatacataaaagcatacactgcttacattagacaattgggatttgctgcaaaactcatataagaagttaaattatgtactaggatttcatatatcctcatttggtaatcaagcttcttagaccaatgtaacttgtagttctaaaagtatactgttaatacgtaggccacttaaccgtatataacctttatgttagagattcaaaaataaataatgactacctgcaatgattgtctcaatttttctctcttaaatctgtatttcggtatattccactgactgatggcataactatgcctgtcaacctagactgttagtgttgaatgtctcatgtattttaaaagatttgtttgttttgcatctatgtgtatcccacactctgtatgctactgttgcttttactcaaaatgttcatattttagtaactgtataatgaaagaaacgtatggtgggttcaggcaatatctttgaaagaaagtcagctaattggaaa

SEQ ID NO: 2351 - DNA, 4890 bp, Glycine max
  Intron number 33 from transcript Glyma15g39420.1 (locus Gl yma15g39420) derived from phytozome v7.0 (chr-ID Gm15; pos 46046664 to 46051553 reverse strand)
atacttggtttaagggaacacattttcacaggaaggttagtatcccctaaattaaaaaaaaaaaaaaaccacattgtgatgacaatagaggaaactgagcaagattcctgatgcagcgaaacatgaagggaaagggaaggggaaacgagggctcaacatctcattgattcctaagaataccgagggttgacacaaattgcaaaaacctcaattttattgaatcaaaatcttccatcaaggaggcttaggtacatataaatagaaaagtactaatacaccagaaaccctaaagcaagaaacagtaaaatgccaaaaaggcccttacatttaagaaaatagcaaaaataccccctaaaaataagttcaagataaaattttcatttcgaccccttaaaagatgaaatttggctaaaatattgtctagcacattgctagaagcaatccggtctcgcttaaaaagtggtttccatgcaaaagtaggaaagtctctagacttccttcctcttcttctcaatctgtttatacttctcttgatttggtttatagtgatctatggggatcctctcatgtgtcttcaactaatggatttatctattatataaattttgttgatgcttattcttgtatcactttgatttatcttctcaaaagtaaatctgaaaccctcaatgtttttcaaaagtttaatgctatgacagaattacattttaattccaaaattaaaagtcttcaaactgattgggggaggggagtttaggccatttacatccgttttagctagctatggcattcaacatgactaacttgtcctcacacccatcatcaaaatggggttattgaaataaaaaaaacaggcatattgtagagcttggtcttacattactgcatcatgcttccttacctcttaaattttgggattttgccttttgcacatcttataaacagactagccaaagcatcactaaacttttcaatacccaatcatatgttgttccaaaagtttccagattatacttttctcaaaacctttggatgtgcttgtttccctttacttataccctacaacaatcacaagctagactttagatctactgaatgccttttcttaggttattctacctctcataaagggtataaatgtatgtcttcttcaagcagaattacatctctaaggatttcattttcaatgaatccaagtttccctatgctaacttgtttgagacttctacttctctcgatcaatccacttcctctccattctttttcaatttcctttcattcctatcattcagtatccaaatccctcaaatcctacttctaattcccctcaacccactcaaactcatacctcatatgtctctagtcatctcaattctcctgatgttggaaggtctgcatctgtttttacacagccctcttctaatcattagccagttcaatctgacactgacatacctattccagcttctagttcatcatccagttcaattcagttccctaatacttaacccacggatcagtctcttcctgctattgttacttctattccagctatcagtccaaaagtaacatcctcctctattaaccctacatctcctcaaaaaccaccaaacacccaccctatgcaaaccatatctaattcaggtatttatttacccagaaccaatcctacatttctgctagctcattgtgaacccaaatctgtcaaacaaggttttacagatcctaattggctttcagccatgcaacaggagtatgaagctataatgaaaaattatacttggtatctagttcctcttcctcccgacagaaaaccaattggttgtaagtgggtttttagagtgaaataaaatgcagatggctccatcaacaagtacaaagccaggcttgtggcaaaaggtttcaatcaagctgttggctttgacttttctgagactttctctcccgttgtggcactctctaccccatacatacatgtactaataataaaagaaataagaaatcaaacttaattaaaagcttttaaaacacatttaaatacaagtctttcaaaaggataaaaggttcacattcacctttctaacatcataataaaacttgtccaaataaataataaattcacttcgactcaaaataaggtcgtctaaaactacaaaatgttttgttaaatcagtgaggtaaaatgaaatagactaacatcatgcaactaatatgcagacttatgtcccaatatcacatcctatcagagtattgtgtcccgacgtccttcagcacaagattccttaaagcaattcacctagtcatttcctcccccgaacacaaagttcaagatcatcacaggatccatacacaaacagtacaccgggagtgagttatcacattcctaactaatgaagagtaacgagacaacatgtaggtataaatatcataaaaacaaaataaaaattacttaaacatagctcacatcaattcacctagtcgcccttaaagggacttagcattaactcgtcacccttaaagggtcttatagtcgtgtgattgtacaattcatagtttataactcaatgcacacatctcaatcacatgcatactcaatttatcacatgcactcgatctcaatcacaatagtataatctcaatttaacacgttatcacacttcatgaatcatatacattttacctatgaactatgcaatacacacaattactcaattgttttcaaaatcattttagctcgtcgggttcccacagtgaatctcatcacaatacccgtcgcccttaaagggtcttacaattgtgtgattgcacagttcatagctcacaactcaatacacacatctcatctcaatacacatgtatttcatcattcatcgcatgttcaatttatcacatactcacaatttgaatcatcatttcataatctcagcataataatttatacaaaagattgatcataacatggggaataaaacccctcaaacagtttctcacaattatatcaaaatcaattaattaaaatcatgggtcaaaatacaaaaacatcaagagaactcaagtttatcaatcaattttcatcagatcatcaattggtacgtagaacacaacaatattgtatttataatcataaaggaaaaattgtaattcaataaacatcccaaaataaatctcgatttaatagtctaaggatccctacacatgttcattctaacctcgattgcgataaactcatctcttacctctaagcgggctcacgtgtgtattccgacagtgatagcggcatctctagcaatctcctgtgattcttcaagcttttcctttgattgttctggtagagttcccaaacgtcaaagagaaggagaagggattgaagcctccattttgtactgtcttcgtgcaattttgttccctctctccgtggatattagtaaatcccaacagtgaaggtgtgtggaattgaatcgtgaccaacatatcaaaattttacgacaatccaatggttaacgagttcaggatcgtagttttaccgagacagttttggatttctgcgggaaaagaaaaggctacgatgcgaactgtatttctctcagctccgacatgatttcaaaattcccaatggtgaaagtgttcagaattgagttgcgaacttggtatttaaattttacgacgatccaacggtgaatgagtctaagattatcatttttcttagatagatttggtggtgtgcgggaaaagagaggattttgcgaggagaaaaggggaaaatgaaattgagaggaagaggagacatagtcggtgtgaaaactgacctaacacgtctctatttatacatagggtatttataaattattatttactctatttatttatgtttattattttataaaaacaaattatattttattccctatcaaatgaataaataaaatatcctctttattttctctaaaatcattattttaattaataaagttatttctccttatttatttaattataaaaacctcatcattttataaaactctatttatttataaataacaatcatttttaatttagtctacgaaaaatgggatgttacacctgtggtaaaacctgttgccatcagacttattttaacattaactatcactaatcaatggtcttttgctcagttagatgtcaataatgcattcctgaatggtttccttcatgagactgtctatgagtctcaaccactaggctcaaaactcctactctacctttgtatgtaaactgaattgagctctctatggacttaagcaggctcctagacaatggtttgaaagacttcagtccacattacttcaatttggatttgttgcaagaaaatgtgatccttcactcttcatctacaagactaattctcacacattttacttgtttgtgtggatgatatcatcatcactggcagatctatttctttgattcagcatctcacttctcaactaaattccaagttttccctcaaacagcttggttcactagattattttcttggaattgaagtcaaaactctttctgacaagtcactattattcactcagtaaatatatcagagatttgttgtagaaaactagtatgacagaagctcaatctatctcatcccatatggcttcaagttgcaaactcacaaaaattggctcagatctgttttctgacctactctgtacagatctgtggtaggtgctcttcaatgcttaaccatcactcgacctgagagttattcagtaaacaaggtttgtcaatttatggccaatcccttagaatctcactaggttgtagtcaagagaatcctaaggtatttaaaaagaactgttttatgtggtcttcatctcagacctactatccggagtcaatcctaccctattagag

SEQ ID NO: 2352 - DNA, 1538 bp, Glycine max
  Intron number 4 from transcript Glyma14g06430.1 (locus Gly ma14g06430) derived from phytozome v7.0 (chr-ID Gm14; pos 4688452 to 4689989)
agtctacgactttatcggccctcaacaattagcacgtaagtgcatctaccttgtttcaaatccagtattctgttttatgtaattaatctttctgtttacatcatggttggtagccagccaactatatgtgaattaatattatagttcattttatttttagttatggttctttattccttgtttttctggtaccagcccatgctttcatggtctatgcctgtcttctctataagttggagggtcggtcattgaatctttacaaaactgataaaccacccacaaaaattgatatttggtgcaaatttgttgcattcatataataatgctggacacttttggaccgaatgagcttatgagcatctgctaaatttgactgcagtgtgctgcatagctaaatggacgaaagttttgtgctgttatagaagaactgtgcagcaattattctctttaattgtttctaaaattttctttttttcttttccagctatatatttatgtttatgatattattctatcatttatactagatatgtgtgtgtgtgtgtgcgagtgatcttacttaaattagtagagtgtatacaagtctcaaagaatggtacatctttggtcatttttattgttatgctttccgcagaaaaaaaaaaacatttggctggcttttgtaatatcttcaaagtcctgagggattacatgcttttggattttctggctaaatgtcttgattcttttgttggttttaccagaatctttttgagagggacaaaactgtatagagccagtttggaaaattttctcattaagcacttctaaagaaaataaaatgaatcaaggaggtagaatgatctaacttctcatgttaaaaatcaacttatgcacctcaaatttttcaataactctttcatcaaacttcattaattgaagtgcatataatgattttagcttacgcgagatgtttggttcattatattttcttttcctataaatatttgtcgagaagtttatcctaactgacttttggatgttttgtctatgatttcatttttgatataattggagttgttaccgcacccaaactctagagctctacccaaatccctacccatcataaccacttgagtaatgcatgggattaaatttctacgcttttgcatttctctcagttctgaactatgttctgcataatcaaggtcacaattgaatttggatttactttttctttttgggctcaatataaattcaacagctgaaatcatgctaacaaaccataacaaccgactgttgttcacaccagactggtttgtatgtaccattgatattacaaacttaaaatttaattgtttctgttcacagtattttcagtctgcgaggattttctttgtagttttttaaatgttattaaataatctgcatcatttctggaattttaaagttattttggggtgtatgtgcttgagtttgaagttcagaatggattctgctggatgaatttgtacaagcattcttataaatgctgtttgcttgcagggaatatcgggagc

SEQ ID NO: 2353 - DNA, 653 bp, Glycine max
  Intron number 10 from transcript Glyma19g26880.2 (locus Gl yma19g26880) derived from phytozome v7.0 (chr-ID Gm19; pos 34028370 to 34029022 reverse strand)
atctgacctggcttctcactctagcgaaatccaaggtaagatactatttgttgtagttctcattattggaattttttttttataaatttgaatatgcttttcaaatagataatattctttatgattgctccttaactttattttaaatagttggctaaattacaattttggtccccccccccccccccccctctttttttttgcgattttagcctccacattttagaaaatctgcaattttagtccaatcttcaattttgcatacgctttatttcttgtattttggttcaattgaaccccaaatctaacatttcatttaagatgctatcaaaaaagtaatttaattaattaaaatatgaaaaaataaatgtatgaaaaattgagcattggatcaaaattgtggattaagaattaaaggaggattagaattgcaattaaacctaaataatttaagtacaggctttttgtagacttccaagcattctttggcaataatgtggtctatggcatgtgtgtttggcgtcaacagtttccattgttatttgtattatggtttaccttgtcagcttcatcttgatgggaaacaaatgtgagtatgaggtttttcagtggatgcaggtgggagctaaatctcttgcgcacatactgaggtt

SEQ ID NO: 2354 - DNA, 975 bp, Glycine max
  Intron number 1 from transcript Glyma07g34800.1 (locus Gly ma07g34800) derived from phytozome v7.0 (chr-ID Gm07; pos 39813204 to 39814178 reverse strand)
cgaggccatttccattgctccaacattgctgatcggtgagttttctctgactgattctgcaaaattttatctttttcacaaccctttgcaatgagcgggttgcgtttttgttttcatactgattgtgcctgagttgagaatctttgtgttttctctctctttttcttcttcttcttcttcttcttcttttttctgagatgggtctgttgttgcacacactgtttgcccattgttccattttggggcacctatttcttgaaatggctttctgggtttgctttgcttaaatttcttttcctctcttctgataaaagcatctagcttgatacggggttcggatttttaagctgttattgcacgtgaagattatggattctcttttgtgcactgcatgatgactcgcaatttttcttctcatgggttcacttcgtatgtgcgacttgaagatttgctattaccttggctttaaggggatggtagtcctaatttttttgatttagtgcccaagtggtgttgatattttgtatgcgaatgtaaacttttgagtaccattataatatttgatagtatattttatgttttcatatgataaatttctggagatgggctggtatttgcaactgaagagcttgtgtgatgatgtttatttcccatagtttgtatttttcctgtctgtcgattttgttattattttgtgaaaacttgtggagcttcctgttcagatgtactggggcattccagtctgtgttgttagggttatgtacatgaaatagtagtctttgacttgttagggttactttatgcagatgaagtttaccccgaacaattttctccacctatgttgaagttttgttgaaaaatctttgtagtttgactataacaggaaatggtgttttgatttggtttagtggatctgggtcttcaattattaagtttgttgaagctaagtttagtgtgatgtaggaaaattgaccg

SEQ ID NO: 2355 - DNA, 559 bp, Glycine max
  Intron number 4 from transcript Glyma11g36080.1 (locus Gly ma11g36080) derived from phytozome v7.0 (chr-ID Gm11; pos 37620773 to 37621331)
caaattttcgaataagattaacgtttctcgtgcgagtctgtctgactatacgattctgtaaaattattttttttaataattaaacagaaaagagagatattaataaaggagaaaatacaaaatttgaatcttttaagaaaatccttacaaattaagcgaggtacagggtgtacacaaacgattgttagctggtagtaagtgtacctaccaaaatctgaggtatttatattgatggtcaagtcagtaaatgattaaaatttgtatctaattattagataaccttacatgtagtgtaccatgttatttacaatactgaagaatttgtaccttagtagaataggtgattacttaattgtaaattagtggaatagagcaatatgttccactaatcacttaaatttataaccatgactagtgcaacaagtaaattaaatcccaccaatagtctactacagttttggacaattaattgcatggatgaaaagaaaactccaaaacattattttgctaattgtggtgtgtaggagggacaatcgttgctcacttgctcggtggtgtt

SEQ ID NO: 2356 - DNA, 1426 bp, Glycine max
  Intron number 4 from transcript Glyma08g08280.2 (locus Gly ma08g08280) derived from phytozome v7.0 (chr-ID Gm08; pos 5924824 to 5926249)
taatccctgtgacaccatccacaccaagatccctggtaaggggtttcttctgcttcttttttcttaattattaatatagttatgaaagacattcccttttaatttatattgatttattatttctactccttaagagttttatgtgctatagaaaatttcatggtactattatatgttgcatcatgattcatgattgatgttcctcctgagaatctgctaaactagcaacatgtcatgtgtaaagtatatttcttgttctttgttttaattgtactaattgatgaattattttgggagtgttaaaggcataagtatccatttgtggtgcttacttttgaatattttagttcagatttatttaactcaatttattgccatttgccttactagaattaattatttttcttattagtaaactgtggatagatgatgtcattcttctctttactctgtaaggggaagtatgtgatgtcagatactatggatattggcttgtacaattatctttgattttgttctattgtggaattggtagttgtagtctacatgacataaaatccttaattttttttctttatacttcattcatttcaatgcacacttgcacagaaagagtaaacacattaaaatgaataaataagactacgtgaaggctgccctgcatttcttaatcccttcccacctttcacttattaataagaaagaaaaataaaaggaatcaggacccaactatgatgggataatacatcaaaagacatttgtttactgaggttggagcttaaaaagacaatgtgggccagttggattgtaattgctctaaatttcagtctactttgatgcatatgcttattttcaatcaacactaggtaagaagaatttttttagaagattaatcaataaatagcttaaccatgaaaagtttaggagtatcatctgaatcaattctgtgtaataaaatgtttgctattggtgtggattgcaatgtttgaacttatccattgcataaaggcaaatactcagtggtgtactctaatctcccatttgggagcacttacaggttttagtgccataattatttaggcatggaggtggtgagaaaatttgattactgtacctttcaaatatttttggaagagggtgattgaggacccatacttggtgcattgatactcatttcttagaagtaaacaacaactttttagacaagtctttttccaaaaaagaaaagaaattaagcaattaaaacttgtggacatccataaatttatggcctgctttgcagtttaagttcaatagctgtaaggaaaattagcatcactagctagcagttaattatagtaggaagtatttgatatatttctaactttggaatatacatatatatcttgtaggtttctagctcctcagagaaatcaaaggtcaagac

SEQ ID NO: 2357 - DNA, 2053 bp, Glycine max
  Intron number 5 from transcript Glyma20g02940.1 (locus Gly ma20g02940) derived from phytozome v7.0 (chr-ID Gm20; pos 2650969 to 2653021 reverse strand)
tggtcattaacaaaattgccccacaaaattggaaggtatgataattgataaatacagtagcttttgtaatgaatttattattgatcatctcccccttgcaaattcatgaaccatggacacaatttctttttatagttgaaagacttctatgttattaatggtgtcaatcttgatcaattatttgtcataaaaagtcaaacctccctgtaaaagggcaaatagataaagtcaatgttgaaacttatttgtcccctgatatatttgtcatccttaggaacaacccaatagttgaatataaagacagaaaatgcctatatgagtagatcaatgagaagaataaaatatctcatgcaaaaatagtttaacccaagcttacaaattcagagacatggcttccttttatgcttcttttttcatgtatctctcccatcaccaatttttacacataatgtatgtgtttaatgttgtgctatttttgctttgtacttcttccctccattttctggttatatcatctgtttgtgtgcagcaaaagtatttttttaaggcatatttgtttgtatttaatttaaaaagaaaagaatacataaacaagtaaaagttgtgtaatacataatttggacttgtctttggttacatctaaaatctgctggtttgccattactgatattattaggtatcaatgacctgttgatgtagaatgataaactaagaatacccttctagggcatataatataacactctgaagaaaggaaatcttaatactttatattattatgcaaaaaaaaaatagtttattaaagtttacaccaacgatctatttaacataactttatttcctaataaaataaccatactgtatactggagtaagataatccaaaagaggataaaatccctaaataacaaatcatgaaacttaatttaaaagttcaaattttaaaacaacttatatcattatcaccagtattgagtgttataaaactgttgtgagatttcacattgattatggaggtattgaactgttagttttaatgatgttggaaatagtaataatatttactatttagtgttgtattggaagtattgaaatcattaagcaatcaatgttggaaacaacaaacaataggagaggagttaatggagggttggaaatttaagatcatgggaaatagtttcgttcctatttcttattcttgacatgatatcactatcactatcagagtttccatgaccaagttgtcaagagtttgatacttgttcccattattatatataaacaatgcaataacaagctagggtgtagataggctagtatatttgtccattgtcaaagtgaagaactcgtgtgtgtgtgtgtgtgtgtgggaggggggggtgctagatatgaaaacattcttgggactttgccgaacagtttaatcttcataaggaaaattcctgatcagtggatggggtttaattatgggagatgtcatctttttctgtttatactccatccttcccctgcttcatttaatatacagaacatgaaattcctcctattgaaaggcaagtaagctgttaccctgggcagattactatttttttggatcctagatttttatcattttcatttgatcacttagtttatttgctcatcgctgctaaatgcttctcatttgtacaacatcttggctgcgctatatacattgaatttacaagccttgcatatcacctgctgcacaaccgttattaagtttggtgtatctcaatttatctgtctttcattgtcaagtttttcattagcatagcattttatttttattggtttgataatcttttgatgatgtttattgtatctacttttgttaatgtataatttcgactttgcttctttttatttctagcccgcccttctgtggtttcagcagcagatttgtgaattcatgtctggcttttaataacttatttctgtttcattccttgcacacatattatactaatttttaaagatctctttgtttgctaatgctcatagtagtttgcatcttatctattgatgatttcaga

SEQ ID NO: 2358 - DNA, 2865 bp, Glycine max
  Intron number 6 from transcript Glyma02g13170.1 (locus Gly ma02g13170) derived from phytozome v7.0 (chr-ID Gm02; pos 11394083 to 11396947)
atactagggtttgatttcattgagaaaccttcaaggtgagagagctttccagaattttggcctggcagtttccctacatttgctcatgtatggatatttatgtgattccattttttgttgataaattctctttatcttgaaaaataaagctactaaagcagaagttagatattattcatatacagaaaggataaaaaaagcatggcatttatataaataaataaataaccaaaaattaataaaaatattgtatatattattgcagaaatacttggaatatttgtccactgataaagtaattcagaagaatctagagatcaaacctatcaaaatgttgcccagaccaataacttgccttagaaattgtacctgtataaatttctatgaatctgattctgaaaattacaaaatattttaaactgtactttatcaagattttttgtgcccaatgaggaaataaatttggcaaagaagtcctgttatatgatgaaaagctttcagttatcctgtcaaaaatttataataatgtatcataggaagtgagacagtaggaaagagatgagtaactgatagtgtgttatacttgatataatgcattgcatttcaatgacacatccctaatcatagtttagcgatataattagaaaatagtgcctgcatttccaatagatgggggaaaggtgtatgttagctgtcagttagttaggatagctaggatacctaactgttagttagttaagaaacaataaatagtcaattagagggaagttagaatgggggagtaggaagtggagggtggtgagacctcgaaactcactttgtattctgtcttgggggttggaagcaccaccataataatacaatcttttcctctgtttctggtccagttctatcaatttccttttttgatttggttctgtaagactaaataaccctgcctgccttaactatttaaaattatagcagaactacagattggatattgaccaaagcagatttttgttttatcttggggaattatggtttctgaaatgaccatacttatcaatagccgcaaatggtactgctatatatatcaagcagtggcagagtgttgtagcttccagcggctacaagaaattcatagtgttgcatttttgcatcatgcaaatgatagctgaaatcacgaccagattctggaggatagtgccgttattccctattcacacgtcagcgccaccgttttcctgcgaaaccttagtccacacatgttctgactgagctcacccccttcttttcctgactccactgcttttcgagccaagcccattcatgttgtggccaagctcaccccattgtctttctgtcttctatgataaccatccgtttgtcctttttttataattataattatatgtgaccttccatctcttttatattgtcgacctatctttaaatagacactagatataaactgagaaattcaactgtattttatagaaaataagtcctcacaatcagagatgttaacctctgtttcaagtacactgtttgcaaactaaaaaaagaagaaaaccaaatagagctgggctccttcagaattgaaataggaacaggaaagtcactggaagagatgaataagggcctcctccttactcagctgatccaataccaccccaaaaaccactcagaaatccaccccactctcaatctattattcctcctttaaataatcctttctctccctcatcttgtctattcagttattctctctccctcattctgtttttccctttctctttgtgtcacctatctttctcttctcacagacaacacctgcatacctcgctgccctttaggcccatttgtgactcgacctaattcccccttcctttccttgcagactcttgtatactttcattacaggtttatcccttctatttaatcttctatctgtttagttgcttttttttttccaatctagattctagaacacttaaaacagattactatttgaaaagatattgctgtactcttttttttagttgacttcattgtctctttatatctctgatctctgtttttaagtttagaaaaacagacgagagatgacagggactttctgaatagattcaacttaactatgacatatatgagacatctcttttccctttttttgttgtgtatagtatgttcttctagttctttacattccactaatttttctgtggcatccctccatcttcctatttttttaagtttgctcttatgttcttatttctctgattgttaatcatagctttaaattaatggtaaatgtgtgttagactatgattttttgttgttaattatatagatttaattttggaatgtttttttttctgtttttaagcatttatgtgtatactataaattaattattatttatttcgtatctataatctttagcataacagtcattatgctatccactatcttgctacagcaattttgggattgtgctgcaatttcgaattgataattatggtcatgatataagtaattgttttcacttgatgtccattatgcatgcacacacacattagtaccaacagaccagtggctagtcttaggaagaatacatgaggtttgtaaacagttctgtttgaccagatgtaatataatagtgtataaaggatttagtggtctattcttttgcatcagccattaaaatatttgtgatgttgtcacatgtagtgtactccagaactgaattagcattttttagggatctttgttactatagtttttaagagtatttttaccttgcaaaatattactcaaaggttgtgcttatcacttgtttgaacagggcagctattataaaatcattggagcagctatttt

SEQ ID NO: 2359 - DNA, 8017 bp, Glycine max
  Intron number 4 from transcript Glyma02g09030.1 (locus Gly ma02g09030) derived from phytozome v7.0 (chr-ID Gm02; pos 6978913 to 6986929 reverse strand)
ggcttcttcctgtaggctctcctgaaccaaaaaacacattagtatattttggtacttcattattttaattcatgaatataaatttctcattaagatttaagcatgcagcagttatttacaaattcataactttcatggtaaagtttggagtagataattcaaattataattcgaggagttgatccaggaaaattgcggtgactgcaatgaataatatagttagggagtaaaatgactgatttgaatgaatttcgagttagattataatgtatatagatttttaaaaattattaatctatttatgtttcaccattctctctatatagttagaatccagctaaagctatccagaatctcactaaatcctgcttcatagattgcacggagccgagccattttaaccaatggatttttttatttttatatatataaaaaagtagttcattatcaaccatcctacaattaaaataatccagctagccaataatggatgatcttttacacaatgtgtggaggaggagcaataacatagtggtgtatttgatttctcattttgtttctcgttctatatataggacaaagtattctgtgaatggaaaaggcaggggtgggctagcctatcttttagggggctaaatattaagatcaaaatgtatttttaaaattgacatgttaaacttaatcaccaaaaggtttataatgattaatactaaactaaaacaaaataaataaataaataaataaataaataaataaataaataaataaataaataactacaatagtaattctggataattgaattcgacaatgctttgtgctgtcaataattgaccttgttttaaaaccattagtaatgacaactgaattatttatttgtaagaaatttgtcatccattcttgtttcaggatcttgtcatgagaattttcattgctaaaagtgctctcacactcactgtagctgtaaaaatattagtgggaacgaacaaacaaatagcaatgggggagaaaaaggaataggatctaagggatgaataaaaagaaaaatgaatgaaaagacaatggcattccttttcattacaactgaagttacaagacgcaagaaatgggaccaacgggataaaagaaaaggaaaaaggagccacttctttgtgataactaacagatccctatttactagtttctttctccttttaattcatttgtttcctttggtcaacactagtttctcctaagggtgtggttggattgatgaaagaggagggaattaaaagggtggaatggatgggataaatttttcattgtttggtttaagcagagataatggaaggaaatgagaccaaatctatttcgttctattacttattcttatttttcttcctctccaattagggtgcacacgatagaatgaaactttctaaatggtaattatcatattgatcttataagtaaaccatagcctctcttatcattttattctttttgccttttcttcttcctcttctatctcatgtataattttctttaatcttttataaaattttcttccatcttcttattcttgtatcttctataaaattttcttgtatcttctttttttcttataggcccttctttcttttttatcttcataaaactttcttctatattatcattccaataacatcacgctttcattttctttcactcctttgttgttagcatgcttgttctcccgtcaaattacgttttggggatcatattattcatatatacttgctcattcttattttccataactttctgctactagtgtaacactattatgtgacgtggcaaaatagaagaatgtgattagttgcatgtgtaaaaatgacagtgtttgggtgttaatctcttttatacactttgatgtagattggagccgtgaaaagtaggaatttggatgaggatttgcacaaaaaagagctgaaataaatttgatgggaatgagaatagggccagcgcagtcaacttcgggccactatcatcaatatgaggctgggctttggacccagaaaaaggctgggtcggagtaaattcatttttgttagattatgtgggccaattcgttgaacttggtttctattgctggttgatgtaaaagtttattttaaaatattaatacctcaacaagaaaatttaatcatttaacgggatagataaaaaaattagattatttcttatgtataataaaagataattagaatgtcagttttatttgagtaaatttgctaaaaagtggtttaaatatgaagttagtttggtggaacttatgttcctcggttttggaaatatgctcatttattttctctatatctacttaccttaaaatatagattttcaaattaataaaaaatgttaataaagtattagaaaatagtttgtaatcgtgattttggctacaacatcaaagtttttgaagtgtctatgaccataattgcactcatatcaaccacatttatatgcaatttcttgcaatgtcaaaaaatgcaatgaaaccaaaattacaatgacaatttaaaaccttacatgttaacaataggtaaactggttgttcacaactcacaatggtgttagtttaggtttatggctgctttgtgcatgggacagtctaatcactaataagtgatgccaacaaagacgaagtgaatcatgcatagtgatcatgagcattatagcaatatgaggagaggactaatcttgttggtcacttttagtagcaatggtaggtaactgctttcagatttggtatggtggtggctctttgttcgtatagcacagccataaaatcgtgtggaatttgtggtggtattaactagttgatttcggaaaaatatcatgaaagtttatactaaataaatattttttaaacccattacttttaacattaacttaaaagtagtttttaaaatgaaaataaatagataaaatctagcaacataagataagttcccttaagatctgtatgtttttcataatattgtaaagggtttactgtgttttttcatgtctgatatttttcagatttatgcttttagttgctaatctaataactgaaaactttttctattaccacttttagttcatgttatataataacgttaactattatgactaacaatgatgttgatagctcggtaacatattatgtcatcaagaaattatgtagtttttttaattgtttttttaatattttatcatttaatctgttgttaactgttaccagcatataagagatttaaaatacagtttacctcaaacaaattacatgtgacacttgcactatatttcttaataacatgacaagattcaagattctaaagtgatgattacgtcattaattaatattgttatttactaagactaaaagtaataacacgagaaaaaattgagaaaccttaatgagccaacatttagattgtagactaaaagtataaattcaaaattaaggataaaaatacagtaaatctttttgtaaaaaagtcataaaaaatctcatttgattgactttaaaaaatattgtaaaactcttttactttaatttttttcaatattttttctttagcattaaaaactaaaaccaataaaatttcatagagttgaaaaataatgtgaaaaaatataaagctagatataaaattgaataacccttaaaattttagcaattaaagtaaatgtttactcctttatgaaaagaaaaaaagtagccggctactacaccaccgaacattggagtctttttcttgtcacaaaataacagagaacaagggcaattaacagggacagagagatatggagcaggttaacatgcaaacaatttgtgccaaaataacatatattatattattaggttaaaacaataataggtacagtattaaaaaaatgttatggacttaattatagtttgtcatttttaaaaaaaaaaaatcaataaacacaaaactgtgggagccctgtagtagaattgtctgagtaagaaaacaacagtgaaagttaccatacaaaaccagtatttgtcaagttatttgtggagtgtgtggaattgggaccaaggggtcataattacttcacagatatttttggttgggaacttgggatcgctttcggtcacgagaccataaagttgtcgagattttcccaacatatatacgctattccacacaaacaggaagaggttcacgcaaagcacatggccagataaaaaggcaaactcaactattcagaatctttagacataacacaagttatctaattggaatggattggttccatgtcaaatttgaggattttggccaaaaaaattaattaatgctagctaaatcatcttagttactaacgaactttctaataaaaaatcatggaatttcttcttatgcttctcccttgtgcatagattttgtttttcaactctcactattcttatattttgaaaattaaagtttacttctcgagataatgaaatctatttaagaaattgtaatatattttattttattttctttgtgaatatagatgaaaacagtttcaaactctatggtgaagagtggacctccccaattataaaaattcagagataaagctgaagcatatgcaacaaagtaagaacagacaattgagagctagaaaggggcatagaatttaacacattaaaaagttaattatagctagactcactacaccaatatatatttataatatatagtagtaattaatttgagtcagtgacctaattatatatacttacaatatgatatatatgttgtgaaacatatattggggtggcagatagatcaaggtatagttgatccatgacagacttacgagaagtgagcactgctgcttcatccaaccatatgagtgctactcatggtgcctcttgttgcacttgatctgagtgcacaagattttggtgcctcgcatggttatggaaccttgaagaagaaaatgatgaagggcttcccccaacaacagtttggtgtcagaaaagatggagagttgtttgtcagaagtatgttgtggtctacaaggtagtggagttacagctagaggagtcgaggagaaaaagcataatatgcactcatttcttctctccatctctctctatttctctctcactaatgtgaatactctcttgcatgatattaaaatagttcctttctttggacatgaaaaataaattatggcaaaaatagtttagcttgtttggttacaggtttggaggtgattttccatgtttttttatttaattttttaagaagttaataactataattttgatgtttcaaacatgataattttcttctcatgtatcaacttttttcatcatttgatttcacatcagaatcataaaatataatatataatgaacattgaaactacacaaagtagtttttatattgatgccagacttcaagggaattttaacatgctgttattttctatctcttcttttttattaattatttattactgtatctattacgtctgtttgtttcagttattttatcttattatacctgcattttatgcttatctccttcctttttagtttttatataagaaaagtcataataagaatttgttatgaacactgtgcctggacacgtgctttgcaattccagtcgtttaaactttaaagtactacttggcgtgtaacagtgggaaacattgatctcttacttttttgctttaataatattaattatagcctttacttgttagtagtttagaaagtaaacaaaacaaacaaagcagcatgttttttaaaagaaaaatgctagagtaaaaccatagaatcttttgcaaggtgatgaagcgttcggcctaataaatgatgacgttgttcctaagtatattaatattattgttaagtatgaactttgcaccacttggaacaacttcaaaaaaaaattatcatttatgtatcatagtcctgaaaatacatttttgaaatagacatatgctatttcagaaagaaattttctaaatgaaaaaaaaaaggaattctaaggggtgtatccctttaaggaaaaaaatgatataatgagtaattaaaatataaaaaagagggatgatggtgtacttagcaacaattggtatgtaaatagtaagtaatctattattttaataagtcacacaagaactacttgaccggcccaaagatatattaaagcccacgctagcaaaataaggtccaaatcagcaaattccttagttttttttttccccactacgcatgctcagttgcttacattcacaccaaaccagatcaattgtctaatgcagtttcttcttcccctcgcagtcgcagtattcgaatcccaaaccctattttcccttccgtttttccattcacactttttatatttatgctcatctacttatctcttcttcttctttgtgtttatactcgtttactgattattgtataatttgagcttttttttcttattgcattatcatcaatatcttcgttattccttggtgaattgtattcgcgtttctcgttcttttgacaaatgtctgcgatctaaatgtttggccctctgtgtagtgtcatgttttgagcaacttgcatttgctttgtattctattcattgtcatgtttttttatatatatatttatttattgaagggactctaatatgcattttccctttgtattcaactgcaaaaattataagctagaattagaaagatttactctgaaaataaagttcaatggtgatagttgtagcaaattgctcgttatgttgcccaatgatgtacaaatagattgttgaactgcttaacagggtttcgttcataactccatctgaatctctttctctctctctctctctctctctctctctctctctctatatatatatatatatatatatatatatatatatatatatatatatatatatatatatatatctgtgtgtgtgtgtgtatttacctatctatctatatctttttctttgcgtgtctgagcaatgctagctagactttcttatctggaagatgcatgatggttgtgaatgaaaccagtggccaaagccgtagatgattttgtattaagctatgagatctgagggctctgtattttgttgtatttaaattttaaattctctacttcaatctttctttcttttttttaaattttattttttggctttgctggttttttttcttcatatttattgaattatgatgcttgcacttggctctgagcagttttaacttttaactacacttttgatggaaatgcacagcctataaagctatgtctgactacccacaacataaaaagagggactgattggtaaattcgttggttctcattgcatattgtgcaattccctccaaatcgcaatttgttattctttgctgttgattaaaaatctctaattttctcattttcttctatccactgtgctgcctttttaactttttgtctcactttgttgtcttttatatatattgttttgggaattgttttctaatagatatggtactaatgggctttcttgcttaattagtctttggtgtggtttcttttagcatctgttttgtgattaaattttatgtcctttgtgtgacatgatgctctcagattcgtttaagcgtctttttattcaggaaatcatttatgtatagtatatagcccttccttgttcacaactttaaattgatttctgagaatcgtgactcagaaaaaaatttatctgaaaataagcattgataatgatagttggagctatttgtctgcaatcctgcccaatgatcaatttctttattgtgatcttatccccatgacgcttgctttgatttgttaaggtgggattgcattggacaaggttatgaaatcctagtctttattgctcgtataattggaaatttggaaatcctggaataaaagaatctcttgaactatattgtattcaccgttaaggattatgttgtttggaaattacaatgctatgtgcagttgagttttgctctaaat

SEQ ID NO: 2360 - DNA, 1297 bp, Glycine max
  Intron number 1 from transcript Glyma02g43390.1 (locus Gly ma02g43390) derived from phytozome v7.0 (chr-ID Gm02; pos 48167126 to 48168422)
tgcctgttaagacatctgacagagatagggcagaagttcaggcatgaaattgatcctttattttttttttatttgttcaggacgtttttatttataagatttaaatttaaaatagggatgattctttttataaaaacctaatttataacattccttcaattaatcatttttagactaaaaatattttttattaaaagaccaagaaaaaagaaatgtatcaacaaatcattaaaaaaaaagaaaaatattaataacaatgataattttaaaaaaattataaatttaagataaatttattttatcaactaaattaattatttttctttactttaataaattagataattcaattttatatacatgaatatggaaaggactatatgtacagagaatttaattagaatgtattttaaaagttattacccgattttcatgtcttttaatgtttacgtttaaagttattacctacaaaattaagaaatatgaaactaaaaattcttatatttaaactaaaatgattttatttaatacctttattttttaaacttgtactagtggtaggtattaaataataatatatttgagaaaaaaacacattaattagactttgaaattctaaaacaacaaatattgtggagaaaaaataaaaagttaaaacattaaaaaatatgaaaaaaggtagtattttataccatttcaattatagattgttatagtgattttattgatttctattataattaatttaaaagtcataatcaagatgatttctcatgagttgacaatgacatgcattaaaattaaattcagatgtatgtgtgtgtgcagaattatgtttagttaagttgcaaatttgtgttgttagttgttgtttgaaacataatctctttatgggggagggctagtttctttggttcacttgttgcttgttgtttcattggaattttaagaggtgtttgttgtaaatgggattgttaataagtgataactagttttctggtatgctttgtgatttgaaggatactatgtcattgtcagttgtgggttttggtatatctaacaatgttaacttgtttaattataaacctcactatggcatttatatgtggtattcttgttttacttattttatggaatgtaaatactcttattttgatatatgattattcttgtctgcatgggatcaaaatgatatcttctttttttaattattatttctctttctgtctgttcatcttcttcacgactgtaatcagaaaggaatttgattagtgctcctgctggaaaggttgtaggc

SEQ ID NO: 2361 - DNA, 1149 bp, Glycine max
  Intron number 3 from transcript Glyma02g37440.1 (locus Gly ma02g37440) derived from phytozome v7.0 (chr-ID Gm02; pos 42756497 to 42757645 reverse strand)
aagtgaagtatcagaaaaattttcttgaagaactggtacataatttcttgcataatctttgcttcttttagtttcggttttttattaatgtttgacctgtgtgtcacacagggcacgtgtttggttgtgaacttacacatgcaactagatatacccaattttattagcaaatttcattaaaaaaaatgcttctaatttgatattgatatttataatataaaagttaatatgcccaaatactacgttccatgcggaaaaaaaaaagcgaaaagaaaatatttcaagcaatgaatatccgagaaaatgaggtaattctttgcaatttaaaatcggattactaaattacaaaataaaatatgatataaaattaaatatgaaaaagatgatatatctgcatctaagttttgtcgtataaaaattcttctgatagtaatatggacacttatatactactactaattctatgttgatactatttgcttaattatctgagatctccctccagattgtggctcatgttgaggtagtaatatattgtccccataaatttaagttctctgcaacgataaaatgactacaattcaccgtgaccgtgttgccaggcaaaaataatttatgattgaaattttgatgtctttagaagctgaatgctccctggcagaaaacgtttctcaaattagaaaaatatggtcagcttgttttaacgttaaggacttcagaagtttaaaggaaaagaaaaccatgtcaaacatgctgctatccatattttgaacctttatcgtctttaacagagtatacaggaaaaatcttttggttcgcttttgttgcatgttgattcatagtaagaaattgctagaaatgtactttcttacacactcttttgaatatatcccttcttattagttgttattagttgaaatttattagaaattacaaaaatttgcggtctcgcaacttattaatgactattgtgattttgtaatttccaataaatttcaatcaatggtagagtatgtgtagaaggagtgtaataaagagtgtgttgctagcattcattttcatagtaattagtgactttatctcttccttagcaggaaaatatccaactgtcttgttaatattttacctttatctttttcaatgcagcaa

SEQ ID NO: 2362 - DNA, 1245 bp, Glycine max
  Intron number 2 from transcript Glyma10g08690.1 (locus Gly ma10g08690) derived from phytozome v7.0 (chr-ID Gm10; pos 7586118 to 7587362 reverse strand)
agggagccaatctgccccttcccgtgcctctcaaggtattatgctcttaatgcatttcattattggtctattttaaaatgataattttttaatattttcggggaaattttttttgaaacataattcatgttttaaatcatttccctcacatcttatgtggtcatgtgctaaacttaagcagtacaacaagcattcttctacaataaactatgtcgtatgtttctatcatgtttctgagctgtctataatcccataaatatttattttgtcatgtgttactgtgtagtatgactaggtgtgtatgtcccttatcacaaggagaggcctagaatatgcatacacttctcaatctgtaaaatttgcctagttcctatggtgcattgtgtcatttaattgctgcctcagttttatcactttatgtaaatggggtgtacgtgcctagtaaaaggtgacacggcacaatcaatttgatcatttgcttcttctctaagttgctctatgatgatgtgcaatttatggagctaatcttgctttctatctacatatttatgtgttttggtctcattattcaccgttggacatgctcagtcatgtaattttgcatcattcttgctagaaatctcttgggaaaataatgataagagattaattttatatatattgccactgtaaaacatctttacacaatcatccaattagatttttatcactttatcacgtcattctattcattatgatgggtcaatgaggtatgttttgtataaagatgttttacacagataatgtatataaactaaagatgtgtagttcattctcactgttagtcctagctgttgctctggcttttgatttggtagtctcaacttgtataacacaactctgataaattgtgcttgaattccctcttgttcatggctgatgactttttgagcaacaaaaagtgatctaatctagtttttttttttttttttttatcacaaaattttagatattaatttgttagtgtgagagattcgaacccacgatttctcccttctctttcttcctttaaccatcaagccaaccttataactcccagaatcagaacatagtgattttaaattatagttgcttgtaagttatttatgactcagatagtaaccactatgataagatgatgttggttcagttgttcttaatgtgtgtaatgatcctgattttgaataaacaggtggacaaaatacctggtggagctagactgggttt

SEQ ID NO: 2363 - DNA, 4563 bp, Glycine max
  Intron number 2 from transcript Glyma01g22580.1 (locus Gly ma01g22580) derived from phytozome v7.0 (chr-ID Gm01; pos 28521007 to 28525569 reverse strand)
tcaagctgaatagtggactatcgagctgaataagagtgagagagaaacttgcttttattatgccttagcttcctttcttctttgattaaaaagagtttaatacactcttaaatctcacattcccctccttagttacaacaaaatttgcccatcatcactctcttatccctttcatcattcaacaacatctttctcaattaaaattccttgtttttttttctttctcggtaccgcacatttatactcacatgttctgttcttttccatctgggtctgttgctgtctcattctgttcctaggactcagatgccgatctttgacacaaatggggttgtgagttttatgggaaagtttctaccttgattgttgttttctctatggggttaaggtaaccatgatgggtatgatgaaagttagcatctttgtgtttttaaccctgatgatcacaatgggttgttatggtgtcacaaacccgaatgatctcagaattctgaatgatttcagaaaagggttgaagaatccagagcttctcaaatggccagacaatggaaatgacccttgtggccctccttcatggtcttatgtgtactgttctggagggagagtcactcagattcagaccaagaatctaggtcttgaaggatcattgcctccaaaataaagaaagagatgccttgattttttacctaatcgttcagcaataactactgaccttatatacagcctcaagcaaaaggttgatctaattctcttatcccaatctggcgtaattgttgtagctgatcagctatttcctgcaataatttaagtccttcttctccattgctcgataagttgatactatgcttaaggaaactcaaatctgcctcaagaacttgcaaccttccaataaaatctgaaaccaaactaccagtagaagataaatcattattcctacagagcgcaggggagctatgtccattgtatccaagttcaccattttgcttgcaaactggaggttccttggatgaggaatcatcacccatgtcatctgaatttaatttaggagaacaaacagtttcttgcattagaatattattatccaacttctcacaattttccagagattccttttcatcgttttcagaatttagccaattatcccgagattgatgaatattcaggaaaaagtaaacttgcttctccaacttcttcaaacgttgggaaatatataacctttcatcttgaaactccaatggtgaattttttacagattgaacattctgtttttccagagatgtgggtagaacttcagatttgtcagatatattagtattttcagaaactgactttccaaggatactttcatccttttcaatgcaaatgatccaatccaatatctttcaccttcatttcagagtttgtatccaccatgctttccagcactgattcatcagggaacttcttcctatataactcaagcttagcttccaactcttctatctctttctccttctcaacaagaaggcaattagctttttgcaaagcttctgtttcatactcagactcctcatccatcattcttaagtattgcaaggcttccatatgtaatgttgccttttcttcctgcagccctgtgatcatggctaatgcttgatttgcagcaactgcagaagcatttctttcttcctccagctctttatacaaagcattaagtttcctgtcatggtcaacttgtctttttagcctgtcgactgcgctttcaccttcaatttcactaacaaggcttccatctagagacaaaccatattcatttcgctcaagtgaaatcattttttgaagtatctggattccagcagagttagaaacatcagaagtcttcacttcatcactgtttatagacaatctaggactgatatcattaacagacagatcagtccctcgagtagctgaaaattgtgacagcaatatcttcaaatcttcactaattcttgtagaatcctttccaagccaatgttctacaagcatgccaggtcttcctctgctgttactgacagctagcttataggcatcaccaagatctagtaaattgggattttgctgaccaatatcactagaaaagggggttgactctaaacctgcttcagatgttgtcagcttatcaactaactcaattatttccccacagtctgtggttattctttgtttagattttgtccctacttcatcagttgtcaaatcatctacaaaaaaaaatggaccaaaggcttattgtcagtacaaatactcatggtacttatggacttaaaataactatgctttgtgaatcgggatcaataactattctttataggagtgcttctgttttgactttccttcaatgagcttgggctttttctagctgttcaatggccccttccacttcaatacttccaaatttcaaatagttctcaagattctttgttttcgattattctaagtggatgaatttgtgctgaactgtagaattgtttggtggaattggaaaagtttggtttttgttttttgcctcttgattactataatttgcagtacaacctcgaatttagcttatgtttgtgtcttagtgtattaattgtttgttaatggcccagcactcaagtgagagaaattcttagttagagagagacaaataaacagttgataaatgtaaagacattccttgaagattaatatgcattgctaaaatggcctatacaacctcactcatctcaacgtgatagatatgttctagaagattgtggacatacaaggtagttgtgtatacaagagctagtctatttggagaagcgaacaactctcaaatgaagtgtgttaattctatcttgaacaacttttataggatttctgggagagaaaaaaattgtacatagaaaacttctatttgtttctcaaacaatatggatcacaacactcgacattctctttgtaacatgtctaagttcaaagtggttccaagcttagggaagtacttgggaattcctctaacagggaaaacccaagtggcttagagtttatctagttggaaagctcaatatttgtttatggctggaagaattacactcgccaaatcagtgatccagacgctgcctatttactccatgatgtctacccaagtttctagtaacattcttaaagatattcaaaagatgcaaaggtcttttatttgaggggataatgacgggggaaggaaacatcacgttgttgggtggaaagctatgatcatgccctagcatagtggtggtgttggaatgtgtgaccttactattatgaaccaagcgtgcctaatgaaaataggttgggcctttagaatgggtgatggaagtctttgggctgatgtcttgaggggataatatggtcaaaattagttccttagagactctgtagtggttaaatctactgatccccctgtggaaatctattgtgaagttgtgaccaaacattattaatgttgagaggtggattgtcaacaatgggagaagtatcagagcttggtaggataaatgggttaatgatatcactatcctgaaagcttttatgtaggatatgcccccttatatcatggagttttgggtggtagatcttattaatgacgaaggaagttggaattttaatctactaaactttcatctacagaagtatattgttaattacattgttgttattctttctcctaaaagtaatgcgtcgaaggatagaaggatttggcctagggaaagattgggttctttttttgtgagtagtgcctatagaagattgtacaattttgagccttctacccagcagaatgaatggtcttgcatatggagactcaagcttctcgagaggttgaggatctttatgtggattgttaaacacaataggcttagtactagaaatagactagccaaatgggggaccttttctccttttctcgaaatctttgtttgcacctttaaaaacattttgagtcctgactctagaagattgtggacatacaaggtagttgtgtatacaagagcaaacacaaactttttatgagtccagccagacttgagaagattgctgatattttctgcataacagtccccatgaatacagacacagtaaaacactaattctcttgttgaaaactcatttgaccttaaattcttgatgagtacaaactaattgaacccttttatctgaattctccaattcactttccatttccataaaggatatgtgatttctaccaacatacatctgaaactcttgcatctctaggaaccatgagtaaaggatatgtgattctattacagcctaataaagcatgtaaagtctacttgataagaacacaaaaaataagtggttaatttggcattgatgcaagcaatttcggcttggatttgtagcacacttgctccaaaaaataagtggttaatttgctttttcttttttggctattaaggtcatatatatatatatatatatatatatataatactaacttgtatataatactaacttaatttccttattttttttaaagcttgtagctgaagttcttgagaggtgctgaaattg

SEQ ID NO: 2364 - DNA, 1128 bp, Glycine max
  Intron number 10 from transcript Glyma20g00320.1 (locus Gl yma20g00320) derived from phytozome v7.0 (chr-ID Gm20; pos 134551 to 135678 reverse strand)
tgctggtgcacctccatctctcaggggtaattactagcttataacctatttcacttctgctaatatatttgttgcatattgattgtggacaattgttaagtctctatattgttgatggagaaatcacttttttcttcggggctgatgcaaatagtttctatgaactgtgaaaatcttccaattgaacccacaaacaatggcagatgtccaatgcggccaatatcattccaagtgcaaaactttagaagttctcttttacaattaatttgtttgaaagggtaagagatatatggcaggagtattactcgtggattgggctttcttctgcagcattggtactgtgaaagcggcagaattgatgggcagaggtggatggtgttgtgggctgctgtaacatggtgtatttggcgtcataggaacaagtgcaattttaacaaccgggaattccaaggggaaacagtactgaatgatgcaatgttcttcatttggttgtggatgaaggcactggaaaacggttttaatgtcccattccaagtatggagtagtaatgctagaatgaattttgtaaggggaggagtgcggtagaaaagaaacaggggtaattttttgttgtgggaatattttttgaggtgggggctttcactcagtgacaaatccaaagaatctttctattatacatctcaaatgtatttgttaagattctctggattttgtgaggtgggatgcctaagggctgtgtataccagcaccgctggtgctatacagctttatttacagtatatataatatataatacatattttcgctgataaaaaaaattgtttgataagaatcattttagaataaactttttactaccaaacccaaacatgtacctagttccctcttgcttaattgttaattcaataacttttattttatgttttcaattaggcattttgatctcgttagttacaagaatactgatagcgttatcaaaataattagaaattagaacattgccttacataagctttgtattctcgtgttcatcttgtctgtaacatttaatgttctgtgttcttgtctatttgactttctatttcattgtttgtttgatttgtaattcagggaagctaaacctacaaa

SEQ ID NO: 2365 - DNA, 7396 bp, Glycine max
  Intron number 6 from transcript Glyma13g14870.1 (locus Gly ma13g14870) derived from phytozome v7.0 (chr-ID Gm13; pos 18497067 to 18504462)
aggtactgaaatttaatcttttaatattttatatagtatataacttcactccattaaacattgtcattcattgacaaagaataacaaaatgaatatggggtttgtggatttgatacaacaatcattactttaatttatgaagtgattaatggtggtagttgcaaaattgatatgacaatcattatattcatgtaatttatcaggggctaatttgaaattaaaattttgatatctcattgaaaattataagcattaatctatatcattcttttaggtagtttatgtttttaaagtgctagttattttggaatggacaatgtacttcatagaatttattatattttcactacaagaaaaatgacctatgcttacagacgcctttttcctacagatattaattagtgtaggtaaatctcaaaaatacttctacctacaagtgactaatgtaggtaaaactcaaccatttgtaccaaccattatttggtgtaagtaaattcattaaaattgaaaaaagacttctacctacaattacattgtgtaggtaaaactccaaaaaacttgtgcctatgattgattagtgtaggtaaaactcaaaaagattactacctacaaaagcacagtgtaggcaaaattctaaaaaacttatacctacaattatgtgatgtagataaaacttcataaaacatgtgcctataattggttgatgtaggtataacctcaaaagtcttatacatataattgttggtgtaggtaaaactctttaagacggtttaaatttgaatactagtctcttgttttttttagtaaatactcaatatcacaaaataaccattcaatttaaattaatttttagttaataattgtttaaaattttaaagataaaatatattaattagtaatattaaattttaatttagattaacattatttttatggattaatttagattaacattattttttatggcaatttcttgttagtttcagcaatcatattcattttatcttgaaatcaaactccaaaatgaccacaagcctttggattatggaccgggccgggtattttagtcaaatccacttcaatctccgtttaaaccctgccactccgttttttctcttcttctcgtgcttcggcggaaatcggcttagctcttcgaccggttagtgccacggaaccagtttcactttcgggtctgtaatctagggtttgaattcgaagaggaaaacactaatttgtctcttctttttgttaattagaacgaatttgtccttttctgcttcaatcttcgtcgtttttcttaataatgttcttgttttcattgtttttctttttccgaaagacaagctgtttggtgcctgttgggtgattctgagacttttttctctagtaaatttgaattggtgttccatttattttttttaaattgttttgaggtggtgagggtgaaggttttatgttttatctggaggatgatttgaatcttgtgatttgtgaagcacgtagtcaattgctgaatacgatgtgattgtgagaagttcttcttggaagatgtggatcttccttgctaatcagttgtgtttagcttgcaacgatttcaatttgctgtttatcctgttagtttggaaatgtttcagctgcattttgaattttctctttattttgttagttttctggtgatactgattttgaggaagcttgctaaatctggttttgtggaagattttagtctggcttgtttttggtgttgttactctacacaaccttttttcatcagctatttggtattgtcagtttttccttttggttttggagatttttatgttttctcttctgttttgaggatacattttgtcttttctgtgcttttatactttattgtcaatagtgttttatttctattttagaaaattgacctgatttgaaaatgttgactcccaaatatcctggtatttaacatggatttgagtctttgttgttacttgttgacactaggcattgctagcagaattataattttatggaggtcattttagggtaaaataggattaactatggttgcaccacgttagctctttggagtcaaggtacgcattacataaattctgccacacacataactatggttgcacctcaggaacgtgacaagctattttgattcagctaagcagcttgtgaatgggattcccttgccactagatcttggatccaacattgatgatgtaaaagtgaaagtcaccacggctgctgattctctctccaagaaggctaaagaaaattcaaggatgatacacaaagtcatagatggagtgtaagtacacgaatttagatgtttcatttggtttatgaatatatttttttgctgattaattaacattgcttgttgtgatcatctgcaggagactggctcttgttactgttgctgttgttatgatctttgttgcatttctcggattgtgtatgtttgattttggttttgtcttttttatttttcttactctatactaaatgttaaccaaatcatatgaacttgatttaatttttgcagtattttctttacttgctttgtcgtgtcctgtatactcgtaagtttaattcatttcatttccttcactctgatagatttgtctcccgttaagtttctatcggtaaaagatgttcttttttctttttatcgtggctgcagcttggtggttattggatggattcttgttacaggcaccttgttactttgtgctgcatttctatttgtccctaagtaagttcctatatattgcttggagtcaattgttcaacttcatgaaatcaatacaaagcttgtaatggatagataattggatcgaattaatgaattcattaactaatgttacacttgcatatatgcatatgtatatttttgaactaaaaaatagtagtaatgtataagatcatagggcagagtaattggtgtgttgggttggagttagctggagctgggtttcttgtgtggtgtgttggtgttatggctgagggatgaagaaagataaggtgtctctccgactccgaataatgggaagaagctaaaggacgaaagcgatttttgacggtttgcattaattctactttccttcttttttttccattaaaaaatagtcaatgatcctgctaaagaaaataaataaataaacagtccataattagtcattttagttccttcggaatctataatagaagttaattaatgacttctttaaaaaaatattattttgatgtatcttatgtgattttgaattctttagaattaaaaagaattatttatataaacaattattatttatacgttgtttaactttttgtattaaatatatataataaaagaaatataatatttaagttaacaaaagtttctcatcccaaaaaaaagaaatcatttgatgtcttgttcagggaaaatagctatttgtattgattgcttttgttcttctgaaattaatgtacatttttagtctgacactccgaccacagacttctcaatgatttataaactttatggaacttaagtatcacttaatccctattactaatttcccctgttcattattctttatagaattttatagatggtcaggtttatcagcagagaacctttagtttccattgctgatcttacccttttcatttatgaagaattggctgtaaatgtccattacatggaatgctttggttcctttgctcccataagaggtttgactgaagatgggagccaagcccaatggtttgtagatggacaggcaacatttgaagcaattgcgacttcaattcaagatgcaaagtcagttgttcaccaataatttacacacacacacacacacacacacacacacacacacacacacacacacacacacacacatatatatatatatatatatattggtttcctaattcaattttaataataagagaatgcaaatcggctgcagatcttcattacgggttggtggttgtgcccagagctatatctgagacggccttttgatagcttttctacctctcggttagattcgttactagaagaaaaggctaaccaaggggttcaagtatgcctactattctcatcaatacattcaagcttgtttgtgttcatcttagaagatttaattctttataagattgatttacaataaagagaataatgcttatgccattaaatgatccaacagatctatgtgcttctctacaaggaggtttctctagctttaaaaatcaacagcttgtacaatatgagaagactgttaaaaattcatgagaatgtgagggtattacgctatcctgatcattttgctgctcgtgtgttgcaaatttaatttcacagggttcaattctaggtgttgaggtcaacgtttctagaaaatcatattctactcaactggttgtcatggaagatgagaatgggaaccaaaattctgcgccacctcaaaacgaagggtttctcatcccgaatgtatttactttagctataccgcaggttaatgaatagcttaatacatagcttttgatttcgtgaatagtttggttgagttttcttgttgtggtactgattttgattggattcttactggtttgtggtaggttgatggaggttccaatttatcaattaaagtttggtggtcataataacttctcaatttgaaacttttatataaaagttattgtgaacataataataagaattctgactttgaaagtgcttttgcaatgctcaaaatcttgagaagcagttctcaatttttgttgttgccttttggtataataaagttgttttggacactattgatcatgatagggacacaaatgttactcttcactgttaccatcaactaactagtgctaacttatgttttgaaattattaatatgagggatcataatattcatttcattttatctttttgtaaatagttatgagtattattattttccatttcgggaaaattagactatcataatattcgaatttatgatagtctaatttttgtaaatagttatgagtattattatttttgtaaatagttatgagtgttatggaatgcatttgtatagaaattgaaatgaacactttttcaaatttatgtttcccttccactcccaatcccctatttagaaccttggcaagcaatcaagtaattttattcattgttcactttaatgtggattgatttttcaggacttgtctcatcctttccttgccaaggcaatcaagtaattttattcattgttcaccacctctctcatcccctcttcctttgagccaaagcaaaagtatgaaaaataaaatgaggtatttaatttgggtactataaaaaagtaataactttcatttgctcgagtcacatttttaattctgatagctgctgaaggaagtacctgtttctatttaaatgttttatttgagaatacatgctacaggacatcccttcattggtgcatgatggccagtacttgcagtttgagttatttcctcgacctcaatttggaattactctttcaacttaattgcttattctaatgatgtgcagtttatatacttccattgctgatataatataataataacctctgtagttgcatcagtgagttatttatataagcacttgagcagaggaaacaacaataagttcaccaaatcactacggtgaaaaaaaatattcaataattgataatagatataatcaattattgctgtaattgagtataggaatgaacgtatcacgttagctgaaaagtgattataagatatattttgtttgaattgtctaaaaaaattgtttattttttttataaaaagattagaaaaatagtatcaagttacttgtaatagttgattttgtatttaaaattttacttattaaaaaaaattgtttccctctttaaaatgagtaaatagtgtatggtttaaagagttttactctatcatctaattactaattaccatacatatatgataagtttagttactttaaaagtaattactttaaaagccatactatctacagtatctctaattaattgatagtagaaagatttttatatttactaagaaggacctgccactagcaaaacagtacatttgaacagtggtggcaatcatgtatctaacagatttctaaacagcttttggtgggtaaaattggttgtccaatccttccatcattttttgttcttttttaatttctaaaggatggattatgatgttttttctgttatatttagcaaaacatgttgctaaatataaaattggttctcttttaaattggttgtgatttattgtaagttttgaaatttaaatggctcaggtacttagatcaacttggaatagcatcctgctacagcactaaagtctattgcaggcagactttaattggagggaactatggccttctcaataccaccacctttgctcccaatcttgactactacaggtaagtactaattgaaaattgcaacaaacgaaaagaaaatactttttttttccttgaaggttacttgaagatttctggtgattattacatcatgtttgaacatatctaatcctaggttctggccttgtttctaaacagtgcagttttgtggcatcggctaatgggaaagaaggttcttgcgatctcaagtgatgttcatattaaagacttttacctataattaggaaatgtaagtagaagttaatgacttttacctacagttgaagataataggtacatattaaagacttttacctacagttaggaaatgtaagtagaagttaatgacttttacctacacactatacatagtaggtaaaacctatagtgacagacaattagctgtcactatacgccccctcaaagttgacagaagaaacgtctgtaggacaaagtctatcgtacatttacctacagattttttatttacagtgacagtttttgtctataggtataggtcatttttcttgtagtgatagttaaaaagatttgagtattgcctccaactcaacctttcccggtcacaataaaagaaagttcactgttcatggttagaatctcaagtcttttacagaattcattgtgattgcaaaacagtttggtttatcagggttacccacagtaaaaagttattaagataaatgtgtttgtgtcaactgctacatatatagattctaaatatcaaaagcaatggcatgcgaccataattatggcatgatcaaccacatgtgtccataattattgcaatatcaaggactgcgtcgaaaaagcatctacaatcgtgaccaaacattatgaccaaaaagttttttctacaatcgttttcttcaacaccaattaattaatttttatttttatttttaaaaaagaccaacttctcatcatcacaggttggaggat

SEQ ID NO: 2366 - DNA, 1144 bp, Glycine max
  Intron number 2 from transcript Glyma05g08910.1 (locus Gly ma05g08910) derived from phytozome v7.0 (chr-ID Gm05; pos 8788567 to 8789710 reverse strand)
ttcaggtaccttttcttttcttaggatgtttcctgttgtttagtgaacaagggtgaaactcacatttcaaattgcatgaggaattccattacaaagtagaataatatttctgttgtatttcactttaaagaagaattgactgactgtaggtggaatcaattcaatattattgcacacaagttatatttcagatgttcatgtgggtgatttaatttactataggatttgctgacatggttgggacaaaatgtgttgctgaggtgctgttgcatctccttaggattttttgggctgttgtacgaatatttgactatttgatgtccttgtcatttgcatgtctctcaatcaaacttcgttttatcaaagagaaaaaaaatgataattccttacttaagagcaatggcaagtgcaacattgaagcatgactcacattatactggtaaatcaaatatattaatcctaaaacacaacaccaaccactgaaaacataaataggtctgagttgaagcagtttcgagatgctacattaaaaaaatgaggcattgagccaacgaaaagttactagatttaaaaattagcttcactatttttaaagtgtctactccctctcatatcatgtatcattcctcaagtttatatggataaagaataaaatcatgcatggtaatgatagtagagggggcagagggaaattttaaaaatggtgtcatttatgaaaatgttccctcatgttttctgcttggttgcattgcttttggaaaattagatattacacattcctttttgaacttgacatgtttgcaaattgcataaatttgttaatggaacgtttacataaaactattgggctttttaacacaaacttgcatttcgtagaattttcaaaaattcaatattaatatttattgcattgcgctgtgcaaaaaaaaaatatttattgcattgcatgcattgtattaacttatgttgtatacttgtactttcccagattttgtacattatcataattatgcactgcacacggtcagtttgaattagatgcagtaatgcatactttcgtatagggtttgattcattgttaaactcactatttgttgttcacaattcagagtctttcacagttcaaccttcctgtttcacttcc

SEQ ID NO: 2367 - DNA, 535 bp, Glycine max
  Intron number 2 from transcript Glyma05g18280.1 (locus Gly ma05g18280) derived from phytozome v7.0 (chr-ID Gm05; pos 21796307 to 21796841)
aagttggaagacttgaagtccttcgcgtacataccaaaaacatgaagctttcagatgctgtaaattcagcattcttaacttccatttctgttggtggatttttgtgattttttctctatcaatttttggtatgtctaacttactgtactggttctcctactgtaggttgatctagagagaattgcaaaagatactcatggatatgttgatgctgaccttactgccctttgcactgaagctgctcttcaatgcatcagggagaagatggatgtcattgatttggaagatgagagtattgatgctgaagtgctgaattctatggcagtttcaaatgagcatttccatactgctctgggaacaagcaatccatttgctttacgagaaactgttagtagtttttttttattctttttaattcttttaaatttaaattattatttagctggtgaggctttctgtctttgttgttctttcccctaattagcaatctttgttgacaggttgttgaggtgcctaaggtcagcggggaggatat

SEQ ID NO: 2368 - DNA, 432 bp, Glycine max
  Intron number 2 from transcript Glyma09g36820.1 (locus Gly ma09g36820) derived from phytozome v7.0 (chr-ID Gm09; pos 42432609 to 42433040)
atcctcaaggaagtgccaatgtatttctctttccctttcacctcattaacatcaagttcatattgaattatcctacgataaaaacacatcaataaaaaaatatattctatataagcatatcttatttcctttgtttagagaattgatttttagataccttatcttttaaataccacatcaacaccttttattttatattttttaatctccttcttagctataacattctatggcttatatgatacctatacttttctatttttactccctcttactaggtgcatgctgaatagcatttggaaggtctaaaaattgttttttccttttggatttgatttttgttttgaaagatactaggggtggatatagaatcacgtggtgtcaattaactacaaatgcttatgatttatatatgaatgtatttgtaggaag

SEQ ID NO: 2369 - DNA, 7781 bp, Glycine max
  Intron number 5 from transcript Glyma16g28200.1 (locus Gly ma16g28200) derived from phytozome v7.0 (chr-ID Gm16; pos 32146778 to 32154558 reverse strand)
agaggtatggtacaaagacaatagcattctatctccatttatgtattcactgcgaggtgaagctgcatggagtcattttacaccaaatggtttaactgtaaaggacagaacaacctttgctcaatatgttttttcttatatccttttccttttatgttagtcttcaacaaactatctgtcaaacatgtgttgcttacccgcagtgtaattggcttcttccaatggtaggctcccctgaaccaaaaaacacattagtatgctttgttgcttcttcattttgcttcatgaaatataaattagtcattaagatgtataaatatgcagcagttacattacaaattcataacttgcatggtaaaaattggattagataatttaaattataggccaagttgatccatgaagattgcggtgacagcaatagttagggagtaaaatggatgatttgaatgaattttgagttggattataatgtacagattttaaaaaattattaatctatgtatgcttcaccattgtctcgatacagttagaattcagcagaagctctccagaatctcactagatcctgcttcatagattgcacggggcctaaccacttaaaccaatgattatttttattttttatttttataaaaaaaaaaactggttccttaaccaccctccaattaaataatccaactagccaataatggatgatcttttacaaaatgtatggaagaggtgcaataatatagtggtgtatttgatttctcattttgtttatccttccatatataggacaaagcattctgtgaatgggaaaaacaggtgtggggtggggtgggactagcctatctttaaggggggcaaagattaagattaaaatgaatttttaaaattgatatgttaaatttaatcaccaaaaggtttataatgattttttatatagaaaaaggtttataatgatcaacaatttcataaaatgtaaattaaattgaaacaaaaaaaataaagaactttcaatggtcattcaggataattgaattcgacagtactttgtcttgtcaaattcatcaataattgactttatactaaaaacattagtaatgacaactatgttatttatttgtaagaaacttgtcatccatttttgtttcagggtcttgtcacgagagttttcattgctaaaagtgctctcactgtagttgtagaaaatattagtgggagctaccaaacaaatagcaatgggggagaaaaaggaataggatcaagtgatggataaaaagaaatatgaaaagacaagggcattcttttttagtacaactcaagttacaagtagcaagaaattggaccaacgggatccaagaaaaggaaaaaagaacaacttctttgtgatagccaacagaaccctatttactagtttctttctctttttgtttatttatttcctttggtcaacactaatttcttccaagagtgtggttggattgatgaaagaggagggaatggatgggaaaaaattccattgtttggtttacgtgaaagatgatggaaggaaatgagaccaaatctatttcattctattacttattcttgtttttcttcctctacaattagggtgcacatgatggaatcaaactttctgaattacaaattatcatattgatcttataaattacccatagccttctcctatcttattctttttttcctttcttcttcctcttctatcttctgtataattttctttaatcttcttcttcttcttttataggcccttcttctttctcttcataaaactttcttctatattatcattccaataacatcaagcgttcattttctttcacccctttgttgttaacatgctggttctccagtcaaattacgttttgtgaatcatatatacttgctcattattattttccataactttctatgattattataacactattatgtgatatggaaaaaaaatagaggaatatgattggttgtatgtgtagaacactttttacctcgagtgttaatctcttttattatacactttgttgtacaaaggtaagaatttggatgaggatttatacaaaaaagagctgaaataaatttgatgggatgagactagggccagcggggccaacttcgggccactatcatcaatatgaggctttagacccagaaaaaggctgggttggaataaattcatttttgttatattatgtgggcccattcgttgaaattggtttctattacttgctgatgtaaaagtttattttaaaatattaatacctcaacaagaaaaggtgatctactgtgactaacccctattaatcatttgatgggatatctacaaaaattatattatttctgatgtataaccaattataattcgaatgttggtttttatttgaataatttgctgaaaagtgatttgaagataaaattagtttggtggaacttatgttcctctgttttagaaatatgctcatttatttttcttcatatctattcttaccttaaaatacagatttacaaattaatcaaacgtattattaaagtattagaaaacagtttgtagtcatgattttggcttcaatatcaaagtttttgaagtatcaatgaccacaattgcagtcatatgaactacatttatctacaatttcttacaatgtcataaatcgcaatgaagacacaattatggtcgcaatttaaaaccttacacgttaacaataggtaaactagttgttcacaactcacaatggtgttagttagatttatggctgtttaatgcatggaacagtctggtaatgatgccaacatatatggatgaagtgaatcatgcatggtggttatgagcaatttagcgatatgaggctaatctcgttggtcacttttagtagcgacagtaggtaactgctttgaaatttggtattgtgggtctttgttcgtataccataaccataaaactatgtggaatttgtggtggtattaactagttgatttgggaaaaatatcatgaaagttttttaagtagtttataaaatgaaaatataaaaaaaaatctagcaacataatataagttctcttaagatatgtttatttttcataatgttgtgaagggtttactgtcttttttcatgtctaaattgtttcaaatttatgtttttagtctctcatttaaattttgataagttaaaaaaaaaattgttaccacttttagtctatgttatgtaatagcattaattacagatgagtaatgatgttggcagttccatgacttactctgtcattaagaaatcatgtctaattttttttataaattatattttcaatctttcatcaaccagcatgacttgggtaattgttctgaacatatgagaggttgtaaacataatttatctagaaaataaaatactcgtgactctcacatcatattccttaataaaatgacaaattattggattctaacattattattaatcattaattaacattgttgttatttgataagagactaaaagttataaataaaaaaattcaagaaaagtttgatgatccaaatttagattgtggactaaaagcataaattcaaaattaaggataaaaaatattgtaaaccctattgtaaactaacaacaaatatctcatttgattgacttttaaaatatcaaaaaaaaattatttactttagtttttttataatatttttttcattgtattaaaaactaaagcaaataaaattttatagtgaaaaaattataaaactagagataaaattgaataacgcctaaaattttagcaactaaaagtaaatgttactcctttatgaaaaaaacaatgtagccaggctactacaccacccaacattggagtctttttcttgtcagaaaataacagagtcagggcaattaacagggctagaggggtatggagcaaattgacatgcaaacaatttgtgccaaactaacaaagaatatacaattaggataaaacaattaagtattaaaacattgttatggccttataggttgtcaaaattttaaaacaaatcaacaaacacaaaactgtgggatccctgtagtagaattgtctgagtaagaaaacaacagtgaaagttaccatacaaaactagtattttgtcaagttatttgtggagtgtgtggaattgggaccaaggggtcataattacttcacatatatttaatggttgggaacttgggatcgctttcggtcacgagaccataaagttgttgagattttccctacatacgctaatccacacaaacaggaagaggttcacacaaagcacaaggccagaaaaaaagacaaactcaactattcagaatcttaagacataacacatgttatccaattggaatggattaattccatgtcaaaatgaaggatttgggcaagaaattttgttaatcctagctaaaccatcttagttgctaacaagcttctaatcaataatcatggaaaatcttctcatgcttctcctttgtgcatagattttgtttttcaactctgactattcttatattctgatatattgaaatttatttaagggataaaaaaaatattttttctttgtaaatagatgaaaacaaattttgctttgtaaatttttatttaagagtggtcctccccagttatccaaaatcagtgataaagatgaagaatatggaacaaagaaagaacccatgagagccagaaataggcatagaatttaacacattaaaaagttaataatagctagactcactacaccaatatatatttagaatataattaattagagtcagtgacctaattatatatacttaaaatatgttgtgaaacatatattggggtggcagatagatcaaggtatagttgatccatgacagacttacgagaagtgagcactgcttccaaccatttgagtgctactcatcatggtgcttggtggtggtgcttgttgttgcacttgatctgagtgcacatgattttggtgcctggcatggttatggagccttgaagaagaagatgaaggggcttcccccaactacagtttggtgtcagaaaagatggagagtagtcagaagtatgatgtggtctacaaggtagtggagttacagctagaggagtcaaggagaaaaagcataatatgcacccatttctttccttcatctctctctattttctctctcactaatgtcatcaatgctctcttgcatgatataaaaacagttctattcttgggttgtgaaaaataaattatggcaaaaaatagcttagcttctttggttatgggtttggacgtgattttccatgttttggatttaattttgacaagttaatgattacaatttcgatgttccaaaagtgatattttttgttttccttctcttatattaacttttccatcatcttattttctctctttttttctttttctgtcttacttttttcattacattatttattagtgtatctattacgtctattttttatagttattttatcttattatatcaatcttttatacttatctccttcctttttaatttctataaaagaaaatcataataagaatttgttatgaacacggtgcttggacacgtgctctgcacttccagtcgttgaatgtactacttggcgtgtaacggtgggaaacattgatcgatcagttacttttttgttttaatattataatctttcttacagtacctagtaaaatactgtgttcttcgttataagattttttcaaaaatttataaatgacgagttgttttaagtggtgtaaatgttatattcaactatcatatcaatacattttttaagttttttattttcttattatataaaattttttattatattttttctttttttcttctcttcttatttaagtttcatattacatcacctgtaagattccctcccagtgcggtgggtaactttggtgaggaagtaccctttctcttttattctattaattttgttttccttactaattactttttatactctacttatttactaattactttttatactcttgctaagctgctttctagtgtattacttctgcaaaattattattgagtgtgcttgatcaaaaacacttttgaggaaattgtaaattttggggcatttttataagacaagcattaataatttttttatacaagtattaataattttattattatttgatttacatctcaactcaatagttataaggttgttgagttaaacactattctttttcagtgtattatgtgtatgtgtataattataataatatttttcataaaattcttaattcttgattttttataattaaaagtataaaaaaattaagtcttgtaaactcattagactttgaacagaccttaagatttaataatcagttataaaaatacatacaaattatctatcaataaagtactcacaatggacaaagaaaattgaatccacaatcttatgggatataagtccatttcttatctaggagatcaatctttgttggtttaattattgattttcatagtttttctatgacacacatatgatatagagccactattcatctttggatgttactattagcctcaacaacaaaaaatttggcccttagtgaccaagagcaattacaatagtattcttttgtcactctcttatcttcattcttctctctctctttcctttttttcattcattctttcttttttctctttccctttgccccgctctttactctttgcaattaagttgttgttgtttttttttgtggtcctacataattacgattttgttgtgaaatttcgcataggggaatcataattctattatttccgttgttgttaatgcataaatgtgattccattgtgcaaatgaacttgttgcataacgaaatcttatttatgttatccattttttacaactaaccgtatttgatgtattgattatgtaagtcaatggattggaataagtttatatctaacaaggttacaatgttagttgaatgaaaaaatatggataatggaagccaattattttaccagcccaaccttttatgtggaatcaagcctaatgatgctatgagggataataataatgaaaatgtggatggtgaagacactaatatacaagcgcaacctagttatcttgacttttctagttatttcatagttgataaggtatatttcatgactgataagatttatttgtatgtgttttttgttttgttattgaataatttttttgattcttttagattttttaaaagcgtgataatttgttaaattgagcttgacatgtgagaaatgaacatgagtgtatgattatcattcataagtaagaagtaattaaaaaaatatgttagactggattgtgaaaaaggagaaaagaagtgcaaacaatatagagacaagttagtgcataagtccactgaaatcagaaaatatggatgtccttttgaattaaaggggagatttgtgaaaatcatagggtggagacttgttgaatgtggtttccgtaaccataaagtgacgaaaacattgtttggtcattcatgtgttcatgtgttggtcgtttaagcacggaagaaaaatccatggtcaattgatgaaaaatatggtgaggcaaattgtttgttttgttgcccaatgaactatattgtattcacctttgaggatagtgttgtcgggaaattacaatgctctatgcagtttgagttttgctctaaacatgtaatctatgaacatttaataactaatgttgcaatcttcacatttttctttaggtcttct

SEQ ID NO: 2370 - DNA, 2496 bp, Glycine max
  Intron number 1 from transcript Glyma06g39750.2 (locus Gly ma06g39750) derived from phytozome v7.0 (chr-ID Gm06; pos 42640584 to 42643079 reverse strand)
ctcaagatatctttgaaaattgcagtgatcttttggtaagttatgtctatgcttgtttgatcttttgtttataggattgggtattttaaaggtactgtgtaatgggtgtgctaatgtacagttatcttatctcttatgttatgtttaaaggtactgtgtaattgataatttttatgaatatataatactgtataattatcaaaatttgtgagtttatttaatttattattgatataatattaatatgtagtaatttttaaatacatttattatgaaaattaaaatttgttttcaatttattgaaatagtgtatttttattaaaaagatgtaatttttaattattttaatataatctttttcatgattttcaagatattaattttaattatgtgattttattgaataatactacctatgtgtttcttatactaaacaagtgatagagtaaaaatatttttttttagtttcttacttagtgtgtgtgaagaaagaattggaaacaaagagtgagaaaaaacactagaagcaaaatttccatgagtacacaaactaacataattggcacaattacagtgttttgaaataattgaaagatgtgattaaacactttaataattgaaaactcaattaaatttttatttataattcttttttaatgataattttttaattataattaaaaaatcaattatataataaagtactattccatctatctaatcatattctgttgtcttttatatgtcgcactaccctacttttactcatacatggtctgaaaagtcaagatacctttgaaaattgcagtaatcttttagtaggtgatctttttggtaagttatgtctatgcttgtttgatcttttgtttataggattgggtatttttcattatataattggataatactgtgatgacttataagtgtgaatcctggtttatgttgaaaggtattgtgtaatgggtgctaatgtacagttatctcttatgttatggttaaagggactgtgtaattgataatttttgtcgtccttcacacactaattcacactaattaagatactaaagaagaaaaaatatttttcactgtatcactgggtttattacaagaaaaacagatgtagtattattcaataaaatcacataattaaaattaatatctttaaaacgatgaaaaatattattttaaaataattaaaaattatatctttttaataaaaatatactattttaacaaattttaaaaaaatttaattttcataataaatatatttaaaaattactacatattaatattatatcagtaataaatcaaataaactgacaaaattttgataattatacagtattgtatattcatatttactatttttagatcattttttgatttatattttttatataagaaaaataaacttgattataaaaattaaatgtttgatcatgctttttttctcctttactccagttgtgagtaaaagatggtataagtgtgaagtttagattcatatatatatatatatatataaaagaaaaatagacttgattataaaaaataaatgtttgatcatgtttttttttctcctttgagtaaaagattgtataagtgtgaagtttagatttatatatatatatatatatatatataaaagaaaaatagacttgattataaaaacaaatatttgatcatgcttttttttttctcctttactttatgtgtgagtaaaaaatattgttatgatttttttccctagaaccattattatgactttatactataaaactatactaataacattaatgattttaaagttaagttaattattttatatatttctctttttttttcttattcaaatactactaactatgacatataaaaatagtaaatatgaatatataatactgtataattatcaaaatttgtgagtttatttaatttattactgatataatattaatatgtagtaatttttaaatacatttattatgaaaattaaaatttgttttcaatttattgaaatagtgtatttttattaaaaagatgtaatttttaattattttaaaataatctttttcatgattttcaacatattaattttaattacgtaattttattgagtaatactacctatgtgtttcttataataaacaagtgatagagtaaaattttttttttttttagtttcttacttagtgtgtgtgaaggaagaaaaaattaaatgagaaagaattggaaaccaaagagtgagaaaaaacactagaagcaaaatttccatgagtacacaaactaacataattggcacaattacagtgttttaaaataactgaaagatgtgattaaacactttaataattgaaaactcagttaaatttttatttataattcttttttaattataattaaaaaatcaattatataatgaagtactattctaatcatgttctgttgtctttcatatgtcgcactactctacttttactcggggcatagcag

SEQ ID NO: 2371 - DNA, 2541 bp, Glycine max
  Intron number 1 from transcript Glyma16g25600.3 (locus Gly ma16g25600) derived from phytozome v7.0 (chr-ID Gm16; pos 29621666 to 29624206 reverse strand)
aaaataggtcaggctctctttctttcttctctctctctctctctctctatactttttttcttcttcttttgtttctgtgaattgctaaataccaattgctccaagatccgtgtttgaaatttgtgctttgcttaattagtatatagtattctcctatttatgtatctcttactcttccaattttctgcaacgtgatttcttgctctttctgcttctagtacttcgtttggttttgtttctattctttaattagtttattctttagttcttaagagctagctgctaaacaaaaaaataaatagataaaatcttttggtgaatgataatatatatgggtggaatctgaattgttttgcttttaattgttgcttgctaagggaagtaacttttttttgtgtatgtctgtgtctggggcattctctaaaagaaaattatggttattgaaggacttgcttgatgttatagcttattatgctttctgcgaatttcaccaattttaccaagatttatcttttgatatatggggttaaaagtttgggtatggtttggtttgttttgtggatctaaaagtggaaggaaattatcatgtagtgtaaaaatataacatcatctcatggataagaacctaggcttaaaggggaaattttgcctttgttttgactagatttagtgaagataaatagatgattttcaaaaaataaataattatatagctgagaggaacatttcattatttcatatatatatatatatatatatatatgtcttgaactgtactgtttccatttcactctgttctgaaaagaataatagattgatccagaaaaactaagagcatcacgatgatgtcaaggtagataggtgataatatagtatataataaaatactggttttaatttgtgccatctaacaaagctgtagccaagaattacaattgcatatattggatttgaattaacctcattaagtgacctaaaacaccattgtcacttgatacataataaccttatattataattctggacacagtagtcaatagtctgctatagcagagaaccggaaaggagtggccctgaactgctgtgagattcagatagtggagtggtactcaatagtagccattgtggccgcaatagtggataaaatagtggctttacgtgtgctatagaggtcctatcacgatataaattttaaaaaccatttttaaccctggaatactgttgctcagggttttcttgggtatatattccacatgttacctctgttctgtcctttgttccttcacactttgaaactttttttttttcttcgtgagttatgttcttcttcctttagacttcctagattgcattctgctaatttctatctaatttgtgttctttttctattaatttcacaaatattttttttttataatttttttgacttcattactgtgttcttattgctcctagattgatggtgattgtgtgtgtaaactgacttattatttatcataaatttctttaatttagggtgttttgttttgttttgattatttgtatgtgcagtatatagtgtttatattttgtattataacatttaaaaattaaaatagaggtcattctggtatttccagagttggctgctatgcatcgctatccaggattgctaatatcatgattctagattcacataactgaaattgcacttacgaatatacacacataaatatataaatatatgcataacagataatgttgtatccttgtgtctattgctttctgctgcattcaaggtaattaatcataggcatctggatgtcagacaaaaatttgaacatgtttatgttgtcttgtctcttttgtgctttctttcatgtaaactggaacagaaattgtcaaatgtattgcatgcaaggatacaatttcattatctcccgtccattagtcaaagtatgattatgcattaaggcctcagtattgcagggaatatattaaagtcttctttttattaaagtaaaaaatgtggaactttgtttcttgaattttgaagttatgcttcctctatagagtttgtagttaaaaagtcattatgtagtatgtactcaagagcataactcaacggctcagctcctcaagtatttttgaagattgcttgagcctaagattgaatccctggcccctaggtcgctagttaatggttgagtccatccaagttatcatcatctatcatcatctcaagttacaagagcatcaatttccaaacatagaaatggctgcttgggtttggttagaggagagaactggtaaataggtggatggaaattaaaaaaaaaaaatccaaatttcatcaattgaagagtagactggtcaccctcttgatgtaaatttcttccatttgtaaaagaaatgcttaattacttgtttctttggtgaatgaagcactcagaataatattttaaactccaattttgcagtagatttggtagttgctgctatttagtccaataagtgtattgccttctaatttatatttttgtattcagtgtgttttctgac

SEQ ID NO: 2372 - DNA, 3411 bp, Glycine max
  Intron number 2 from transcript Glyma02g29150.1 (locus Gly ma02g29150) derived from phytozome v7.0 (chr-ID Gm02; pos 30580353 to 30583763 reverse strand)
tgtcaggtttaaaattattttttaattttagtcttatgcccgcaagttaattgttgatttacaagtttccaacaaagcactattcaggaaaatataaaattaaggataaatagttatttttatctcgaatatatgtttagtgtgcggacaaattcgtccttcaaagatgaatattcaagttttagtcccctaaagtaaaaaaagtgcgagaaatctatccattcattaatttccgtttgttaccgataatgaaagaacctatgatgaatttgtcaaccgtctacacattcaaattaattgttgatttacaagtttccaataaagcactattcacgaaaaaataaaattaattttagtgggtacatgctaatgttgtatagggtgcggtgatatttttcatctttaactgcttagcattaaatagggaaaatgagctattgtgtaaggttgttgtggtgccccttcctctacaatcgtaagctttcagttcagtgtcatgatatgatttagtttggtaacagagaaatggataatggtgtgtttttggggctgcagaactcaatccagagtcttaacaatggctctagaggattttaaaattgtaaaattctgccaattatttatttagcaattcaagtttattttagattatttgtttgtttattttgtttgcagtttttgatgatattttgttgttctaatgtgaaataccgttagctgtcctaaaacttggattgaattatctccatactcaagagaacacttatgaataccttttcccttcttaaaatgtttatctttttcttttataagcagattttttattgagcttttggtacaaggggtactcaaaacagtaggtagagttcgagaggaaagaagtaagaacattaaagtgacaaacagtcagctggattgaagcagcactctgaggaattataatgatatctcccacttctagctaggaaccatgatcaagaatgaaatttgattgcatccaacaactgcagcatatccactgaaccatcttgacacatgttatttcacataagcctaatagatcatattactgcatgctgaagtatcattcatgctttctttaaattttttccccttacaccaacctttgacgttgaagataatgacctaaaccagaagctggaagaacaacagtaattccaattcaagcatagaagacaaaccatatctgaggagaaacaggttaagagaaaactagatgatctgatcgctgcacattaacatgacaaagcacgcacacagcaaaattcagatatgaaattatatttagagctgcccaagtaggcaccctgtcaagcaagacttgccaagaaaaggcaacaacctttaaagagcatcacattttcataatgactgaaaactaaaccatcatattcacttgggggcacacataccaaaccatttgataatgcttgatagtcagatttaacagaaaaaaatatgactataatctggtttccaaatcttgccgtcattctccttattcagctggaccacattaatcaaattgattagttccatctctaattgctattcccactcaaacaaagttcttcacctcaaattttaacaccaactatcatttttccattcccccatttcatctataaaggcatctttatccacagaaaccataaacaatctaggaaaagattgtttaaggctaacagaaccaagccagatacaatgcctgaacttaacttgatcaccacaccttacgactaatatttttagcaatgttttatttttatggaaaaacttaggtgcagttccttagatgctttaggtggtgttctctaattaaaattaaactgtcatcttggtaaactttgctagtaaggtccacgtttaaagtcaacactggtttcttactgctctgtgatatgatttgtttggtctttgttcactatgtttgtagtggaatccatacggctttctagtgcggttaatttagataaagtttgcattgctatgctcctccccaatagtgtgatatcgagaagggcttagtatcattgatttttgtagtttttattttttttaaatatgcactcttttggacatagttctagatccttcccgtgtgtgcattttctcctgattttgttggttgtaagcagtgttgttaaaactggaccagaccggtcagtttgaccggaaatcggtgcctaggctgctccgggtgagttatcggatcggatctgcatctgaaccggatcagcccgtaagacccctccagtttctttatcaaaaccggtgacccagccggatttggtgacccagactggttgagtttgcagatctttttattctctgaaaatgcagcatgtcagttttgtgaaccttcgtttgtgctctcaggcctcagctctcatttctcacaaatctagccctattcccctctttgatctctcatctcaaacccacacaacaccgcgacattttcgctcctgcaaggttgccgcaccgcaccgttttgtgacagtagcacctggattctaaccatctcctctctaaagtcgtccctgtctcagtcttgcatccttcctgtcaccatcgtagaggctgctagaacagcatccagtggtgtccctttctcaatctcacaatatcgcactccctttctgaacttgtctgttaatgggaattgattaacttggattgtctattgaaataaggtttttcagtttttgaattgagtgagttacgaagttaggagttggtggacaggagtaaatctgtaaatgtttcaatttaatttggattgcctattgattgctattttataccaagaagcattggattgacttaattagtgtataaaattaatgcacgagaaaacaccattcttgcttgtaatctctttttttttttttcgatactattcttgcttgtaatctaaatagtcatttgtcaattttctatgaggagattgaggtggcaagttacagcggctactattatgttttgattttagtttctactaagtagtgtttgatttgatcatgctcggtagttttttgctctatttggagctattgaagctctattatttcatttcttattttgtaagaaaataacaataattgttgaactcagatcaacatatataccacacattaaaaggaaaaaaaagaggttctgtaattgactggcaattatcaaaatttatacagcggagaatagtaaatttatagttatatttaattttttaatatgtatatcgggttaaattgggtcaattactgacccactgacccaatgcctagaccggtgaccgggccggttttcacaacactggttgtaagatgttgcatctaaaatgcttttgctttcctttttttttttccttgtcttagagctggaaagaag

SEQ ID NO: 2373 - DNA, 1122 bp, Glycine max
  Intron number 4 from transcript Glyma17g37370.1 (locus Gly ma17g37370) derived from phytozome v7.0 (chr-ID Gm17; pos 41129983 to 41131104 reverse strand)
actctgctggagaagttttcactattttatacgcggttagtatttacaaaaaaataaataattaataaatgttacttattaatttgttattttttattactgagaaggattcgaatccactactcttccttcttcttcttctttttttccctccaaccacctaataatcttataaatctagtatctacaatatttgtgtgggcaaatagtctatatgtaattatgtattaataattcaaccagtaaactcccatattaaaaaccctcctctgcgcaatttagttcaggtttttttaaaagtagaaaattttctcaagatttctatttaaaattggagttttactattaatttagtgtagtggccccataagtggttagagtgaaactccaattcctaacaagaaatgttagtaatattttctttaatttattttttactattgacgaaaatttattagaatttataaatttttgagttataattttattttttttacaaggagtcatagttgttacttaataagtttcgcttgtgatatattaaagttactttaggaattacatattttagtctttaataatcataaaaataagataaataaatgttttttttattaaatcaggattaaaggagggttttgaaaattttaattagcagcttgagcttactcattatttattcaatggttagaataatttcattaaaaaaaatgttttgttaaacacagtcatgatacataaagtgatcagcaaatcagagagtacgtcttcatgtttctagtcatagataaaaaaaaataaaaaattaacacgattcttccatttttaagttaacatggaactgaacaaaagcttatcgttttttctagctagctagttttgttaatgaaaagtttaatttggaaagtgctgtataaaattgcatgggtttgaggcatgacatgatatatagtccaaaagtggttcggaaatcatgttctgcttcaattaataatggtgggaacacatgcatgtattgatagatggtgaaatgagaaaattaaaaactaatgaagttttttttttttttttttatgatatgttgcagggagtggtggcatccggaattgccttcgctgtaca

SEQ ID NO: 2374 - DNA, 1563 bp, Glycine max
  Intron number 1 from transcript Glyma04g40920.1 (locus Gly ma04g40920) derived from phytozome v7.0 (chr-ID Gm04; pos 46830692 to 46832254)
aatctgttgctgttaaaatcatatccaaagctaaggtgagaagtcttgttatgttttttttttttttatgattttgcttttttatgattgtgaagatcgtgtgatgttttttttttttacttggagagttggagatggtgtacgttgactcttggtctcttcaggatcagtttctgactggaatttcatctagcgtgtgattaatgattgactaattgtgtttttttttttggatttggaaactcaattttgcagtctatgtatggtactgattttgcatttgtttcgattttcgtccttgtgtaaacatatgttctgtgcggatatattgatagtgttatggaattggagcctgctgaggtggtggtagttgggcactgaaattccaaatggttttgttggaggtgatcgcggttgctttttggtttaagggattaaactaaatgttgatattgttattttctaagctggtgcttgtaccagaaaggaaaataccatggagacctgttttctagaagaatttatggaattagaaagtatagaatgaaaatcatttcgttatgtcaattggacactttttttaacggagattctggattagagtgacgatgacaaatgattttggctgcaactagtgctttgtcttgatatatctagttggtttcttgggagcgttacaaaagatttttgagaataggtggcacaaatggtggtaagtaatgggacaagtaagcaaaaggtgaagttgcaacatctatagtatgacaagttgctggaacttgtggcttttgcttaagttattttttatgcgtggactatgcgtggactatgacttatctataggtattttacatttgttctatcaatggccattaggttgtggtccaaacagtagaggttcagtggttatagcaccttgttgttaaagcacaaggatagagcaggcagtttgcgcaagacattgttgtcaaagtatcttgcatgtttgatgaaatctgttttatgctccttggtagatcatctataaacatattggtgtttagttgtagatttaaagaatccatattgtgaactggtcgtgtattgtttttcatcctccattatgagccaaattggagatagcagatatgcttaaaaggaaaagaagatgaagaagaaaattaatatcctggagaaaggcaacaaacagaagcttattgactatggatgaatgttataaaaattttccttttagtccaagccctatgggcctcaggtgatgtaaaattttcatttcagttgcttggcctctgatggctgacgtttatgggaagggtatgggcaaaaactgatcccatacttctgcaccttttcattattctatttcttccaaacaatcaaattggatagtaaatattagttggtgtgggagaatcatgtattgtgattttgtggtcatagattccatagtttgttttatgacatccatcaacatgaattaagctttgattttcaagcttttgtcaatctcaccttaaaattcttgcttgagaacaccgtaattaactgatttttgtatggcag

SEQ ID NO: 2375 - DNA, 3406 bp, Glycine max
  Intron number 1 from transcript Glyma13g00490.1 (locus Gly ma13g00490) derived from phytozome v7.0 (chr-ID Gm13; pos 245616 to 249021)
agctaactgggattgcattcggacccacttatcaggtattctcattctcaacttgtttttacatgttgggatgtaggttttgttggctgtgggattaggttttctgttttgtagttagttattcaatgcccttttaatatagtgcatgtgtgagtcttgtctgggttgaaaattgtttagtgagaatgtgcttcaaatggtttgtgagctggttcagcctgcttgatgtggaaatatattcaaatactgtaggcgatttaatagacagccaatggaaggctggtcttttgtttaacacgtaaggactgtctgaagaaaatttgaaaaatgtcttgtgctagaaaaacctgatctccctcccttgttacagactaacagccattaacatcataatctctgatgttagatatctacaataatttgcatgtaaagaaactaaaaagaataaataaaacacaaatgaacatcgctacacctgtacggttgtaggatgaataccagtctagaatagcccttgaagatgctttgtgcttgttctttgtatgttccagatctagatttgaacattgtaggataaggaattgatattatttgctggataatgtggaaaggaaaggcacgtgatgcttaaatgggttcttgaggcagtggtcatagggtagtagaaggcttcaaacttagtgtcccatatttttgtgagcattagaggaaactcatgtctaatagccattagtgtcccacatttttgttacagactaacagccattaacatcataatctctgatgttagatatctaaaataatttgcatgaaaagaaactaaaaagaataaataaaacacaattgaacatcactacacctgtgctgtagtaagatgaatatcagtctagaatagcccttgaagatgctttgtgcttgttctttgtatgttccagatctagatttgaacattgtaggaaaatgaattgatattatttgctggataacgtggaaaggcaaggcatgtgatgcttaaatgggttcttgaggcagtggtcatagggtagtagaaggcttcaaacttagtgtcccacatttttgtgagcattaggaaacccatctctaatagagttctaaatacacagcgccatttgttgatgattttgatttgggggtgacctcttttgatgctccttggttattcctggaagcagctgagtgtcagatactaaattttggctcagttcaagggctatgtgttttggtaattgaaagaagagcagaccttagaaattttggtatgtggaaggataatttaatttcattagcctggaactggaagaaacccaatactcagatatccaagttgtggataatatatattgagaatgctacacttggtaggaggcagaccaatttagtcactaaggcaagtaagtgacaaaaggaattcgaatattaattattctgcagatgtaatcagttatcagatacatttgaccatcaattattctagagaattaggaaattggatatatttgaccatctgtctctgtctaagagattttgttaaaatcaataattaaatttgaggtggagtttccgcttcagttatattatgttgaaaattaatgataagggtatagggtatagttcttaaaataatattgttggcctattccaatggcttaagagacatgggagtggtagttctctaataaatgtatgcaagagaccctccccctacctcctccaattgagtaccagttaattacttttactgtaggtccccttaggagagtgattattgatagctattccttttactataatttccaaatgaatattgggtagggtgggattttcatagatagtcttaagagagtgattttttaaataatgttttcaagcccctttattgaatgagatagcaaaacgcttggccatgttgaaatgagtcaggagtctggagtctggagtcgacatttgttttagttagtctactcagacaccaagaaaccaaaacttgaactatacatgggtgatatgttccgtgccttgtatttaattaaggtaaagagaatagattacatggcaatgttgatcattgaaaaattatgtcaaatcattaaaattcccattacttaacagtgatctattgttagatacttagataccactctctatttgtgatattaaagcaggactttattattattgctctcttactaggaacttgcacagtcatacacttagaatgaatcagcattgtaatttaaatgcataagatgaattcagttggtagttcaagtaaaattaagattactaatgaaggtatgcctttagttagattaaatgagcaaacccaattttggtgtgtacataagcttgacctaggtcatattgtgacatgcattagctgctctcctcacaagccacttaagttatacgtatggaatatatctcgtctttcttccttttatgaggataaaggaagatggagaaaagttgacaatgaatttctctcctttttttatttttataaaaaggatatgtaaatattgaagtgtatgaataacattgttatttgcagaaatcatgggaatttgactgtttacagtttacacacacatttgtacattttattattttataacttcagattttatgtgttttattttgtatgcttgtataacaaaggatactttccaagtaagtgtgggattgcgtcattttcttatgttttagtcaaaggaattatggcataatcttattggattgtttctatactgaattgttggagcttcatcttctgccgtaactaacctgtaaattatcacataaaaattaaatttttttaattacaattgaagtcgagtcctacatcatttagatccccatgttattataagcattcatcacattataattataattgtgcatgttagtgtgccacttagtaacgtgttttttctctctcattattgataaagaatgaaacaaaacttctcattttcttcttgtgttattattatattttaaattttaaaaaattattcaccacttcaccttgttatcattttttttaacagaatgtttgtgaaagaaagccaagaggattttattccatgtgcaccatttttactattgtaggcgcatagaaatacaaaactagtggtgtaatggtaattaaaaaaggttaacttttttttttttcatagccagaatttagaagtttaacgttgtgtcagtatagattcaaatatttcaagaaataggaaatcttggttagttagcagttactatacatcgtacaattgtagtttcctatctactccctaaaagggttgtttccatcatttattttgtatttatttatttttctcttgtagcctgcttcgacaaaggggaagcctacaaagctgca

SEQ ID NO: 2376 - DNA, 2470 bp, Glycine max
  Intron number 1 from transcript Glyma15g15370.2 (locus Gly ma15g15370) derived from phytozome v7.0 (chr-ID Gm15; pos 11792999 to 11795468)
cgttcaatcagtcgctgtggcaggaaattggacgggtgagatttagtttcaaatcttgcttcttctttcttattacgcatatcattaaaaggttttataaaacggtctatcagtaccactgcaattgagattttattgatcacatttgtttctaatttgtcacaatatcaataaacataataaaattcataacgcaaccgtgattgatatttaaaatcttatcatataatcccacatgaacttataacatcatcttttttagcttcgaccttcggttggctaaaaaataattaaaccaaaagcagattccttggttttccttttcggccattcatgataaaactaagcatttatccattcaactttatatccataataataatacattacatattgcatgcatgtctttagaattagaatattgcacgcacacactactagccagggtaataaatggcttttacatcagagtatatataaagtacatatatatatactagtcatcattatctttcatatgctacttttagttaaatgaaatgattttatctttaagaagataaattcccacagctggatttcaatttataaaatctttttgcataattattgtctaataattaatactttcttttgaataaaaaatattactttagtttctttttataaattttgaatctcttcatttttaaccaatgtaattttgcactttaagttttgacacatggtaataatctactcgatcaggtcctcagtcctcattgaaaatgaaaagagtctttttttggtacatgaatgaaaagagtcttaaattaccggggctcaagattttttttttatgatattttctgctatttaattaccgaaatatctgaagaacgacaggaaaaacaatgttgtgtattataaaaaccaataatttagtatttactttccaatcatgtatgctaacaagtctctagctttttttgtttgcctattaccttttttgttatcatccaaataagattgttttgagtggatatatataaaaatgaaggcataagaaaaatattattaaaaatgtggcgctcctcggctactcgccactcactactacctgttttatctggtttacatggttgctgacgaattgtgtcccaacaaccatgtgccttattgcatgcattttcatataaatatatgcaatcttacaataaggtcattttaatggtaaagaaaattatgatagtaacgttgaaaaatctcatactcaaatcgtaagcaactagagggtaaaagaagtccattacgccattgattcaataactacgaaagcaacatcagcctgattagatggtggttttggctgtccttgcctttagtccctcttgacgtcattaaataaatatatgtatctattaagattggaataataattaataacacttttagtggtaattagtagatccttttcatacctaaatcgttatgttcagttaaatagagggaaattttgacaaggttttcccatcaaaattaattatggttagtgaagcatagaaatcaatcatctcaatttgcatgtttgaagttgtttaatgaagcgtaaaattccatcttctccacatcatttattaataatttgtttggtgaataattgagcaaacattataggtgtttgatgttgcccacaccaacgccttgcaaaaccttgcgtcgaactttccaccacgtccttttttttcttttgggtcccggggctatacatgtttgatgcttaattttcatgctcattaagttgcgtttgttgttgtaacaatgagacccagtaatagcctactagccaatcacattagccaaagttgatatcttaatttattattggtgaagtgaagttcttcttttaagataaagtgatcttgaaaaagaaaagaaaaccattcgatattcgttcggatacagacatatagtattagttatacgtcgtgacttttggattccagaaaatgtcaaaaatggggtgttttgtttgtctcttagcgtcaaaaacaacttttattattccggttggtacttcagctaagtgacagagaataaaccaatataaagatttttcttttcagaataagaaaaagttatctatttcaccggaacaattctaacaattaggagacatacattaaaagtaaaaagcaaaactctatataaatatattttcataaaaaagttgaaggaactaaagattcctttctttaaaattataatattccattatatcatcagagacgaattcagttaattgaaaagtatttataaattattataaatccttgatatctgaatttaatttttatggataaaaatatattttattatatgttgtcatgcacgacttattaaatgcttaatgagataaaattcttaataaaattgtattatttcatatacgtacctaattaatcatgcatgtatacgcaggtggtgtctg

SEQ ID NO: 2377 - DNA, 1564 bp, Glycine max
  Intron number 3 from transcript Glyma20g00580.1 (locus Gly ma20g00580) derived from phytozome v7.0 (chr-ID Gm20; pos 334421 to 335984)
ctagagcacttctgtttttgaagtcggttttacaggtaagtttactattgttcatttgtagattgatgcagcattacagaaaaaaattgggatttaacagattgaaattaggttttctttgggatttagaatagaactcagggaattgaatgttcatatgggatatgtgggggaaaggttggtttgaaagtatttggttgagttgttgagggttatgggatgtgagccatgcatgcttgattaggttgtggcaaattcaagcaagaaatgctggggatttgatgtggtgaaaatctaatgctttcttctggggatgagtatggttgttgattaaacttagaaaattagagtcataagatgaaaaaggaaatgtaatcaggcatcttaacttaggttccttagacatcagacccaagagaaaagcatcaccaacctgccaggttccagctagggttttccttccatataaatgtcctcatccactgtttatccttttatagctggttaaacaatttatttaggactagtcagacctggggactgttttatccgatatttgagagaaatgtgtgtattgtgtacaacattcagggttgcctctcacttatatattctaactcggctttatttttagttgatgtgggacttgggtttttcccaacacaccccctcacgcccagcacttcttaggcttggtgcgtgaacaacaatggtaggtgacccttttttttattaatcttgaatatgggacttgggttttttccaatacacaccctcacgccctatcacttcttggactttttggtgcgtgaataacaatggtgggtggccctttggattaatcttgaatatgctcttataccatcttagaatcttaagaatgtgagttttaggcctaactcaaccccaaaagttagctcaaggggtgagggttgtccctcacttatatattctaactcggctttatttttagccgatgtgggacttgggttttttccaacaaatatgtgcatttacattacattgtcatttcactgtaatttcctttagatttttctgttacagagctagttacctgtcagttagtttgttagttgctgaatcagcaatgagtcatacagttcagatatataaggtcaccctatctggtacatttcttctagttaaaaattacagttcagtgttctctctcctctccctctctctaatcctctgaattctattaccataatgcattgagtacagagctaatcaagtactaattaaaaggctaattaactgcaaactattttttaggggggaaatagtcaaggactaattatgattcttggtgtgtgtgtgggtgtgtatgtgtctatgtatatatgtggatagcttatctctattatttaatttgctctattatctattattaatagaaaaattattcatagaaaactcctgtatacttaatatgtcttgtttgttactgctaccacatgagagaactcttgtctggaatgctttcataaatctattttgagccagagtgaaattgtcattccttctaggtatccatatcaac

SEQ ID NO: 2378 - DNA, 9363 bp, Glycine max
  Intron number 2 from transcript Glyma01g33380.2 (locus Gly ma01g33380) derived from phytozome v7.0 (chr-ID Gm01; pos 45444448 to 45453810 reverse strand)
agtttacccaggtgtgtttacattatgtttccattttgcataatgtagtttaatgtttcaactttctatcagttcaaaaagaacggatctctagcagtatagaatgttacaaagtacatgttgttcattatatacatgacaagcattgcaaattctttgtttagtggatggatggacattgcattggattagacatgctgaactcgtagattctaagaattggtgcatttttctatcttcttgcaatggttagtgcaggcttagagagaaaaaaagagagtatattctcttgttaatttattgggtcatacattgtaggatttatggttagaaatagttaaggagagataaccaatctgcataaggagaaaataaatgagcaaatcaagggataagaacagagcaaaacaagaaataagagacagccaacctaacagaaattgaatcagtgttcttagtttttttccccttaactaacaatttttcctaaaaatcctaataattaattcttacccaacttcaaaaccccctcaagctggtgcatagatatcaattgtgcccaacatgcccacaagaagttcaagttttggtcagtgaagaatcctttggtgctaatatttaccacttgttgcatggtgtaaatgccatacaaatagatccataatctatcttctcttttatgaagtgtctctcaatatccaagttgatttcacttagattttgaagtagtgaggaaaaatatcactcacacagcttaactttatttcattcaaataacatgtatatatacacaatgaggagagagacagtttgacaagctttgacaagacaagacacactgctgtcttgtacaacaagataaaacagagaaatctattctaaagatacatataattataacccataattataatactccccttcaagctggagcatataaatcgtatgcaccaagcttggaacatataaactgaatcctaggcccccttaaaggtttagtcaaaatatctactggctgatcattagagttaatgaattcagtgacaatctctttagacaatagcttcttccgaataaagtgacagtcaatctctatgtgcttggtcctctcatggaagactgggtttgaagcaatgtgaagagcagcctgattatcacaatataacttcatttgcaccactttgcaaaaattcaactcttcaagaatttgtttaacccacataagttcacacgtaaccacagccatagatctatattcagcctctgcactagatcgagcaacaacagtttgcttcttgcttttccaagaaataacattccctccaatggagacacaatatccggatgtggatctcctatccgtaggacaaccagcccaatctgcatcacaatacccacatacttgtgtattacctttgtcttcataaagtaatccttgccctggagctctcttaatgtatctaagaatacgcataacagcattccaatgataaacacgaggattttgcataaattggttcaccactccaacaacaaaggaaatatcaggtcttgtaatggtgagataaatgagttttcccacaagtcttctatatctttcggggtcaggatacatttcactttgatctgtcaggagcttcagatttggatccataggaccatcaacaggtctacaattctgcatgcctgtttcctccaaaatgttaggagcgtacttcctctgagaaattacaacaccatctcctgactgagccaccccaataccaaggaagtacttcaaatatcctaggtctttggtctggaaatgactgaataagtgctcctttagctaaacaatcttagtagcatcattccctgtaatcactatatcattaacatatactatcaaataaacacatttccgaggggatgaatgacaataaaaaacaaaatgatcagcctcactacgtttcaacccaaaaagttgaacaatatgactgaatttaccaaaccaagcccgaggggattgcttcaacccatagagagatcgacgcagcttacaaacaagaccatactccccctgagcaacaaacccaggaggttgctccatataaatttcctcttcaaggtcaccataaaggaatgcatttttaatatcaagttgatggaggggctagtgatgcatggcagccatagcaagcaatagacagacagtagcgatcttagctaccggagagaaggtgtcacaataatcaagaccatatatttgagtatagcctttagctactaatcgagccttaagtcgatcaatctcaccattagacccaactttaactgcgtagacccatctacaacccaccgtcttcttgccaggaggaagagggacaagttcccaagtaccactatgttcaagagcctgcatttcatcaatcatagcctgtcgccatccaggatgactaagtgcctcatgaatattagaagggacagaatgtgaagatagagagaaaacaaaggaagaatatgaaggagacatacgatgataactcagaaagttatagataggatgaggattacgagtggatctagtaccttttcggatggcaataggccagtctgaatcagaggaatgagaggtagcaggatccatggcttgaggattgattgaaggaggatgagaatcatgaggagaaaattcaggtactgtagaaccaactatctgtgtcctgcgttgatatgtaagaagaggtggaggagcaactttagtcagatgtggtggagaagatggaacttcactaacattttggtttgaggtatctagaggacaagaagagggaattggaagtacattctggatggaagaagaatggtccatagatggtgagaagaagggtgtgtcttcaaagaaggttacatctgcagacatatagtatctcctcgtagatggataatagcatttgtaacccttttgaagacgagaataacctaaaaagacacacttgattgctcgggcagagagtttgtctaaatcgagagagagatcttgacaaaacaagtacagccaaacactttaggtggaacatggaataaatgatcatgagggaaaatgattgagtgaggaatttgattttcaagggaggatgaaggcattctgttaattaagaaacaagcagtaagcactgcatccccccaatggtgtgtaggaacatgagaggctaacattagtgaacgtgtggtgtcaagaagatgacgatttttccttttagctataccattctgttgtggtgtatggggacaaatggattgatgtaaaatgccttttgaagataaaagagaagaaaaatcatgagagaaatactcttttgcattatcgcttctgaaaatcttaattgttttttcaaattggttttcaatctcattgagaaaggacatgaagataggcaaaagttcagatctgtttttcattaaatagacccaagtacatctagaaaattcatcggtaaaggttacaaaatatcgaaaaccaaaagatgtaacccggcttggtccccaaatatcagaatgaatggtagagaaagttgaattacatctttggacagtttgtggaaatgatgacctaacatgttttcctagttgacaagactcacattctaggactctaagattcttcagaccaggaaccatcattttcagctttggtaaacttggatggcctagacgatcatgtaaaagtttggggtttgaagttgcagaataggaaacagaaaagctggatttcaggtagtaaagtcctcttgactcacgtccttctccaatcactcgacttgtgccatgtttctaaataacacaagaattagaggtaaatgttaccgagcaatttaatgaacgagttaactgactcaatgaaattagattatagggacactgaagaataaacaaaacaaaatccaactttaatgaggaagataaagagacttgaccacttccttgagctgcaactttggaaccattagctacagtaacaagatgatgaatttttggaaaagacatggatgtaaaagaggacttgttaccagaaatatgatcagaggcacctgaatcaagtatccaaggactggaaccgtcaatagattgggaaatacatgctgttgaataacatggtacagaggaagctaaagcttggctgctggatttctcagatttcagcttcaaatactcttggtactcttcatcatagaacttagactctgatttttctgtctgagctaccttggcaactttgtcaggaaagccatgcagggagtagcaattctcttgagtgtgacccatcctcttgtaatatgttcattgaggacgtccacctcttccactgcgacctcctctactgttacggcctccccctttcccatgaggtgcaaccattgctgacgtttccaccgtatcaactggattttcttctttcagcgcatgaggcacacgaagtaacctagtgatgagagagtccattgatgggacttggtctccagcaagaacttgatcacgcacatgatcaaagtcagagtgtagactccttagaatgaagaccatgtaaaacttatccagttttctattcatttcttccaatgagtcagctacaagaaactttttcagctcttccactgcagccctagcctttcctacatgtgcaatcatgtcatggccagtttgtttgagagctgtaaccttcatggttgcatcaaagaggctttgaatatcatttgcaaagatctcttgggcctttttccaaaaggaatgacacgttttgaatgacctaaggatctccagaatatctggctcaactgattgccataacacagcacaaagttgatagtcaagcttctcccacttaagttttctgtcgtttggaacagcatcaactcctttctccaaatggtcatgatgtccttggccaaggaaccaaagctccatagagacagaccaagatagataatttttccagttcagttttgcagtcgtgattgttggggttccagaaaaggagaaaactggtccagaagaagccatttctgatcaacaacggaaacccaacagaacaaaggatagaagaaagcacgtgcaggcacaagagcttgccaaaaccaaaaaccaacgcctgaaacaagcttagaagagaacgaagaagctgccgaaacaagttgggcgagcttccgacgaaaggatggcggcgcgtggactacacgcgccggaaatcgcgaggaatagtgacggcgtgtgacggctccgatggcggcgcgacctgcagggttgggtctcgctttccagggcgattcgaaccctagtttcgccggagagaatggcggcaacgacggcggatggcgaacggaacccactctgatgccaacttagattttgaagtagtgaggaaaaatatcactcacacagcttaactttatttcattcaaataacatgtatatatacacaatgaggagagagacaacttgacaagctttgacaagacaagacacactgctgtcttctacaacaagataaaacagagaaatctattctaaagatacatataattataacaatttccatggctctttattctgtttcagcactgctccttgctaccacgttctgtgttttagctttggtaaccaagttaccccatacaagtgagcaataacctattatagaccttctgtcagtgatagaccctacccagtcaacatttgtgtaggccttgatggtttatactgcggtttcttttttttaggaaaagacatctgcatatgcccttccttctcaagatccgatatactacctttaggtgttcttgatagggtgaatgtgtgaattgacttactaaacttaccccattgcccccgtgccccgtgcctgaggatcctcactatgcgaagatatataggggagggtcattgcatgcaaccttaccctttcatatgcgaagaagctgtttatggattcgaatccatgaccaaaccggtcaccaaagcacaactttactgctgtgccaaggttcaccctcaatattaggcaatgtatgtgacaagtaaatcagttctcctactaatctttgacatgtagaagtgtccacagtcacttttcttgtcatcctttagctttgatatgggtcaataggggtgtccattggtttgcaaccattcatacaagtttctttaaagagataaaggttgtacattttttttagatagaacaatttatttaatttaccttgcaatctctactttaagtgttgagattagagttagatgcaatatttcctatactcgagaaagttttagggattatatttataaagacgaactttttgaataatggggattatgataatgaccaatggcaccatggcaagaaggatccaactcctcttaagtgaacaacttactttaggaaacaaaagtaagtaatctcaaatgttgatgagaaaatcaatggttgatattatgtgcacatgcataacaaataatggatggctggaatatcaaccattgattttttaattgactgatattgcttattgtacatttgtacccttattcactttagaggagccaaacttggcaagaaataatcagacagaagtgatttttgccacgggggaaaaagtaactccatagtcaatactataaacccaaggtatcaccttttgccactagatgtgctttgatatgatcaatttggccattggttccaactttaacagtgtatacctaccaacagccactatgttcatgagtctacatttcgtcaatcatggcttattgctatcctgggtgatcaagtgcctgaagactatgtttaggaatggaaatagatgaatgacatgcaagaatgataacaaggagagagatgatagcttaagaagttataaataggatgaggattctaagtttattgagtaccttttctaagagtagtgagcaaatcaaggtcgtcttcagaaaggtccatagtaggggggtggttgttggaacaagacatgattcatctggtcttgttgtgtcctcgaaggaggtatttggtatctatggacaacactagtatgcatttattggcctctgaggtggctgggatgggggattgctgagacatctaacggcagtatctgtagttgagattggttcctataaaggaaaaagaggtggaccgggaaatacttcatgagaagtgttagaatcaattatggaaggtcagaaatacattttttcttcaaagaatgttaacatctgtagagacatagtaataattgtggacaagaagaacatcggtgtcctttctatattgtggaacaaaaatatatggagcaacatgaagtaatggttctctatgaaataatatggagtgtgggattttattatcaagataggaagaaggtgtttggtttataaaaaataagtagttaaggttgcataatctcaatggcaaacaggtgcatgtgtatgaagtagaagtgtttgggaagtttcaacatggtgtttatttgccatttttctaaggagtaagaggacaagtagattgatggagaattccttgagatgatagagaagaaaaggtagaagaaaaatattctttcggattgtcacttttaaggatttgaattgttttgccaacttaatttcatcaacaaaagaaatgaagatggatatttcagactgttctttcattaggaagagccaagtacaccatcagtattcatcaatacaagtgaaaatatttaaaacccatagaagatacatggcttagaccctatatatctgaatgaataacagaaaaagtgatagacacctggtatccttattacaaaaaaagttcaggtacgaacttcctaattagcagaataaaaatcacacaattctttgacggactgcaccctccaagccaatggcccgaattctcttacaaatgacaagataatctttctcagtagacatcttattttggagcatgtttacagttcaattcaatttaagcagtttggtttaggggaagttcagtttttaaaaactaactacagaacagttcagttcagtttttattcaaaatagttcagtttctttagtgcagttcagtttggttcatttcaatttttttaaatggccctaatttttcctattctcacttcactggttggaggtgtgtgacccatcgaattactgattgaacattttttctcaataatgatgtttgttatgagtattcattgtcctgtgtaccaattctttgttatcacatattatgtcatgtcaggcctgtaaccttgggtaaactgctgaatcagatagctggtgattcttaaaacatgtcactacatatatactttatgctattctcagcaaattgaaacaattgaaaatggagagaactactaaagtctttgtcttctgagaagtgagaagatggaaattaatatattgaatttgatattttgattccatttctttaaaatggtttgaccgactataatgaagaataagaatgtccttggagtgtgatttttctcttgtccctattgtaggttttgtaagcaaatgataatgattgaggataaaaaagtaaactacatatctatctggcttgagctcttatgaatgtgtgcaataaaagaactaaacatgggataaaatcgtaagatatattctcctatagtaacaacaacaaagccttatcctactaggtgaggttagctacatggatcacacaatgccatttgacttgattaaagaccaaagtttcagaggttttatttaccatgaaattcctcttgactacatcctccaatttccttgttctccttttccttttcataggactaaaaaccattcgatctattcttctcactgatgcctcctgtggtctttgtacgtgtctaacccactttaaccgcctcatcctcctatagtaagaagtggaataattggtctttagatatacttgtagttgtagtccacttcatgttaacacaccagtctactactgaaaatttgacttaggttttctgattgtgatctaactttacatgctttaagcaatttcttccaagtgtaatcgcatgtattctgacctaccatagtaccatgatttatttatgtcgtcactttaacatgatatattgtggcttaagccacaccactgttatgctatttttcagttgagaaagcttatataagaactagaaagcttctataaattagaattttagtgtaatgaataagattagatattgatacataaaaaaattctatttctattactctaataagttgactttaaagatgtttacctttaattgttaattctcttcaggaatttagacgtatcaaggggaacataaactcaat

SEQ ID NO: 2379 - DNA, 3059 bp, Glycine max
  Intron number 1 from transcript Glyma11g13580.1 (locus Gly ma11g13580) derived from phytozome v7.0 (chr-ID Gm11; pos 9632661 to 9635719 reverse strand)
cgcccgaagatctcaatctcgaactcatcagatctgtacgcaaatctattttctcaattctcaactttcagttcttgtcgtttttcttcgttagtgtttgtgtttcacgcgcgtgtggtaatggattatgctgagtcagcttcaggtaggtggggtccacgagtggatctaggatacccctacaaccccagcacgctaattttttgaataaataaaaaaagaattgtgaatcggtgtttttttattaaaattttatagattttctatagatttttgcaataaatattttttttttgttttgattccttgtttttaaggacactgcttaaaatacccttaaaaaatattttttccttttctaatttcgtctaactcgctcgcaatcatatcatatcgcaaaagctcatagagttggtgggttggtgccatgtcacgtgatgtgtctcacgtgtttttccctgttttggtttaaactttgatcgatgtggacaatgcggatcgggtggcacttccacataatagctacactgtttttttttttcaaacatacttcaagaaagataaactttcggttttattttagaataaatagttatttttgtatttcaatatatataatgttaataaatttatttttaaaagctgaaaaattaaatttagtttcggaaagtattaaaagtaagataaatctatctcacagtttctgttttttaacgttatcaaactcactagataaaaatatcatgaaattaatatttacatgaacataaaagttaaattaattgaaaaatatgttcttaaatttaacaagttaatgacattttcattcttcaaatatataacttcttgataaatatatctacgaaatatataaacttgattagttaccatcaataataagatacacgtatcaacaactcattaaactttagaagtttatgattttgttattacaaatacttattataatctattataattataattatatttataataatctattataattataattatatttataatgttaacttatcacatatgatacaagacttaagagaagggaagagagaggtaagttatcaaataaaaaaaacaatttattaaatcttaaatgaatcattcacaaataaatgaaaataaacatgggaggtctaacaaccaaaattataatatttttatagtttttccaagctcataagtgtatatcatgtcattaatgtcactaattaaaattatatattttgagaatatatttgtcaataagttgtattttaaaggatgaaaatgttattaaattattaaatgtaaagacatatttatcggtaattttccttgtgtccacatgtcatgacattttcatagttttttaacattaaagaacaaaaattaatagtgagaagaatttgtcatacttttaatattttcaaaaattatttttttttcatctttgaaagattaatttgttcgcaatatacactttgagtgacaaaataactattattctttattttatttcaaaataactattattctttattttatttcaaatttaatcaatcatctaatttctgtacttgtataacctaatctttatgttgtagtctctaaaattgtaggaattaagacgtattaaagagtatatgcataagcattagaacagtatatatgcaggaactaaagtaatttctaagtataaaaagtaaaaaaaaaattatggatatttatcccaattttcttaattttattttaaatcctggtttctcacgcacgcgcctaggtcgagggtgggatgtgggaacagtaacgaagctcttaatgttgccatctactttgactcgtgccagttgtctttcccaggcgccggttgactttatttaagtgatataaaattaattttgatagaattaattgtaaattacttaaaataattgagtagccagtataaattaatattagtaatgaatattacattgaatcatgtatgacgtgggaaagtgattttcgatatataacaaacgcgtctttaatttttgaaaatatttatgggtacggatatgtgtttatagcttttgttttcttagaagttagaagcaaaaagacaaatagttttgttgttttatcattgtgctgcattgttaattatcattttatcatattgtgttgcattatttgtttgttggtctcgtgtgaccaaaataccggggtttttttattattcccattaataacttaaatctggaggatgagaccatcagggttatcagcaaatcatgaatgggagacaattatttgtagttttgttctgagttgcaaatgaaggaccaccgtttatattttacagccttgcaagttgcaagcacgtgcataattaaaaaagtgaataatttgccggccttttgccatgcagggtacggtaatgaaattcatcaacaaagtatttttgtttttaatcaatgtggttgaaattttgaagtactaagaataaccacatcagtatacccaaaaaaaaccacatccataaattactcttgttagtagatttgttgatatatattttattgactttactcattcatccaactaaatattgtacataatttttaaaatgattattatataagttaataaatttatcataaaggacgatttgtgataaattactcttggcagtggatttagtgatattttgttgtgtttaccatgtaaaccaattagaaatcatgttacatatgactattaaaataattaaaagttgacaaatttatataagaagcttaaaagtgatgtaataatagagtataatagttttatactctcaattctaatcacaaattatcgttagtataactgttaaggtaattattgtaaaataaattgattatatatgataatttgtgattgaatgaaaatattaaacgtatatgatttttctctatgataaatgataatttgcgagtgattgcatgatagtgtaaaagtgatttatatattttgttggtgattgaatgtgaaagtgtgaaacttgaatcgtgagcaggcaaaagtattccatt

SEQ ID NO: 2380 - DNA, 1560 bp, Glycine max
  Intron number 5 from transcript Glyma14g09330.1 (locus Gly ma14g09330) derived from phytozome v7.0 (chr-ID Gm14; pos 7377398 to 7378957)
gaaggaaaaacatcaggtattctaaattatccgacaatttcttatacactatatagtataactctgtcctgattccagatgcattcattataagactattctgaattctgcttgtcttccgtatccatggccattgactacccaaggtcagcgacaacaatcataaaactgcccccttgagaaaaaagaaattattaaatgggctgttgcacggtgttctcaatttaattgtcaaatgccaatatgtcttcacacaacaatgtttgtttaactgtaataataggtaatctaatatggaattagaaggtcctgtgtagaataagctaatgaatcctactaccctgatccttaaaagaacttcatatatagcataattcatcatgcttctgatccaaaaaactgcatgtttttttttggatgatatagtttgattgagaaatcaagggaagaaggtaactctatacttgagttttggattcaaactgtggaataaatggatttttgcttgagtaggagtaaaacaaagtatatgcattgtaatttgagcaagaaacaagaagaaaaagaatacttggaagtaaaattgggaaagataccatactataggttttaagtttaaatacctgttatcaatattacaaaatgatggcgaaatcaatgaaaatgtcacacacaagatgtaaactagatgattaagatggaggaaagcattggactttagggttaattgtgatcaaagtacctaccaaacccaaaagaaagtctgtggcaataaatttggaatttgaaggggcaacaagaggaaaaggtggtagatatgaagatgttaagatggacgtatggccacacaagaaaggataggatacaaaatgattataataagaagatattggtgtagcacctggtgacggatccagaaattctaaattgtgggaacaatattcatatatgtgggggcaatagtaatattatagggttttttacagcatttaaattatagggataatttgtaattataaaagtatatgatattaagaagaaaaaaaaaacttgtttgtgcagctgcccccaaacttcaaaaagtagatctgtcctttgtagcaccagttaaggaaaaaagataatagaaaattggttaaagtggtttgaacatgtgcaaagaaagtcattggaagcatcaatgagagtagatcgcatggtatttagccctgctaaaagggggagagggaggtcgtcaagtagggcattggaggaaattgttaggagggatctcatgataaatgatatccctgggaatttggtctttaatggcattgtgcaatccatgtagctaatctcacctaatgggataggacttttgttgttattgtcgtcgtctaaaactcactagtttgttatgtatctgtgctagaatcagttctcaagaattttagcctttcttgatgctggattactgatgtatttgtctgttgctaatgattttcgtattgggtttttgactccaataatgaaaggattgatgatgcattttttggttcaggttcgaacatcagcatcaac

SEQ ID NO: 2381 - DNA, 1596 bp, Glycine max
  Intron number 3 from transcript Glyma05g25380.1 (locus Gly ma05g25380) derived from phytozome v7.0 (chr-ID Gm05; pos 31505231 to 31506826 reverse strand)
aggtttgccagatttaccttctttatatatcttttctgtgagtcaatcttctggcttgccattcaccaagcatgtattgttcttttacggttcttaactgagtaattattgttggcgctacaattctaatgaaaagtcagtggagcatatgttgttttgatgtttacaatgccaagaatatttggtacttttcttgtctgggattatgacgttcgtgacatttaaagagaaatgcaatgaaattaacaggaaatttgtttttaggtgcttgattgaatctattttggaccatatctgatgcagaccagaaatatagatgaacagaaataggaataaacagaggaaaaggaaaggaattgaacatatattattgatgaaataagagaaatagcagtaggggaaacctactacccacagagcctagctcctctctcagcgaatggatgcattctctgcctaacagaaggatacgcacaatcatgaataatcccccctcactcacccccacgtccctctataacagaatacctcaccaaccatcctcactctctttctctcactaccacctcatcattctctctccacactttgggcttatttacttgggccacatcctgcactaggggcctatcaatatcattccactttggttgcactacccttgttataatttaagccttctttaaatgaacgcatgccctagtttggagtttaaacagctagtagggtattcccaatctacttaaaccatagtggtgagtagcttctatttctatatatatttgaagtgtactgctggttataagcctacccagctccagttgtatcaaatttattcatggggtcaggggtgggatcaactccacttaatgtgtaacgatccaggcttaacagcttctgggatatcaaacagttatcctatttagaagggtaaggaaaagaagcagggattgtgatatagagcagaatctaaaatacatgggtttgggttatgcttatatggatttgttgtgtcacaacggaggttaacctaacttataaacaggtcatgctagccttttaggttgagctatatagctattctggatgtgttcaggttgaccattttagtgtcacagccctgttctaacaacaaaaatatactaacttgaacatgttccatttaaatgcctatcaattatttaagtatctaaacagtgcaatttaagtcctatcttttctagcttttactaactatataacatgaattgttacctgttttggttgcttgcttgcttctgaattatgatatcgatggccttacctaatacctgatgtcgatgtctgcccctctttcattctttgtttctctaatttaatttaatttttttcttatgacttgttagagatagcattatcttttatctattttgttgccattggtgtgcccattgcatttattagcctttcttacatttgtctataatttttttcttctttaaattcaatctggaactatttgatgcatgatattttagagaaatgtttaagttctaattttcttatttgttctaaaattcaggttgatcttctggagccagtatcacatttcttaga

SEQ ID NO: 2382 - DNA, 863 bp, Glycine max
  Intron number 1 from transcript Glyma09g31610.1 (locus Gly ma09g31610) derived from phytozome v7.0 (chr-ID Gm09; pos 38289942 to 38290804)
ttcctcttgcacttgctgtctggactactatacaggttctcactcctcaatatgttttttgtccccaatatgtttccacaaaaagttagtactttgtcaaggatcatcttgcctgatcaatttgatttcatgttaaaatgcatttagtattttttgttcttgattcttgttgaattggggtaatttcataattcatctttacttgggagatgtgagttttttttttaaaataaaagttgtagaagggagagataccctaatactacaggacagtgcgctgggagatgtaaagttggtttggtggtaaaggatgaagggagggagggataggtggcctgttcgaattccctcgctaacaaaaactaacagtagccgataaaaaaaaaacaggacagtgcgccaatggcataagctcatttatattaattataaaattataattgtagatgttatcacaacaatctataaatatcttatactcttcatttatattcattatgaaattataataatttttccatatcttcaatttttaaaaattgctgtattttgtacctgtatctgtcacagttatcagtaactttctcaaaaaatatgtttagttaacttcaaattttatgtaaggagtcaaggggtctaacttaattggttgagcagagtgcgtgagctattgtaaaccccttacattatttttgattcctatgaataaaataaaattctatgcaaggaaatctccctgatttgtcatctgagttatgagttattggctattttttggtagtgtactatactactagttaatgttagatgttgccctttcattttcagtacgggagataccaacgcaaactgctcgtggagga

SEQ ID NO: 2383 - DNA, 3745 bp, Glycine max
  Intron number 2 from transcript Glyma10g42320.1 (locus Gly ma10g42320) derived from phytozome v7.0 (chr-ID Gm10; pos 49290661 to 49294405)
ccaggtactcctttctcttccaatttcaaacagaaatgtttccacattttaatatcaaactatttaattactatgaaaaggggatcttgtttcttttgtttttcgtgatgttagatatgcaatttctcgaagtaaaagtggaaggggcattttttattttttattttgtatctgacgttttaattgaatctaactgcgtatcaaaataaatgataattttgtatgatactattttgaagagatccttttctgtgccgttgtggtctctaattaaggattggggcgattgcaaggcctggttttggctgagtctactgcttagcgatttttctttttttaaaaaaaattcatgtgttttctgggtgaagtttttatgataggataggattctgtactatttattttttattttttgtctttctggattgctggttgtgaatcttgtgatctttgagatgctgcagatggaatttttaaaagatgttttaccagaatggtttcttcgtggctgaagctcatttttttcaattttctgataaaatgatagcttgtggtagtaactgtagagctagagctggagatttgtgtggtttggatatgtggaatttggtgcaaggaaggtagttaagccaatatcagtctgacctgtctgctatttggcagagagatttgctgtccttatgattctttaataaaatcattgtagtttggaatgggtatttagctttatgattgggctgacgagtcacaagtggagacagagagagagatagttaataccataaaatggtttttggagttttttttttaatacctgttttgtatggctccacagatttatgccttgattgcatgattaataaactgagaagtacatgacacttgtttgattgagttacacaattcttttgggtaaagaaatttttttcctgtccaaatccaaagtccaaactaaagaagccatgtcttgtctgtaaattggcttccctcttattctagtagtaaatctattacatgatggcaatggttaccagtggcatatataagaaacttattatgctggacattccttcttttgcttctgtctctaatcaattattgtccaatatgattgtaggaaattagaaaaaggacattaacgactgctatctcacatgaagccttttcaatttttgttgtcccttgatattttgatatgctatggaaactgcttatacccgtttctttagttgtagaagcatgggcaacagacgtgccatcttatatactgacaatgcatttggtaaggtgtcatttcttgtggtcctgaaatttggaaagattcagatacttcatacgtaatgcagttcccaaggaagaaagtaatgtactctctgtttttaatggaaatgagaattccccactaactaatattgttcccttcaaagtatagatagaaccatttcaatgggctgtgattgtgtggtgctcagtagaccagctaaagtgatttgttatgtgagttcaagaagtctttcatatttgcatcagttgagcaacccaacttgctgcacctttggcagttttcaatagtttctcatagcaatgtaaagttcaggtgtttggatattgttgtgtctggttgatgtcaacgctcttgtaacatattcttgtaaatacccaaactgcgtatgactctacaccatcaagttctgcatcattacgggtcctgttagtacttaagtgctgcagagctcaaaattttcaatctgaagcattgggatcataggcaattgctgttcagttagtgagttcctctcttctttatgagatactgtgtctcaccagttgatctgcctattatagctaacagtgttgaaggttgaatgaatgcctttgatttagtcattactttcttctactttggaatagagttcattggttggagatgttttctttggttttgaatggccgtgattttgttggtgtgctcttagataaagaatccacagctgcataagaatgattttctgctaaaatgctggtgtgttgttggataagtcagttaagaggcggcagaattacctagagtggtaggcatataattgcagtgtagtcaatgttatgcattcatctcccatgttgctcagtattgttgccacataagattgatttttttttgcatctgatgaggtgaataaatcacagaatgtagctgaattgctcaagaaatgaaagcatgatctccataatggaatgctgtgaatgcctgtcttgcattctgtctttcagaattatggaaaattatttgctggcagagtttttgttatgaagatatatacaatgtgaaactcatcataaaattggggttacgacaaaatgatccggtgactgttgaagtgaaagccctacagttggatttttgtgattattcatctgtggctacatatcgttgtaatgttaattcttctgggtcggaaaataatagttcctaatataagtgcttttttttcaaataagtcagatgctaagagtatgtttgaggaattagattgttaaaggtcattcatgaagtcatgaaccagtatggaacatgctgaaattctagctcagaatgtggaagtaattgttgtaagagatgtttgttgtcaaatatggacttggaattcctctgaatggcttagctatatgaaaaccattctggtgctttatcattgtaacacagaagtaagttgcctgattataagttttgctttttaattaaatgctgtttgtatctagtaaataaaatactaaaacttaacttgcaacacaaaactttcttcagtcatatgtttccatttatttatggataatactttgtccgaactgaatgcccatttcaaatatttttttttttaattctgttcctgtaagaatcattttattgaccatcagcaatttggagtaatgattatgctgcaattgtgtgacttctttcttatgtttttatctatttaagtttgggtggtgggtgatgggttaagccttgttgaattgagaatgacccccagaaatatctgagattattttcagagatggagtctgggcagtaactcacaatattaagaatatatatcaggcaacattaatcaatgatgctcgagtgttgattagaaattgttagatcaacattgtggtcaactaggctccagcttttgtagttgaaatcttgtaaattgatacttttgtgactgttaacaagaaatcattagctacaacagtttcttttaggcccccagtttgtccaagcaatttgtaaagagggcctttttctttttttggctttgtgtgggcggagagttcaccacatgatggtcaatgtgcactttttattctttttgcgacatgagagctattttgacctgtcttttacttgtcttctttttatcctcatcttgtttttatgatgtggttctattttactggttttctaatgaactttgtcagggagtagcttcatatatgctgcagtttcttctactaactatagtagcttggtatttctcatttatttgtgctgacttagctatctatccattgctggtagacattttgtgtgttctcaattaatgagtcttacaataatggctatacagtggtcatttgcatcaaaagaagcattggtattgttcatcctcataaatgcaataaaaaattgttagcattagttgtgtgaattgctattacttagcatgtggttctcaagtggtgcttcctgtagatc

SEQ ID NO: 2384 - DNA, 830 bp, Glycine max
  Intron number 5 from transcript Glyma20g33060.1 (locus Gly ma20g33060) derived from phytozome v7.0 (chr-ID Gm20; pos 41676236 to 41677065)
gctggaggtaatgcaatcttgattgactgatacaatcttaatgcatgtaaaaatattttattctgattatgtgattattttaataaattctgttgtgtatgttattggaatgcctttcttttgacctcctggggctacgtaattcagttataggctagttattatactatttgccaaagtttgacagtcagagtcagagatgctcattgaaataagttacccttaagtagattactatgtgtcacaattgcaggtcaataagatactcgttatatgattattacaatttacagtgcaatacaattctctaacttaatacttctatctattagtatactaattgccacaattccggttgcaaatgagattgtggcactaataattagttcaagtactagtactttttactgcaagtccaagccatactaatactataacaatatcttaaattttttcttcatcaaaattaaacatacaggatatttaatttgtattcgagttttggatggtttatgatttctggtgggcattgccgtatattgttttcattttcctcttttcctgcttaacctcttttttcattcttctatctttatttgttccattagtctatattagttttagttctgtatattagaaggtttgttctgcatcaaataatagacttgccacatgtatgctgcttttgtgcagttagctttgtagttagcattatatgagggtgcaaaaagtagaatattgccaatgcaaagtcagaattattctgttttattattgtcactagagtagttttcgtttcacaatgcaggtcagtgaggtggaaggtgagg

SEQ ID NO: 2385 - DNA, 279 bp, Glycine max
  Intron number 8 from transcript Glyma18g03870.1 (locus Gly ma18g03870) derived from phytozome v7.0 (chr-ID Gm18; pos 2668471 to 2668749 reverse strand)
ttggacagctgggaactggtggtgatcaagctgaggtatgcccttgccatcccttagattttcctctcttgtcattaacttaaaaaaatcaaacataatgatgtgattatattattcaccagtgcactgtaactaccaatatcattattgttgtcacctaaagctccataatgcatgtcatgttcttaggtagttgaattgaagcattctgtgatgttaatttttatcttgaattttgaagcagactataccgaggctcttggattgtccgagcttgga

SEQ ID NO: 2386 - DNA, 4429 bp, Glycine max
  Intron number 1 from transcript Glyma15g18190.1 (locus Gly ma15g18190) derived from phytozome v7.0 (chr-ID Gm15; pos 14815402 to 14819830 reverse strand)
atgtaagtcaactcacattcaccttatctcactttctttttgttcttttgaaaaattaaggtttgatcatataatattttgatcgcatttactctgtcattttttaattgttgcacagtaaaaattctttcatcacttttcctttatttggaactcttatgttaataaagggaaatcacccttaatttttattcatttaaaattattagtgatttttaggatcttatcttaataaagaaaaaaaaggcaaaatattacgtaacattagagatggctaacataatgagtggaaaaagtgtgtgtcgtaataaacaacctaatgcaattggagactagagagagacctgcatgatgatctttaacacaaaatgatcgagagtcaattttttttcctaatttgaattttttgttttattttcaactcataagagatttaaaatcttttccttaattggaaattcacaataataaggtaacatttaaaaatgcagataaaaagtgcaccattctcaatgtcctatggtaaaattagatatgtacgagtgtttaatttattctagtaggcatcataattaagctaatattatataatttaatagatttatcaattttgtattttaaaaagagttattaaatgaagtaattttcaagatttattaatgtttgaactttttttttgttttcctttaaaactaaaaactcggctcattaaacatttttttttatgtaaaagctcttaaaacaattagtttatcttttagaagaaatcctaagataagaagctttcagaaaatctatttgggagagctttttgatgagtttattcatttttttacaccccactttgaatctcgtgtgtttatattttatgttatttttctttttttactttgttgtacaaatgtgaagtttgtctcaaaatttagaatgtatgcatgaagtgtgatctcatatatatgtattttcttaccacgtgtttagattcgtgtccatgtatgaagaaaaaacgcattcatcttaattatgctactctatgttgcttgtgttaacatggataggcaacatgattccaaacatttacttgggagagcttttgatgagtttgtgaagatttttttacacctcactttgaatcttgtgtgcttttattttgcattactattttgttttttaattttattgtacaaatgtaaagttcgtctcaaacttagagtatgcgcgtgaaacatgatctcatatatatatatatatattcttgtcatgtgtttaaactcatgttcatgtatgaagaaacacacattcatcttataatactctatgtgatttttgtgttaatatgaataggcaacacgattccaaacatatatttgggagagcttttgatgggtttgtgtagattttcttacatatcactttaattaattcttgtgtgcctgtgttttgtgttactctatttttttaactttatcgtataaatgtaaagtttgtgtcaaacttaaaatgagcgcatgaaacatgatcttatatatgtaccttcttgacgtgtgtttagactcgtgtccatatacaaatacacatgcattcatcttatgctcatttgtgttaatatatagatgagtgacataatttgaagatcccaaatgaaatgtgttaatatacatagttaatatttttttggtgtataatgcacaatgaccgtaattaagattagaacatataatttcatgtttaccattcaaaccctccaccactaagtaagtctactataacgggttcatgcatatatagctaatatgtaaacagggcatctcagtagtagttaatatacagaaagctcaatctccaattctttttttttcccccaaatgtttatgactgaatactttatcttccaatatatgtacttattatatttgattgtactgaaattcttttttttttattattataacctaaacaacaatatttatgattagtaaacaacaatatagaataacttaaacaacattttatcatttgtagtcaatatttaaatttctttgattgatatatatatatatatatatatatatatatatatatatataattttggaaagaattattaaaatatctatttatatttttttaaaataaagtttgaaatacacaattttaatatttttgtttatttaaataaatttaggtaaactaagttagttttatataatattttttttattctaaatataattttttattacacaaaataactatttctaaataaaattaatttttaatttttttaccaaacaatttttagctgaaaaataacaaacaatttataatttttaaaatcttatttatagttttaatttaaaaataacttttaagtaaaaataaaagttaaacctaacgttaactcctcaaataaatagatctttttgccttcatgcccaaatttcactttataaagttacttggttacagagaaaaataaatacaatttatccatttttcttgtttagttaaatattttttttaaaaaaaaaacagaggggagcgggggattttttcttcagatttagaaaaaagagaaacatgatttataatatttgaactgcgcattaactaactcatcttattaacagcataattaaaaaaaactaactcatcttaagatttttatttcattttcttaatatctatacaaatacaagtattaagtacagtatatatcctttttacttttcctcctctttattttctcttccttctccattttcttttgagaaaattacactcctactctctaaatctttttcaaattacacataaatcactcttttttttctattcctacgctaatccctatttatgtttgaaaatattgcacttacacccgcttatatatgtgttatattaccactccataatatttgaaaatattatacttacattctcttatatattacactaacattccttacaaataaagatagtagaatggttaaaagaagagatgatacagtatttgtataattttacaaaatcttaattaggatgattaatgtaatttattctctcttttttctcctctattaaaatctctttcctgtttgcccatctttaatcaattttcctaacaaattaaacgattttgttgaaaattataacatttagtacattcgtaacattaaataccatgaattccaaactagattttttaatcattgttattaaggcaacgattacaaaaatggaataaggaacattacttagccttttctttttggaaaataaagtgttatctaacagtcttagcgtgagataacactgtattatttataatgcaactacacctaatttgataaaattgtttaagaaatttgttaacatatgaccctttttttattcttaaaaattgaataaacagaaaagtttcgaattcccaaggcaccgtttgtcgttgttttaatttgcatttaagatacatgcaaaaccaaaacttgagttttgagtgcttaattggaactttcaacaggatcagtccagttgtggggtttaggcaatatatataagattttattattatcattaacaatatatattctaatacacacagaaaaaaaatcttgtcaatagcatcggccactgtaaggatttagatcatgcatgcattattccatttctctttttatttattttaatttatttttcaaatctcctatttcgtgtatgaaggagctagtcagctaggtaaactcctgaatcaaattgtttccatataagaattattctgttggaaaatttctttttggatgatctctcagtaattgatcaagctaataagagaaaatcaaaacttgagaattgagtaagagaacaagatgtagaagaaaaacaaactgtaaagaaatgaaaaggaggaagattaaaaaaataagattgaaatagtgattcaaactttgtcattaaaacttgaacaaaaatcagtgtaaacttccactctattagacaagagataaaaagaggaaagagatatataagtataatagataatataatttcatatagagaagaaaaaaaataatgtgtttataaattattactcttatataactaatgaaattatcacaaattgtgtggataaaaaaggtgcgaggttgttttagtttaaacatagatctttagttcaagtcttgaatatatcattatgttaaatatttgaaggaagagttttgtcacatatgatgatcttatctaacttgaataggattactttctctaatggaggataccctcatccatagtgatcctatccggctcgaatatgattgtctcttccaataaaagataactatgattataaaaaaataataataactaatgaagtttttttacatttatcgatgtgaaggttaatattgaagctgcaccagcatcccaga

SEQ ID NO: 2387 - DNA, 1058 bp, Glycine max
  Intron number 3 from transcript Glyma05g08480.1 (locus Gly ma05g08480) derived from phytozome v7.0 (chr-ID Gm05; pos 8360548 to 8361605)
actgccagggttagtcacaatacccagctattcaggtacgacaaatcgtgaatttgcatgacgattaaaatgcctcaccgtgtcatattaaatgtaatgatttgtgtctgtgttcgcgtgatgctgcttttcttttgttttctcctttaatttttatttacgattttttaactagtttttcattagatatttctttcattctaaccctgcatgcaaacctcgctaagaagtgcgcctcttacccttttgtggacctgaacccactatgtgctgttcctaacaaagttttcgtgcatgttagagctatagtaatgctttagtaaagcgaatctttgtagttccttcccatctcaccctggcgtatccttaaatccacgttcttgctttctaggagaaaagtctgggtgtgggttttcatcagagaattaagcaaactattcttaaattttgtgcagactgtttaattttgaagtctaaattatcttatttgattaatagttaataaataaataatattaatggtgttcatattttttctattgataatgaagccttgtttcttatcacatccaattatttataaacaaaatgctagtcaagagaattgaagtgcttatcataatatgcactgcaactgaagaaaaaaactggaaatttagagattgagttgggcatttggaagagattctttggagtttacttgagcttatcgtacaaaaagttaatcaagtgtttggttaagtttatgaggcttgtgacctttctttaagtttcatggtgaagcttgtcagaataagctgtcagttctcgagtgataaggctcttaatttaattcaactgtttgcacaaattcaagccaaatcatagaagacatgggttcatcattgttgcacatattcatgatcaaatagcaaaatgttctcaatattctcattactattttaatttcatgtgtgaaaatgcaataacagcttttatcttctatttgtataactgtttctcttcccctgtgattgatgccaggttttcatttgatcccactcagaaattgggtctgg

SEQ ID NO: 2388 - DNA, 2392 bp, Glycine max
  Intron number 3 from transcript Glyma02g16900.1 (locus Gly ma02g16900) derived from phytozome v7.0 (chr-ID Gm02; pos 15245557 to 15247948)
acttttcctcagtaaaaggtattaattacaatcttgtcatacgtgttaaatgaaaacttaacaaacatcttttatttagagttatgtatggccacatacagtcatatcctttttatttgtgactatatatggccatatacaatggagtgtgtgtgtgtatatgtatgcatggtcatttcaaatttaactactgagaataatttaggatggtccaattttttattataataaaattttaataaatcattattgcaattaaatccttaatgcatttataaacctatgctgagttcaattcactcaagtaattcatcttaaaaacataattcttgtaagtagtatattgtaattcattccttagtgcatttataaacctaatgtgataagttcaattcactcatataattcatcttaaaataattcttataaatagcagattgtaattatttccttaatgcatttctaaacctaatgtgctgagttcaattcttgttttaagtattattattattattattattattattattatttcatactgttgaatttgggtttaaatctaaatcaaatctaaaagcttacttattaggtgaggattacccaagccttttataagttttactttagctatatctatagttgatgtgagatctcaacaaagcatgcctaagattcaacaactcaggtgtggagattgtaggattgatttttttttctccctttattgcatttggaaagccatgcggacaggtagatttttggatagttgaaggtgacctgatattagacctataatagactatgataccaccttgaatttatactggacctaactcaatccaaaaagctaagtcataaggtgaggattgcgtaagcttttataaacctttactttggctatatctatagtcaatttgagatctcaacacatactgtttttatgaatgcttagtctcactagggttatctatagtcaatttgagatctcaacacatactgtttttatgaatgcttagtctcactagggttgactacatttttctttgaatgagctttgtcatcaagattttgtacagcttttatgtatatcaccttatgtagcagacgttttggcttgaaaatgctttgtttctaggagttttatagtttggttatcttgtctttgcatcttttaattgccttgtggttctgtcttcattctttaggagacagaaaaggaatttgttgaagaaagggataaatctcattggaagacaacaagcaatcctcaaaataataaaaataatgtttaattactcatttggtctctatagttataaaaatatttccttttagtctctatacttaaaaacatttactttttgtccctacacataccatttttaatcccatttagtccctatgcatatcttttaagttcctacactaaaagggattgaaaatggtatgtttaggaactaaaagaggatgtttttaattctaaagtatagggactaaaagagaaattttttgtaactatagggagcaaatgggtaattaaacctaaataaaaaagaataagaaatatcatataaaccagacaagaatacagtaaagctccctgaaaacattttggcgtgggatcactaggatcttgctgtgcatcagccactcttgagttcaagcccaactggttcaacctcctcacacacagacatgcatgcacacatgcatggttataaaccctgaaaattgttgactgaacagcaaatggaagccaagtaaacaaccgtatccaaaagctagtttagggaaaggaactttttcctttgtatcagttgttgtttatgtattgatttaacattcttgtttgtatcagtgctaattttagatttatttgcctggactttatttgaccctcctatctgttgcttagagtatcatattttctttttttttcacccaatattttgggcatgatattggggaaggggattgggtacatagaataaccttacttcaatatgttgtggtttgtggaacccttgatatgatttgcttccacctaccaaaatttgaaacagttttgtgtttgtctgcataattttttaatgaggtcttatggaattacgctgaaaattgtgtatttaccttttttggtgcttacttattatggatatgaacttgatttcttaatttatgattggagcttttttgctttttatatctggaaattttttagatgtttcactctggattgaacatcataatagtactgagttacttgttccatttttttttctgttgattttgatctttttttttctgacttcagatatttcccccctcttatgtcatcatatctttcttatctgcagtggagggagagactaaggtattgattgtggcaaca

SEQ ID NO: 2389 - DNA, 7965 bp, Glycine max
  Intron number 23 from transcript Glyma15g19450.1 (locus Gl yma15g19450) derived from phytozome v7.0 (chr-ID Gm15; pos 16748061 to 16756025)
aggaaacagtaagttattatttaattggaattatgaattttgaaaacttatttttctccatcttgcgatggactaattggttatagaacatctgtttgaatttggggtaaatgtctaactgtagcattatcaagtgagttggttgttggttaaaccaatttattgaaagctcatgacagtagaatccaataacaatgtgaaattgttaggaaccaagaattgaaatgagaaagaaaagaaaggattttattgactagtaagaaaagaatagaaaataggagagaaaactctcctccaagggtttctccttcacaaaggatttctcctttcacaaagagctaatgctcaatctacaaatgaacagatctccttctctcctatccttcttcccctatttatatctaataaaatcctccaactaactaactaactcattaacaaactaactatcttaactaacttttcattctccttatatcctaacaatacacccctcctaacaatcaaccttggagcaaatccagaagattgtggcaacgattggggacttggtggaggtggacgatgatgttgaagagcttcggaggttggatagggaaagggtactcatcagaaccccgtggaggcccataatccaacgtacagtgaacgtgcacatcggcagggagctattcaaagtccacatagttgaagaaaatggaaacagcgctgtcaaatacaattgcagattcgggagtggccttgggtcttcggaggaaattgactccgatggcagcgacatcggaactccggcattgaaggtgtacgacgcgtcgggaaaggaagccacgccgaggaggcctaccggcaactcgaatggtggcctctcgacccaggggtacatgccgctacccatcggtccaaatgatagcgagaaaccactgggtagtgaccgcaaacagtgggcatagtgccacactcagcaagcacgcgggtcagagtacttgcatggatatggggtagaacaagccgcgcggtccatggtggtggcagagaatagctctcatgatgatggaccatgcagggcccagaacaagctaggcgactggctcgaagaaatgaccttaacggcacaaacctttcataaaaaaggaagtgttgaagatgatgacatggcagagtcaaacatggtaagagtaaaccaagcacgtgacccagctgtggacagagggggtttcccaaatttagtgggcattactaatagtaccagtgctgaaacaccaaaacagattgggcccagcccattaagtaataaaaagaaaaaaacaggtgcttggctggtgtattcgagaagcagggggtgcaaaaaggaggtggcccaggtttgtgcacacgacatgaggcctggtgtaacttcatcacaaagcttaaacaaccaacaacacactatgaggacctggagaaagaaataatagacaacaatgacaataacactttcgcagaagcagcaacagtgcaaaatgaaaagcaaattgaaaatggggaggcaacatcaaccagtaatggagtcaacatagaccagcacaaagaggcaacatatcaatggaacatggcaaaagaattgggggtcacaactggggcagagcacgacgaagttattgacagaataagggtcatggagaaaagagacaggacagaggcagagagattgggaaataggaatattatcccatgaatattctgtcttacaatgtgagagggttagggagggggtgaaatggacaacaattaggagaatgattaagaaacaccaaatagatctgctatgtatacagaagattaagaaggaacaaattgagaaggcaatatgccaagcactttggggggacccagaagtcagctgggaaatgtaccttgcatcaaatacagcagggggactcctatgtctatggagcgagaaagcattcaaaatggaaaggagggttagtggtaggggttttatattgttggaaggggtgtggatacaggaggctcagaaagttcacatactcaacatttattcaccatgtgacatcaccaacaagagacttttatgggattctattagacagctgaaaaacttaagtcatagagggctctgatgcatattgggagatttcaacagtattagaaacccatcataaataggtgtttgtcagaggggggtgattgataagaatgtcagcgacttcaattggattgcggatttggaagtagaagagataccatgtgtggggagaaaatttacttggctcactaaatggcctggaagcacacaattcactctgcagaggaacttctcggaccactgccccattctactcggatctaaacatgttgactagggacccaaacctttcaggatccttgattgctggattaaggacaagtcattcaaggaaaatgttcaggaatgctggacaagcaatcaccagaggggatggggggatatgtactcaaagagaagataaaatgtctcaaagagaggctgaagatatggaataaggaacaatttggtgacacactcaagaagtttcaaaacattgaggatgatttaaacaaactggaagaacttacaagtgatagacacctatccccccaagaactgatgactcggaaaagattacaggaagatttgtggttagctgcccaatcacatgagtcggtattaagacagaaggccagatcaagatggattagagaaggggactgcaattaacattatttccatttgctgatgagtttgaaccatagaaataatgcagttaaaggaatgatgattgatggtgcctgggtagaggaactgacaagagtcaaagaggcagttcgggtgtttttcttgcaaagatttcaagaactagagcattgcagaccagacctggatggagtcggattccatagcaacaaaacgacatgttagtggggcgattccaagaggatgaaataaggagggctatatgggactgtggaagcgagaaaagcccaggctctgatggacaaaatttcaagttcatcaaggagttttggcagtttttaaaacctgatgttactcgtttcttggatgaattttatgtcaacggtatcttcccaaagggttttcaatgcatctttcattgccttaatccctaaggtggctaacccacagaatcttaaccagtacaaacctatttcacttataggctgtatgtataagattgtggccaagttgctagcgaaaaggttgaaaaaggtcatgccagacattatagatgaaaggcaatctgcgtttataggtggcagacacttgctgcacagcgtagtcatagccaatgaagcggtggaggaagcaaagagatgtcaaaagccatgcatggtgttcatagtagattatgaaaaggcttatgattctgtctcttagaatttttttttttacatgttacggagactgagcttttgtcctaagtggatacaatggattgagggatgcctcaaatctgcatctgtttcagttttggtgaatggaagcccctcagctgaattcatcccacaaagaggactcaggcaaggagatccactagcgtccctattgtttaatattgttgttgaagctctaatcggtttgatgagagaagctgttgacaagaatatattccgtggattctcagtggggaaaaacaatgtagaagtcaacatcttacaatatgccgatgacactatattcttcggtgaggcaacaatggaaaatgttaaggcaaccaaagccattctgaggagctttgaacttgtatcaagcctcaaaattaattttgcgaagagttgttttggggcaattgggaaaccggatcactggaagaaggaagttgcaacatacatgaactgcagtttgttgtccttaccattcatttatttgggtataccaattgggacaaaccctaggcggtgtgagttgtgggatcctattattaccaaatgtgagagaaagctagcaaagtggaaacaaagacacatctctttcggggggagagtgacccttatacaatcagtcctaacatccattcctatctttttcttttcatttttcaggattcccaattcagtgttggataagcttgttagcattcaatgcagatttctatggggaggtggactcaaacataagaagattgcgtggattaaatgggatataatgtgtcttccaaaagacaaggggggcctaggcatcaaggacatcaagacttttaacatagcattgcttagtaaatggagatgggatctttttcagcatcatggggaattatggacaaggatactggagtctaaatatggtggctggagatgcttggctgaaggaacaagaggcagtaatgattctatttggtggaacagggcactacctttcaaaatgaaacagcttggagagtaggatgtggagataaagccagattctgggaggattgttggactggtgaagtatctttaatgataaaatatcctaggctgtatcgcatttcctgtcagcaaaagcacctcattcagcagctgggcagtcatacagatgcaggctgggaatggagtctcacatggaggagacccttgtttgataatgaagtcgacatggctgaaggtttcttggctgatatagcacggattcaaatacagccacatagaggagatagttgggtgtggaaagctgacccaaatggtcaatactcaacacaaagcgcatataatatactgatgggggaatcaacggatgagaacctagatggagtttttgacgctctatggaaattaaagatcccaaccaaatcatcattttttgcatggagattaattagagaccggctgccaaccaaagtaaacctgcgaagaagacatgtacaggtcaatgacctgctttgcccattctgcaagaacatggaggaggatgcaggccatctgttcttcagctgtaataaaattgcacctctatggtgggaatctttgtcttgggtaaatatctcgggtgccttcccgcaagatccgagacatcattttctgcaacatgggaatgggctggatgcagggattaggatcaataggtggaagtgttggtgggtagcattaacatggactatttggcagcaaaggaacaagatagtgttctcaaatgaggctttcaatggaagtaagttgatggatgatgcagtattcttactctggacttggctaagatttatggagaaagattttgcaatacattttaatcaatggttgagcaacttaagagagggctttgtgaacagcagagggtagctgatagggtctatagactctaggtagtatatttctgatgttcctatgtagatctggtccctttccagactgatccaagtctgcctttagggaccatttttctacataaccacaatgtatctttagtacctctggtacttatatatatatatatatatatatatatatatatatatatatatatatatatatatatatatatatatatatatatatatatatatacttacttttgctgaggaaaaaaaaaaccttgtcttcaaggttggaatttgaaaactggaattacacactgaaatgacacttcctcaagttttccccaattgctggaagacaattgcattcattgtagctcagctgggaatgacccactaccttgcacgcgggttgagtttggtggctctggtggaggtagggatgaaagcaaattctgattaatcttgacctccatgggtgatgcaacaatctctttccaccccttctctataatcatgtcattagctacacctgcatccaagtttagcgatataaatcctgccatccagtttaaactacaagtttctggttggaattgtggaagctggatcccttgcctcatcttcatcaccatgatcttcatctgccttttatgatagcattgtggtgctttcctgccaaaggcttgagatctgccaattaaatcccagaatgagtttggttggcatattatccaattttctgctccttatttatgaattccatttctacaacccatttgggcctaacccattatgtaaaaagttgagcatacttggtagaattccaaaacttccccttcctctttctcatccttcagaactgaatcatttacactaacaagatgtgcctctttggtgtccctccatgggggatcaactgtgaacccgctgaccacttcatgcaaactcaagtctgatggctttgatggtggtggggatgagggtggacttcatattacttgaatcatcatgactgtctctgtacctcccttctgccttggctccatttttgagctgtcatacatagacactacaaaatttaatgctaaaggctcacctaacaagttgacattctaaggttccagcaccattgatgttccaaccaccttcatgaatgatttttgtttcatcataacaatcttttttatggaaatctgaatcttgaaaacaatgaggcttggttgcatcatcagtttcgacttcttgatcaaatctgttattggtttatcaagaattatcttcgcagctcatattcgtcactttattttccttgtgcttctctctctttatcgatggatcgacttcttcctccataaccttttcaatctttttttctcttgccaattttgcttcatcatttttggtttcttctccacgacaaagggtgtggtacttgattaccgaaccttctttgcttctgttttctgatttcaagaactgcaatgggtcactgtcacaatcaaaactgctaccctttaaatcagttcccccttctatgcttctgtcaaatctgggtagttccacctttcttgtccaagaactagcctttgcatcactgcattctgatgcatttccctccatgctatttttgccttgttgagaggcacgggaatcaacttcattcaatatcttgcgcaacctgtgtttcagctttgaagtgttggtcctctctttcaagaactttgtggaaaaatctccctttttttgatgtgggttaccatagaaatctccaaatcttttgatcaaagttgtggaaaatgacccccaatctgaatttggggttttttttctccaaatgtagaaccaatgtgtcgcagcaccctccatgctcatgaatgcatattgcagcttatggaatgaaggaatttcttgtaccttagagaatttttcagccctaacaatccaaccaattgggtctgtccttgtgaacgctggcagctccaccttcttagccaaatttgtgcttcctccatctctaacactggctctccctcgaagatatggccggttggaccaattgttaggaatcaagaattgaaatggcaaagaaaagaaagaattttattgaataggatgggaagaacagaaagtaggagagaatagagagtagagagttgtagaacagagataataggctctgtattactgcaacaagaactacaaagggtttacaaaggagcaatctcttttcacacaaggctgattccttgtcacaacaatgtaaactactcaatacccctaatcaaccttgaaaggcttatttatcctttctctctctaactgtgctaactatattctgtttagacttcctcctatctacaattaaccattctattaccggaccttttggcctttcttcctcctatgtaacattaggaaaggttttgggccaatctgtggttggctttgatcctctctcctaacacaatgtaggaatcattttaacttgtgttgctgtttttagttattcactataatatcgataacaaattttatttccatcttcctctttgtttcatccaataattcaatttgatttgcattcaatctctgaaacttcaattttttttggttacctttcggttggatgaaataatttcctgcttatttttcttgtttaggctgcaccttcctcaagcatagcccgacgaaggca

SEQ ID NO: 2390 - DNA, 1712 bp, Glycine max
  Intron number 1 from transcript Glyma06g07210.3 (locus Gly ma06g07210) derived from phytozome v7.0 (chr-ID Gm06; pos 5249181 to 5250892 reverse strand)
gggtaacttatttgttctctctctctctctctttgtttcattggtcccagaaaataaaaaattaaaaaagattgaatttttcacatcaatatgcttgtatgttcttcccaatttgactaaaccttaaggagatccctttaatagatatgtagtttgctcagattcctgggtgaattgggatgtaagattttatatacttttctaattctatgaaactaaagtttgatgtttttatactgttttgcctcttctgggtaatttagttttaagatctttctctttagtttttagtaattgtttaaattatatatgggaatctttctttgtacttgcttgctttctaagcaagtgtgagatctggtgatcagggaaaattgatggggctttacagtttgctactctttccttgtattcttctgaagctggtaatatgaaacatagaatttcactgcccctatagggtttcatagtattttaggtgctgcttgttaactcaattgagaagatgctccgcaaagaaagctgttgttcatttttactgttttcccatgcttgctttggtccttctgctttctgcaatggaacagataaggccccaatttctgggaccttttcagtgtaaggagaaattatttcattatttaatttcagcaaatttattgttgctcaaattgcagacatcttcttaccattttataagttgtatctttctgctaaatatcacggattttggtagataaaatagaaataaaagacaaagaagttgtttctgagcatctcctaaggttttaaatgtgaacctgatgttatattcctggcctcttaccttaatcctgggttggtttcttgttctatctttgcttattgattctaacttaattgatagccccttgattattctctcttgctgtccatgtgaattttttgttcattccaacatatagcaggtccctttatcattttccacattttttatcctaaaatgctgtagcgagaggttgtttctttttatctatatgtgcaggaaatagttatcatagatagtttataatttaaaacaaatttataaaaagaactgctgatttaattaaatgagtcagttaatgaatacctggaaactagtaggcattgactatatagtctgtaaacagaaaaactgaaatacaaaacctgttcttataatgcaaaggagaaagacacacaagttataagaggaagttcatatttgttcagtatgctagttgacctgagaaagcctccaacataaaatatcataccataataatttataagtgaatataccctcaaattaggcggagatataaggttggcttggtgattgaagggagaaagggagagagagaggttgcatgttcgaatccctcccactaacattctaacaaaatctaacaattaacatttgtcgatccaaaaaaaagaacctcaaattaggctgctgcattctctctgttttactttacctcaaaggtatatgtattgattaggtctaatgagaactaaaatacagtaaatggagtgaacccctaatgctaggttgtattgttcaacttgatttttaactggttcctgcaactctttttcacaacatcgtcttcttttaatccaagcttgtaggataattatagctaataattagtgttaatcaagcttgtggttaaacctgctttgtaacagagcagaggttgtctggg

SEQ ID NO: 2391 - DNA, 1744 bp, Glycine max
  Intron number 2 from transcript Glyma10g40130.1 (locus Gly ma10g40130) derived from phytozome v7.0 (chr-ID Gm10; pos 47629045 to 47630788 reverse strand)
gtaaaaaatattctaggtaatttcaaattttgtggttctcatttctcagtacatgtatttggaactgttttgctttttgagttttctcagagtaatttcacattctcacccccttagaagtcatagaccaatttcattttcttgtgattttggcagagaaagaggtacgggaccacataatttttatttttagtaatattttcctacatcgatagtattttaaaataaaaaaataatgcttctaagagtatctccaataaaagtattttcatgtacttttaacgatcttaaccttttttttttcttttgagtagatgatatgatgttatttatataaataataattatttaataaatttttatcataaataatatttttaatttttatatgatctgtaaaattaaattaattatttatttaaacaattttaaacattaaagtaaattttatgtaaaatatttaaatttatgtgtgaaattgaaagactcataaaattataataaataacgtatttaaataactatgcatgtatagataaatgctctaagataatgaatgtatgcattaattaatttataaatatatatttaattttttgttgggtttatcatttgaatgttttgaaaactggaatagtctttgtgaccagcaatacatttacagtttcaactttcaagtttcaaggtctaccaaaagctaaaatttgacagaattaaatgttctgaacctgactgaatactgtatttaatacttatcttatttagataaacttcttcgtaacatttataaaattaatttatcttataaaacaaaattaatttatacactttattttttatagaaactctctcacttaaattctcagaaaatagaatgcataaattgattttaacctataaaacaaatttattttattttactagtgtttaaaagtaaatttatgtaaataagacttaaatactttgtgttgtaccaatatttataaatacacataaaatataaatttaaaatacaagcatttgaaaccttttttttaataattaataactatttttaatgataatttatcaatatcttacagtagtactacttaatatatttttttgtcttgtagtttttctctttctatttttttcaaatatgtaattttaatttttttattttttaataaaaatattttaactcttatttttttaaaaatcataattttaatcattttaatttttaattaagatattttattctttcacttttaaaaacctactattttgatttctaggtaaattttagacttaactgagtattttttaattatttttttaatcaattaaacttattagtaattaaataattttaaatatgtttattatatagataataaataaatacgtgatagtgaacatttatataatatataaattaacatttgaaatttgtcatgggaactaaaattatatatttttaaaaataaaatatcttaattaaaaattgaagaactaaaattagtaaattttaaaaagataagagatgaaattattcaattaaaaatatatgaaaggattaaaattatagctttgagaagatgaaagatcaaaaattatattttagtctatttttttataaaatatttttttttcagttggtcattttcttttgaagttgattgttgcattaatggattgcaatctttgagtatgcttgtttccaggaggacgtaaatacctgttttgtggattggcccag

SEQ ID NO: 2392 - DNA, 1096 bp, Glycine max
  Intron number 3 from transcript Glyma11g19500.1 (locus Gly ma11g19500) derived from phytozome v7.0 (chr-ID Gm11; pos 16243810 to 16244905)
ctggcgctctctttgtcctcaaatccgaaggtattcatcatttatgcccttcttaaagtctctttgttcttctgtttagtcttttatgaaacattatttagagccatagcccataggattcttgtccttgtttctttctttttctcccacctttccttcttcagaatatgttgcacaaaaagtgttggtccttccataacctttgtgatttcataaacaaaactataaaaagaaaatggcaagttttcttcccctaaaccaacaccaaacacctctagtctaccagtaccaccaccataattatagaaaggaatatgatgagcatcatattttatcaaggaaaatgattggtgacatccaaaatgttattcaatacctagtacgagagttaaaaaaaaaataagagaaaaatataagtacaattgaatcatagtctcttaccataaaaatagctgcatgcaaaaaattgttagttacatgcttaattaaagataaataaatcttaattcaaagaaattataataaaatttatgatatgataaaaaaaagtaaaaaaaatgaaaaatattaatgaaatctttaaatataataaaatattcattttttataacaataaaatattcttgtattattattcttttattgatattatatgatatgattaataaataattttatttattaaaactttaattttgaatttgatattcaagtttgcgtaaaaaaatacatatattggattgattttttaaatttaaataaattttaacatcacaaaaaattagtcatttaacttttttggtagatgaatatactgaaaattgaaagaagaagaaaattataagtgggagtttaatcattactaactggctttcagcgatttcatgatttcatcatataaaaatcatttccttgttgattgttctcccagccgactttgatgaaggaaaaatttgatgcaatcgtgtcttccttgactgtcttgttttaataattggagcacatggatgtacaacaagcaattaagacaagaaaatattctacacacaatggaattttatatgatattaatacgtgcgattttgtaggttcttgg

SEQ ID NO: 2393 - DNA, 9215 bp, Glycine max
  Intron number 1 from transcript Glyma19g22790.1 (locus Gly ma19g22790) derived from phytozome v7.0 (chr-ID Gm19; pos 27983833 to 27993047 reverse strand)
caaagaacagaggcaaaaccaaaggtaagttgagcgaaaaacatagttcaattgttcttagttttgattttcactttcataaataggaaattaattatgtgtgcattctgcaagaccagtgcattgaatcttcatgaatgtggtgaaaatcattgggtaatggtatcagcaacgtagcttaacattttaaataatataacatttggaatttattacaaatttataagctgcatctcggttgatagtgtattaaatgaaaatagaaaggaaaattgacaatttaactcctttcaacattatcaatctgtatttgaaatcttacgtgatagttatgtgtatgaattctattaactactatgaaagaaactatgaagtatttttaggtagaaattatgtactcataaaaaagttagaaattctatatatagggtggaagaaataaattatacataaacaatggattcccatagggtggaagaaataaaggaatactatgaatgctataactaatgaaagagcaccctaaagttttctagggagacatttacttcaagattataaagataatcacgtataaaactgaatgatgtgaggtaaaaagtcaacaagaaaataaactcaggatttatagtagagatgagaaagttacattcgacgggcattattaaaaggaaatgcattagtaaaagaacttaaaatagcccttacatttaaaaagatgaaagattttcaagttttggaattttgatgacatgtctgaagatgccaggtagaagtaccattaaggagaataaatccaatggaggacaatctttttactagatgttaagggaggttgagaaactattttaattattattgttgtactaacgagtcaatgattgacatcttgattttggggaaagaaagtgtaattttgtcatatttacttgtcatttagtcaatatatacgttatacatttgacaatcttgcttgacatttgacttaacaaaagatgattgttaaaataataatttaattagaatatatatatatatatatatatatatatatatatatatatatatatatatattaattattttatgtattcaagataagtaaggatttagaaaggacaaaaacatacaaaactattaggaaagatctactggagaataatgatatttttatagacatgatttaacaaaggtcgaataaactacataaaaaaattagaaaggatttagaggataattatgtctgatgtaatttataataataattggttttaaagaccgatgatgatcaattcaacccgtcaaatcagaaatcaacccgatgacatagtaacacaaaaataaccccttcttggaatcagtcaaatcggttttttatacgtattttaaatgttaagaacctataaaataatgttctattttagtgtttagcagtggaaaattatgatattatatttattgaataatattatatttatttgtttatttatttatttattattattattattattattattattattattattattattattattattattattattattattataccaattcaatcattattgaataattaaatcttgaactagtattttttatcaggtttaatgaccagttcagttttaaaaatgtttattaatttgtgcatttaactttacctaaagagaaattttttaattattcttgttgtcaactaacgaatcattgatactaagattttgagatggaatgaaaaaaaatccctttttacttttgatgaatacataattagacatttgacaacctcaattgctagtgatagttggattaatgagattgttagaataatctatatctagaactataatgcatacattattgaatcaaataatgaacatataaatatgattaatgaagcacaaataatatattaagatgaatatgattgttaattattaactacacaatgaaaaactaaaagttgattttcaaaagataggtgttaacaattgaaaagagtacacacaaaaaataccattgaaaagatgagagaaatctaaattaataaaaaaaaaactaagaaaaaaaatgtaaaccgtacttttgattttattaatttttcaaaataaattaattacaatataaaacaatcttttttttatagtttcttaacaagaaaatatattaacatttaaatgtttatttaactatcaatcctgtttcaaatagtacatacaagcttgatttttttaaaggaaaaatatcatttaaattttgtgtatgaaaaaataatccgaaaatctttgaaatatttacagttcaaataaaattacattccataaaatgatattttatgtaactaaaacatataagtaatatatttagatataaatatacaagtactcattcaagtgagtgagaacaatttgttatcccattaagattagatctaatatgttttatgactgtacaattatggatacaatacctcatccattgtcaatctaattatgattatttctctttgtattgttcaaaatttgtatctttgcgaatgtgttatgtccttcaaaattattgatatattcccttccattttaactaatctctaacaatagcacacccaattgaaactttatgttttgaaaaattatttgaaaacaaagaatgataaattgttaaacaaaaaatatgatgacatattaataacaacgacagtcttataatttactaggtgatgtaagctatatatatatatcgtatgatattattaggtttagttgaaaattaagtttcaaaattatattcactatgagatatttttaatagttttctccaatatctttctttactccttgaataactaaaagttaggcaatctatttttttttttttttacttgtgtctccaatgtctttctttgcacattttcaaagctttataaccatttttctttatcttttccgtgatagctaggtgttgcattatcaatatatcttctaagcagtaaatgcgttatggaaaagaataatatactaggttttaaggactcaatttgtaaatgtgttaacaaatctctagatttcccaaatgtgcttttctcgaagcattgcggaacggtgctttattaaaaataaaaataaaagcattcaatttcttgcaaatacaaaagttgtctcaaagctaagaggataacatgtactaataaagaaatgagaataaagggtttattgtgatgataataaatctccatcttctcacaatcctattgccattttatatccttttatttctatttcaaattcatatatatatatatatatatatatatatatatatatatatatatatatatatatatatgcaattagaagatattgaccaagatgagagaaaaagtgagttaaaaaatatgggagttgcgtaaagagtttggtatcgtgaagggataataaaaattaatagtcaacaagctttaaaaaatggaagaaatagatcaagttaccatgacattataagataaccaaagaagttaaataatgcaagttttgttttttttttttttaatgcgaggggtcatggtagaatgccaaagaaagataaaatttgttctataattgtctatgaaaaggaggattcatgactgttataagaaactaagacaacccactttgatcagaaactaaatgatttattatggggacatcagccttgctcttcggtctttaagcctattgatggttcttttgaatgtctaattctttcttggaatgttaagagtaagatatatttctcattctttagtgatgaatttctcgatgcatgtttgagttgagagcatatcccattaccctgttttatcgtaaatgtatattcattcatcttctttattgttggaaactgaaaattgtcgaaggatctaatgttgtcttagagaggatttagtggacactaatgatgtgttagaagggaatttaatacattaatatttagtgatgagacaaaagatgtaagtaatgttatcaaattcaaaacaatcattgatttagatggaatattggatcattagttaaatcagtagattactagttaacttacgatcattgatatatataaaaaaattataaaaatatataacttacaaatttatactataaaaattataaaaaaatcaatatatatatatatatatatatatatatatatatatatatatatatatatatataatggtatgcttagaacattttattttagaataattatcacgtatgaaattagtaaaatattttattttaataaaaaactatctgatatttaattaagtttgttttgtaaataatatttagagtttattatttttttattccttgaactttttaaaattttaatttttatgccctgaaacttttttcatccttccttttagtctcttagaaggattaaaagaaaagaaggaaaaaaaattaaaagattaaatgtaaggatggaaaaaaaaagttaagcagttaaaaacaaaaaaaaacatttcatgaacttaaaacaaaaattcaaaaaagttcaggcaaattttgtgggcttggaagtttagagatgggtgatactaggggcactcaacattattactggtacacccagcacttaagcagaaaatacctaaatacctctggcaatttttaaaaaaatttatacacccagcagtacaaatttcttccattcctgttagtcttcttcttccttccgtgacctcagttcttcttcttcttccttctgcgcgtggttcttgcttctgcgacctcgactgggctttgcacgttcttgcttctgacggcgtggttgttgcttcttcaccattgttggtggcgtggtggtggtgctcttcatcttgcgcgttcttcttctggttatgttgctccatcgatgtcgaggtaagcgccttctcccttttgcgttcgtgcttccatttctggttttgtagtgtacttcgtaggatagtattgatccgcatagggatttaggtcttctgtagttggtataggttaggactaagatgattcactgtaagaaatagttgatccgcaagaatcaattttaattttaaaaagtgggaattaggttttaatgtatgaaaaatgattttaattagggtttagggttacttttcaggcttttaggctgaagtatgatattatataatgcttgtttaagatattggtttgaaatttggttttgaggctttttggtttgtattgtataatgtatgatattgtataatgcttgcttaatatattttgattggtgtgaatttatattttgaaggtttctgtggtttattactttatttatatcttgtatgctagtgaataacaaattgaaaatagaaacacaaactattaatttgtagcactactttgaacacaaactattctgtgtttgaagcccttaaatttagtcactcattagaatcccaaaagcatgctaaaaaagattagaaccttataaactctcatgagttatgcagttagagcatgttgcctttatgctgtaatcattcaactgttttattttcaaaagcttagatatctccatccagatcacttcccaaacactcatttggatgaggtttgatataaaaaattagttactggtgttagtagataacaacaaaagtcttatctaggtgagtttaagtaacaaccaatttcaaaactctatttagataagatgtaattgtatgtgtgatttcatactcatagttgcttaagtaacatactcaatgttttgctaccgtaaatgtttgcgacatcattgaaaggcagatggagtgcaatcatgaccacattttttagtcacttaagaactatatcataaccccaccatgtttttcattcattctccttgcattttacacgttcaatcaaataccttaattatgagtggattgtgttctcttctgctttttataaggacatacatggttgtctgtagaagttttttgttgattcattggtccctagccacgagtttttggacttatttatcgttttaatgatgttgtacatggccagtgtttgtggtttgcgacacatggtcaacccaaattaatcttcttcaccctcaaaccaatcacacttaaacatcagaaacttgaagacatgtataaggtttttttgaagacatgtccaacaacatgtataagaagcctcttgtataaatcaaaaacaccaaattacatgcattgactaacttcactgcatcagggtgacaccaaaagatatcacaaaccacgtattcatcctttaatctgtgccaatgaatatattgatcccgttcaagaagcttcattagatgttgcatttcagtatcacttcctcttatggaagaacgatatgtacttcttgcattgtatatttgtttgatggtcgtacaactattgatattgtgttccttcagagttagcataatgcttataggaatcaagttgatccgtataagccttgcagatcaagttgatccgtaaggcttatacggatcaacttgatccgtatgcttaatatcaacatacagatcaacttgatccataccagccttacggatcaacttgattcgtatgctctacgggatcagcccacttataaacacccagcagagatgcaaaaatgcgtacctcgtacctcgtttgccattgacgtcgaacaaaccaccgcaacaatgaacaccgacaccttcaccttcaccgaaagctcacctagcgcaagaaaatatctcacggaagagagaaatgcaagaaaaaaaagctctgcagcgaaaatcactgtgcacccaactttttaaagaagaagatataggaatgggcatttctgacattttcaaaaagtgttgggtgcacctaacatctcccttcagagatgtgttgtgctgcatgttgtcttatctaaaaaaaaaaactggcaacacaacccataagattcaaacctatgccctcaaactctagtagttgagcactaaccactaatctacaaggttctattagtaactacaagaagattatatatataaatataaaatatgtatatatatatatatatatatatatatatatatatcaataaatataaatataaaaatttattacattcttattataattttattgtttaatacttgttagcactacatgctaatgagtaattttatctattttttttagaacttcttggatgaatgttaatgaatttgaacttaaaaaatggacttgtggaattatattaatttgtgatgtgctttttgcttttattaaggtagggtataattttatttatatatagactgagtcatacaagtcaattagtgattaggggtggcaaagtggacggaccaatccagtccattgggccaaaaaagaaaaataggttagtcaggtaactcatattctatatggacctctttttttgaattccaaccgtggtccatttgggtgacctatattagctcattttactcttttttgtttaaatttatacaaattcaaaaggagagaaaatattgggccaaaaaaggccagttgaatatgagcttatatttcttgagtccatcctagcccgttgggtgcatcgggcttgcccaagtagacctactatattttagtcaacattttctcaatccaactcagcttgactgggcatgccaatgggtcggcatggctagctaggttcattttgcaagttctattagtgacccactggttcgactaatgatccagtgccttggtcgtatcaatcactcgttcgatttttagaacactaagtttaagtattaaaaagataatttatcctaatatttatttaagtagtccaatatattataaataaatgataaataaattataaagatttgggccaatataaaataacttgtgacaataactctaaacaaaaatacaaaataaatttcttgggcttggtgatacatcaacccatttaacatatgaaaacctcaatagaaaaggttacaattgaaaaggtaaaaaaattatgcagccgtcacacaggaagaagcttgatcatgaaaaccaagtgacgcactctctccttgatacatctccgatctaacacgttgcttgaattggccctatgtatgggttctggtctgactggccttattggctagtttgagccgattttaataactctggctgtgaggtttattaaagaattttaagaatttcatgagttcaaacagttcattttttacatgaagcttatagatgatccattgattggtaaaaaataatcatgattctttgtaaatagatatacaatgtatattatatagctagatttcttatggctgaagaaattatgtttgaatcgaaaataataaccgaatggatagagaatagagacatctcatatcattgtccagtatttcttaaatacaataattaaattgggacctaagtcacataggatcaataacggttaattgtctcatccatatttcaaaacctttggatctacatgtttgagaggataagaggtagaaagttggaaattattcactttttaagagaaactcaaacaaatatgtatatataggaaaaaaaagtttacacacactaggtagaatttactaataaaagataacaaagatctcatttcaaaacaaacttgttgaacaactttctttcggttttttgattttacacgtctaagaaggtacctttagaaaaatttatactgaagttttcttttggttttgtaattttacaagtcatagattaagcacaacttgtagaaggccaatttgaaactttatttatcaaagaataaaatgaatgatcttcaatgtatgtatataaatttggaagaaaactagatatgtagaaagccagggttaaaatatgatacaccaggattgcttatctgtgtgtaacttaacaaaatcttaacatcaatgatatatggacacctcaacaatataactataaaaactcatttgacacttttcatttttctccatcttcatttttttgttacatcatattacctattacattatcatttctccctattctgtctttctcactcatggtggtgactagcttttggtatacatatatcggttgaagataggagcacaagatgtttacaatttttgacaagatttgattttttttttcccgtgtgtagaaccacttcaggaaacattgttagaatcta

SEQ ID NO: 2394 - DNA, 5394 bp, Glycine max
  Intron number 5 from transcript Glyma13g26190.1 (locus Gly ma13g26190) derived from phytozome v7.0 (chr-ID Gm13; pos 29393233 to 29398626)
ctgcaggtttgttgctttgtacttaaattttggctttcccattgaatggagttttctattgttagctttctatgatgtatgacatgaggtttatacgtggctctgcttgaactagttgcagagacaaaccaagtacatgatagatttgtctttttttgttcctgcttcaaggaaaggattattgatattgattgttattgtaaatgaataaagatgtgttgcagtatcatttttccctagtttttattgttttttctgtatataaagaggatgttagtatgaaatgtgaatgttttattttctacatgtctgttggttggagtgcagaaatagttgtgggtggatgcaattatagatgcaagtggcagaaaaagacttacatttaagtatccacaatttatttttcaaatgtactgttaagtttgccattttaatttgtgagctgtttattgtaggaatgagtgtaaatattttttattctgtggtaaaaataaagagcactaagggccttttttacctgtgaacttttcatgaatttagtgtcatgaaacttgaagaattttaagcgtagtatgtagtatgtgtgctaggttgtttgtaggtaagtgtttggcttaatatttagttttagacatttagtgaaagcttattaattttggtgtgaatttttcatgaatttattgttacaaaactcagaagaattttaagtataaaattttgttctatccgtgctaggtagtttgtagggaagtttttggcttaaagtttagtttcagtgaaagcttattaatttctgtgcattcacaatgcaaagcagtgaggtcaaactaatatctgtgactgtgcaagttttgatttttcagtacttaactcttttctttcttacaggccagcctttgtattatttaagtagcaacatttgtttgtgattcacagaaatgaaatcccaacaaagaaaaaaattcagtatcattatacgttatcctcttttaaacacagaaaaatgtaaacaaaacagcaatattaatactatagaggactctgattcatctacatgtctaccaaggaaactccatgatagaagccatatgctctgtgccaaataaagttacaaaagtactgctctcttagaaaattatatattggtccccaaagacgaaagagcagcataagtttcccactgctgcaaagctttaaacttgctatttgtttttgcatttttatcctccagccttacaaaagtactgctctcttagaaacttatatattggtccccaaagatgaaagagcagcataagtttcccactgctgcaaagctttaaacttgctgtttgtttttgcatttttatcctccagcctttcaagctttattttagacatgattctaaattctgtaatattaacatgttttccctttattcaacttgagtgtgtttgaatcaatgttgttaatggcggatggcggttcatggcggaaagtcaaaaatccgccataaaaatatggcggatggcgtagcggaaaatggcggatgtcatggcggacacaaaaaaaaaaaaaacatatatataaactcattgaaattgaaaaaaacaaaggattgcattcaaataaactaaaaaagtttcatgagttcatacaataatcaagtaccaacaccaaataaactcattaaagagttcaaaataagaaaatgataaaaacataatgcaaagtgcaaagtgaaggttgaggctctaatcatcttctccaatcccaacataatcatcttcgttgttatcatatggtaatggagcatctccctctccctcttccccatcagacgcctcaaaattgaccatgatttcttcttcttcagattcaacatcaatattctcctcaacatctagatcctcatcattttcttggactgctttttgcttccttgatgaagatccaacaaccattgcctgttttttagaagtttgggcagcagcaacacttgttttttgctttttccgcctagtatacatcctacactctccaacccccgaagcctgatacacagttgcccaatttagagcatcatcatcttcaaataccaaatcatttccagcatcattatcatcatcttgatccatctctcccacgagccattcattgcatacatcaatatcattaagagaaattggatcaatttcatctcttgcattatatctttgcttcaattgttggttgtatttgacaaacaccaaatcatgcaacctcttgtgctcaagcctatttctttttttggaatgaatctacaacataacaaataaatgttgatttcaatctcaaatatactccaaatataacttgatcatcaaaattaaataaaattaaaaagtatagttagagttttgtcacaattacttgctcaaacacactccaatttctttcacatcctgaagcactgcaagtcaaactcaaaatcttaatagccagcttctgcaaatttggagtttgtgacccaaacattcgccaccaatatgctgcaataccaattaccaaccaagagcataacttagaattctgaattctaacactaatacataaaaaaaatagtatgataaaagtttcttactaggagaatgggttttcctttgagccattgcaaagtcggaaccaaagtggtcagcaccaatcttgtaaagatgcaactcggttagaattttctgttgcacatcaaattgtggaatcaacttcttaatgcactcaaacaaaccattggtgacctcaaaatcaaactctaagtcagtgttgtcataaaagaactctggatttaagaagtgggcagctgcatgcaatggcctatgaagctgacaattccatcttttatcaatgatttcaaacacatctttgtacttgctttcattgttgttgaaagacttcataattgtttcttttgccttgtccattgcttcataaatatagcccatggctggtttcctttcaccatccacaagacgaagcactttcacaagtggagccatgactttaagagtgtaaaccacactattccaaaaagaaggcatgagcactacctttgcagcttcttttcccttaggctccttagatagcttgttcaaggtccattcatcagaagtaaacatttttctaatattggctttctctttgtgaagcctttccaaggttagataagaagtggcaaatctagtaatagcatgtctcaccaattccctcttgtttgtaaaatttctcaacaaacttaaggtactagaatgggcatagataaacccaactagattaattgcccttctaatggtcttccttatcaagggaagcttcccaatatcttcaagcatcaaatcaatacaatgagctgcacaaggagtccaataaatatgtttccttttctcctccaacaacttacccgctaaaacatagttgctcccattatcggttacaacttgaacaacattctcttctccaacttcctccacaatggcatcaagcaactcaaaaagcttttcacctgtcttcacaaaatcagagccatcaacagacttcaaaaacatggtaccagcttgagagttaatcaaaaaattaatgatgcatctttgtttccgatcagtccatgcatcggacataatagtacaaccatacttgacccattgctccctatggcctttcatcaaattttcagtatattcaacttccttcttcaagagtggaactctgatgtcatgatagctaggaatgggcaaatgtggcccatattgaccaatggctgcaaccatgttctcaaagcttttcaatttaatgaggttgaatgacaaacctgcttggtaccaaaagcgagcaatatgttgatgcaccttcaatacttcattcttatccattgactctcttatgttcatttgcctcagcatctccatttttctccgattgattgcattttctggattcttacagaatttgtccattggtcctcttttagtcccacactttgtctttgcacttgcagcagcattacaagagtccgcaaactcatcttcttcacttccatcacatccaatcggttcaccaaattcaaaatctcttatatttgccatattaccactgccagaagtactgtaagtggtcccacttttttttgtagccatatattccttcaactcttcgattacatttgggggagttttcttgcaagctgcaacgttgcccgacttcccaatcaggtgttgtttggctcgggttattcctcccttagtgatttttccacaaaaattacaaacaatggtgtttgtatctccttccactagtgaatggcaatatttccagcctgggtctgccttatttttcctcgttgcacttgcagtagcagcatcggatgatggttcagccatttaaaagaggtctgaacagaaaaaaaaaattgtggtgtcaaatacgaaaaaaaaaaaaacagactgttgacagtaaaaaggggtgtcaaatagcaaaaggaaaaaaaaaaagctgtagacagaaaaatggggtgtcaaacagcaaaaagcccaaaaaaattaaaaaaaaaaagaagcagaccgcgtcttcttcctgtcttcttcttcttcgtgcgttcactgcgttgccggggtcttcttcttcgctcgtcgccgccgttcgtgcgtgctgcagggggtggtgtcgcggcggcggctgggtggtgtcgcggcggctgggtggtgtcgcggctgcaggtaggctgttgggtggtgtcgtcgcggctgcaggtaggctcgtcacggcggttcccgtgcgtgcggctgggtaagctgtagaagtcgcgtgcggttcgttcgtgggtaggctgaaggcaggtaaggatgaagctttttatttaaagaatagccgggtagggttgggtcgggtcggcccaactcctaccgcggacaaaaacccacgaaatccgccatttccgccatttccgccaccctgccacgaccgccatggctatggcggccgccatggcgccgccatcccaaacccgcaacgccaccgctattcggtggcgttttttcgaaattccgccacggaaaaccgccatggcgccgccatggccgccatttaacaacactggtttgaattgaattttacattatttgtttgatatgcttttagaagcatgacaagttgttttttatgtagaaatccttgtttgtttctacgtatattttgacttgcctattttcttacttgttagcttgacaaacacatacaacttgtgcatgtgtatataacagtttgttgttttgagtgctactgtgctctgaaccatactagtagtgccagaaaacagctgttaattatctaactccatagttatgtagactgttttatctttcacctggactgatgcagtcaaagtt

SEQ ID NO: 2395 - DNA, 2676 bp, Glycine max
  Intron number 4 from transcript Glyma18g48680.1 (locus Gly ma18g48680) derived from phytozome v7.0 (chr-ID Gm18; pos 58126191 to 58128866 reverse strand)
ggtatgtctcttcttctgcaatagctttactgttttggtagctctaaatgtggggaatagctaaataatcaagttctagtacaatgagattagatcattacatcattaatcaacaaagaagtgaagaactttggtgatcaacaatcaattcaatttgacaataaatctggcatatgggagcccactgatctgcccatttgtactactgtaaataaatgaactttaataaattcattgggtcccaaagttgtctagtattttggactaatgaaaattcaatgtgtttagatatttttgtgtccatttacaaattaaatgtgatatttgagacttcatgatcaaatgcactttgaatactgtgcagcttgttgtgtggccataatttaggatcatgctgtggcttgcacataggatatttactcccaattttgtaaatgcagatcctttggaatgtgaaggctttgagctgtatcaaataaccaaccctctgaaagaagttttaagtttacctgtaaacaattgaaatgcttcttttttttctttcaaattcccgtcattcatctcgtgtgaatatgctgcctagtatgggtcaagaaaatcttgagtggtagttgaaaacattatggcttactgccctcgtatgcaacttgctttatcatctctgtgtaattgcatgtgcttctttgtaccaaactgtccaactactgcctacctcttattatcaaaccttggcccaccactttacctgtcaaaatgttattttgtctcttttaggctccctttgtgcaaaaataatttattgatggagtttggtatgttaaagcaactattgtagggtggtataaccctcgttaactgattcaagctattttgactggtgggttctatatgttgtaaaaaatgattgatgttactgatattaatctgttttactttattgttactgatatgaaaccataggtgtgtatatataatatgattctgatgaaggctctttggttgttactgattcttgtagttgtaatttaactttatgctaggtggggatcaattgatagtgtaagatttgtcacacttctgccgctcaaataactttttataaaaattgattatggtaatacaccgttgaaatataactaagagtgtgtttggatgagacaattttaaattctaagaattttaaatgcttcaattgaaattctttcatttcaaaattcaaacttgaatcaataatatttcttaagcacaaactttatatttttttttggtaacaacacaaccctcaaacttgaatcaaattcaaactaacctgtgcaagtagtctgcacaatactattcatcattcatgcgtttgcaggcacaacacaaacatctcctctgcacaaacaaaattaacaaacaaaggtcccctttgtcttcaaaaggtttgccacctcctcgtaactatcctgctccttcactgcacttgattttgcctccacggcttgcgagttcacctgactccgattcgaggatagcagctcagcagcttccagtgcagccagcttgtcaacttcagctctcttgccctttttgaggttgcgagatctacaagatctggagtgggtttcattggatttgggttttgaagatgaagagaatgagttttactaagtaaacaatggagtgaaatctgatgctgtctctgctcgtcgatgcagcaccaccgtcggcaaccggatcgatctgtgaagaggaagagccatgttaatcctagattagagaagaaaaaaaagcaaagatgagaaattaacaaactatagagagcaacggaactgcgaaagtgatagtgaaggtgagactagtgagagtgtgtgaggatcgagcgagagagagtgtgagagagggtcgagcgagagtgtgaggaaaggtcttaggaatgagtgaacgagaatagcgagaattttcaaattctctccttttagtcagaaattagaattccttaattttagttaattgaaatttctgtttaaaatttcttgaattttaaaatcttccaaataaaatatccaaacaccaaattttatcttaaagaattttaaattcctgtttaaattatttttcttgttttaaatacttcatccaaacagactacagattttgcatttaaaattctagaaaatttaaaattatattataccttaatttttaaacatttaatgtcatagaaaagtgatcttgatttagtgtgaaattttatgagcttgatatgaatgatataaactttgctgtcattgtcaactaccttaacctcgtgatggcaaatgtttccacattcggggtaaatcttcaaagtagtagaagattattgagcagagtcaatgcatataaaaaataggatcatggaatgagaataataagtcttgacaattgcaactctgaggatgggaatggaattatgtatcattcgatagtgtttgcttattttgtactgaagctgagattttgtttgctcccttttgaaacatctaagtacggagttgccagaattttaccttaagaatttgtttctgtgcagcaattacttatctcttatgtatttgaatttgaatttaaaatggggatggcctgttcacagataacggcgttgtcttgttatgtttgtgaatttgtgatatttttgttaaatgtagattc

SEQ ID NO: 2396 - DNA, 1142 bp, Glycine max
  Intron number 4 from transcript Glyma02g15550.1 (locus Gly ma02g15550) derived from phytozome v7.0 (chr-ID Gm02; pos 14055023 to 14056164 reverse strand)
aacttcctgttcaggtagctagattatcatctaacatctatgttttgatttggagtaattataccaagtgtttgcagctgctgaaagtggtttcagtggtttgtgaggttcaattcttactattcttggcagactaatgtttatgtttaagctattcttatcattaagcaccaagtttttttttaataaccttaaacttatcttccaagaacatggtatgtattttttttttttattttttgctttttacctggatttatgttctttcatagaacaaatagtttatcccacctcttagctttacatacaataatatatttttttggcagtaaatagttttccatgtatgaatggattttatttcattggcaatgcaatttatttactagaatgaaataacactatttcattgtcaatttgtcattgtagttaatagaaaaagatgtgatagcaataatgcaatagtgagaaagttggggtagcacttattctctggaaaagatgatacagtctcatctttggtggtttgggcttatgtggggaatacctgtagaatccctaattaataaggagagtgtagattacatggaggaggatagttcaataaattgagactcagagttaggggcagatcaaggataactttaggccaaaccatttgaagtatatagatttaaatggtatgttattagacatgatttatgatggcacataatggtgtcgtttgatctatgtattccatgtcacctagtgggacaaggattttgttgttatttgtaattaatttataattaaattggattcagaatgttaagtgtgtccacttaataccatcttgattctagttttgtatttgaatgataaatttaatgcagtaatacattttctttttaaactctcagacaaagaaaacagatgagaagaataatgaaaataaatatatctatgctaatgtaattttttgaacctaattatagtaaccaaacataatattttcagcatattcttggattgatatctttaaagaagtatccgcatatattttgtgccttatgtcagtagaagcttctcaattgacagattaaacctgttatgtaggttttcatgaaactgacttctttccctgctgatgtagcagatca

SEQ ID NO: 2397 - DNA, 5060 bp, Glycine max
  Intron number 1 from transcript Glyma12g35690.1 (locus Gly ma12g35690) derived from phytozome v7.0 (chr-ID Gm12; pos 38814853 to 38819912)
attcttggtcccggtgtctttggtgcccttccagagtccttaattcttcttggtatgtcatctcttatccttggaaaaaaataatattgttctgcttctgtgggctaccttgcatgttctctagctgatttgaatagatgcatcttgcatatacaagtatagcaaacaactaatgtcccttaatttgaattctaacccactatacctataatacatcaaattttgcttctccactacgagtaaaaatgaatttaatcagtcattaaaatttatagatataattttaatacttaaatttgtcaaataataattactttaaaattctcattattgttattaaatgatgattgtttaaattacaaaaattagaatgacttctatttagtagtttcatggattaaaatgatatttttgtattttcacaaattaaactgatcaatatttataatttttagattaatttagtgtattaattccccaaactgttcccccttttaatttgtattttttaagcttctgatcgatacccatgtattgtttcgtgtcgtatatatccatataacttacaaatctggaaaatgatatataaaaacatgtatgaagttgttttcctttttcaactaatgaaaatttttaaaatttatattagtcataatatatgaaattttcttgttatttctgaactctctgactctctctctctctctcaaatgccaagtcttctttatacgtttacctggacttttattagatagaaaattgtcacttgtgactttatgagtacttgtatgataagaggtaacaatctaaaccacacctatcaactactcataattagtatttctattataatatcaatattaatttgcaaaaaaataaaaacataagggaaaaagtatatttgaattaatcaaaatacgaatattgaagttgagtatgagtataaaaaatatttaaccagtaaaaaattggctattaaaatttgttatacacacatgtgatagtttagattcggctattattttaaaaatacaaatacctaaacggctaaacctatccattaccatcttaggtaatagatcaatattacctaaacctatccattatcaaaaaaacttaaaactttgtataagaaaccatatttttgtcttgaaaactcatccaaaagtgttttgaaattgggtaaaaaaccattttagcctcaaatttgccaaacattttttttttcaaaaattacgtttcaaaaccaaaaataaaaaatctgacaatcattccaaacggatccttgctaatgttattaattgtacttttctattctttttaaaagtatacaaatacgtgagcttttgaacataaggttggacctcgccaatagttatagtgttatcaaacttaactaatgctcttctgagatcaatattttatgatttaacatgctaaaacctttatactatatatacgcacggaactatatatctctaacaatttaatatatgtgcagtcaaaaaacaatttaatatatatgttaaaataattccatgaaccgaactaatctaaatctttgatatattccactttcagcaaatttgaggaactaatcattttaggtctcttcaattttcttcttattttttgttttaaaaaccgttatatttcagcaatcaatttcctatctaaaaaattatttctaaaactagtgtaaaaaagaaaagacagatattattttttttttgcacagaaaaaaattatattatattataaggtaagcaattgtcactagtgtaagtaccaccacaagcattaagagatgtgtctcattctcaacacagttgcagataatctatacacctggatatataattagtacatatgtctattttatttgtttttttaaaactaaaagtctaaaacaattttaaaaaaaataaaccctcattatacaagtcacatggagatatttattgaaactataacacgttctagtcctgtattacctttttttttttcaataaatggaggacatatgatactcatgaagaaaagaaagaggtgatatcattactcgtgtttcatatagattgtttcacacatatcaattaaaagtaataaataaatgaaaaaatagaaattttataaaattaatcttctattatcattaattcattgatagactttgttatttatcagcaatattataagaaatataagtaaaaataataattaatattatattaaaaaattaaaatgataattattttggaataattatttttttcttaaatgaaaattataatgaaatagaaagaatattaatttatcattctgtttttctatcatcagtttctggacttgtcagcagcagggagatagcacaagaatatgccttttcataatttctaatgtaatcttaactttgatttttagtaaaaacttttcatctaactttgatttttagtaaaaacttttcatctattaattatgtaacaaggacattgcttagcaatattctttattttaatccctgcatcacgaattgtccatccaattgtttttaagatgaattcaaaatcctaataataattaataatatataatgcctacttaatagtagcattagatgtctaaaaagtggaattttcttgatataacagaagtactactcgatcacgattttctatttatcaaacatttataacaagtataattgctagaataatataccaattcttcaatacttactattttcgtgcctgaaaatgtcatcttttggtggatgtcaaggttgtggcattactatacggatttggaaaccagttacactgcaagaatcatggtttgctcagtcataccacttgcaatcattgaaatcccaaatttattccaattctcttctgtgctaagaagcgtgaccttagtcattgcctcgttattatctccatttttctgttcctgtacttcgcgcgtttaccaggtttttccattttccatttttccttttatcttatggtaaatgttaatgaatgatcacacaaccaaggactggaaaataaaataattttaaactctaaatacatatatagtataccttttgttctttaattccttaataattagtaaatgtccttaaagcactctttaataagatcttttattatcaaagccagctattgaaatcattttaatgtttcagaatcaaggacacattgttacggtatcagataaattaagagtttctatatagttgtcttttgagttaataattgaatttgttaggacacattaagggagaaaaggagaaaattacttaataacaataacaaaatccttaaattttggaagataccataaaatttctcatgttataaacctctgacctttgtgatacttaaacatcttgattcttgttacatctgtaatatcaagcctatgacaattgaattatccgtgcttaatataagcactaactatgtcatccactatcataatgtgccatcctattgcgtattaataaacttattttgatactgacaattcctagctgagtaattaattgtcttcatggctatttaatctgcaggtttttgaaccatgggtacagaaaagaagactagaatatgtgaaacatgataatttaatattgaaaatattgcaacatgttcaaaagaacaccttgcaaaggatcttcaccaagaattaatgggactccaaatgtgagcgccataaggtaaaattttgaagagctgctactttgacagtttaacttattttttaggtcatcatggcattggtgtgaagcatttatagtcactacactttgcaggcaattatatagggaaatagatcaagatggaagcagtggtatatcagcttctgaagtgaaagtccttctgctcaaaaacaaaagtaactgatacaaattttgatgaagagaaagaaataaaagaggtgataaaagtttttggcctagatggtgacaagaaaataaccaaggaggaatttgtcagtggcttcacgttctattacatatatatgttttactttagttctaatttttaaagaattttgtactaggcttttgtattcataaattttttaaaatttaaagacaaatttaagtgaaatatattagagtttaatgattatgcactaataatattaaatatttaattataaataatcattattataatttttaaaataattattataaaaatcaacaaacttattatatatatatatatatatatatattgaatataaaattgtttttcataatcaatacatagctctttttctcaatatattaacaatgcaaattacactattatcaaattatatattgacacgtcaattttgttaagttattattattacttaatcacttaaaaagtttgtagagatattaaaaatgactgtaacacctaagatgaaaatcaccattatgatgctcttaacataatgtaattaatatgaaactgatataatatgtttatgtaacttacattatatatcatctcttaattggttcttattaatgtttaaagaaaaaataattaaataaataagaatacatgaaaaaaaaagtgcaaaaaagttccatgagtgcttaagaatctgggaggagttaattttgaccatataaccataatatatatagatggtcattggtcaatatagttttatttaaatctaattttgaccattcattttgattgtatagttaagattaactcctctcacactcacttcttagtatgaaaaatagctgatacgggacatgttattgtagaaattctagatttactgttcaattctcaactgccaaatagaagccaaaattggggaacttagctatttcaggtttatctgactagtagcaattgctttgagacatctcttatgcttcttaacaatagaaaatccactgatctttaatcttgtaacatcatatttgctttggattcttttccacctctcttggaatttttttgtttctatcaccaactagaatttatgcttacctagtgctgttatttgtccatttccccgctaatctgtat

SEQ ID NO: 2398 - DNA, 1112 bp, Glycine max
  Intron number 5 from transcript Glyma11g33670.2 (locus Gly ma11g33670) derived from phytozome v7.0 (chr-ID Gm11; pos 35514336 to 35515447 reverse strand)
cctacacgtggtgctgggtaagccttttagataattttttactgaaatttgtgttgagcttttgtacaagtgcttgtatatcaagtggtgcaagatatcatagattcatagtagtatgaaaattttggtaatatatttaaggttctcttcatgtactattagttaaaagtggttttttttgtggtcttagatttacaaagagttcagttgataaatatcaagctgttgcttagcagtctgatttaagaaacacatgtgaagaatcatttgctatgtagttgtttttggtggcaagaaaataaaatgctagctgtaggaatataacttttaagctcttgagcattctcagaaaatattagaagtccatgtgaacaatcacaggccataattgttttttgatagcatgaaaaggtaaaatggcagatagaaaataaagtcggtcaatctatagttaatagtttaacgatctagaatctccctggaatgtgcctgtaataggttttgcttgaagtgggtagattatcaccagtctgttccatgtttagaaaattcatttggctttgacagatatgtgtgtactagcccactttctttaaaagatttctctgatgtggtaagctcaaattatggaggctatgaattgaactcgtactagtaatagtatatgatgtcctttcctctgttcaggatgttgtatttctgttgataccattattaaaatattattaggtaatactgttgcattcaagtggtgtctaaccctgcactttacaagtaacgtaagttgttttggtttcaaataatagacgtttggtttgtaggtatggtttaaacatggggaagatgcatctgtgtgatttgtctttttttatgatctgatgtgtggtagtgaaagtgaagacttatatctgttgttaagtattggtttgtgttgcatgttaacttcattagatccggaagccacagtcatatgacaatatacaatcacagaaatggctctgtattgtttttttgtagtccgtgatgtaacaagttatatatttcacttgttatttattgtttatattgtttatgcagttggggacgtcgaggtggcccaaggagtggcagtg

SEQ ID NO: 2399 - DNA, 792 bp, Glycine max
  Intron number 36 from transcript Glyma03g27270.1 (locus Gl yma03g27270) derived from phytozome v7.0 (chr-ID Gm03; pos 34949036 to 34949827)
tttgcaagcttgctgtcaaggagcttactagttgggtatgttttgtttcactgacaagtcacatattctttatacttgaagcttttttaataaaattgcatatttggaaaaaaattattgattctcattccttaaatttgatggtttaggtatcttctgtttgcagataaataacaaaatattttaaggagagaaacagtaaatgattgttacaaaatatgttttttatttgccctaaaatactcccttttgtttttttatacaagaagcaaacaactaattcatcaaaaccaatgaaagtagttaattaatttattcaaaaaatacccatagaattaaattgttttagtagtgattatagttaatgacagtacacataatcaagagataattttttctactgatgaatggcttgtatttttaatatgcctatgaatgcatccacttgtatgggaaagagttagtgcttcattaatagatttcaaaataaattaaggaaattagcaattaatacatctcaaagtgggtgtatgtttcttattattaggagaaaaagatgcattcatttttttctcatttaaaggactggagtctggagggagtaccatctagaaacagttttgtagacattgatgtcttagttatattatggatatgataaatcaaggagcaaatgcagccagctaacagctaatattccaacagtaacatttgctcgtgatttgcttataaattgtgtattgcatactccttgcaggtaatttactcggaagaagaaaggaaatataacaa

SEQ ID NO: 2400 - DNA, 3444 bp, Glycine max
  Intron number 1 from transcript Glyma11g35260.2 (locus Gly ma11g35260) derived from phytozome v7.0 (chr-ID Gm11; pos 36959215 to 36962658)
cgtgcgagactccagctctgaattggcaccacaaggtaaaaagctcagttctctctctgcgcctcagcttttgaatccatctttcactttttgggcttggatccgttactctgtaatgtgtttatctgtttttattttgaatttgtcaatgcgctctacattctgagaatgaattctttcgtgtatgttcatgtgaaacatggttgtcaaaattgcgagtttgtaattacgatttgaggtgattgctttacttgtaaatttgaatttgtggagatataaggtttggttgagtggttgagaaggagaggaaggagggaatggttgtgggtttgatccctcgtaacaaaaactaacaaactaacgattaatatttgctcataaaaaaatttgaatttgtaattaccactatagtccacgactcagttactcaacacagcacttgctatgtaacttacgtgagtacgcaaccactgaaggcacatcacaaattcgttacacgactcagttactctcagccattgaaggcatagctttaagcatcaatccattgaaccattgaaggcacagcacaaagcagcgaaccgttgaaggcacaatacaacacgtaactcgaccacttctcttggccattgaaggaactgatttgatctgatttcatgaaatccaaatcgaaaatgagaaaccctagtctccaaattggtaaatctcactttgcaaaatctcaattcttaaattcatcccaaacccaatttcttaaccctaaactccaaactggtaaaatgtgtgtgttctttgtagtgttttcttgccaaaaaaaagggcattgagattggtgaattcatttggagtagaacaatactggtgcgtttgatcttttatgaaagggaacttagacatgagttgaatgtgcttctgttactgggaatattgaaccttatgaaatggaacttacacttgaattaattgcatgagcttctgttagtttacaaagcgtatttagtgttattaatatttgaatctgcataagaagcaatgcatttttgttgtttgtaatggcgtgtttgatcttttatgacatattgacatggaatttagacatgaattgaatgtgcttctgttacagtatatcagtgaattcatttaaatttttacattgtttttatgattagtttattatagttatgattagtataacagtgaacaaaggtaatgcaattttttttgtttataattatgattagttgtcaaatggtttgttaaagaatgactgtaaagtaatgagattacatgagatctattaactttaaatatcccttttttcttggagaaagcttctcacggatctaaatcacaatagtaaaaccaagttcttgagttctcctcaaatatgtttcacctcttattgttcaatctttattttcttcagttgacattagagagaaacaaagcctttttgtcattaatattatggttatttggttattgttgtcagatttatccttgttttaattgttagtaacattattaactaaatttgctgaattgttggtaaagtctatcaggttaagctctgactctatacatagctcaagcttaggtgttattcattttgacattaattatttgtgtaggcctttgtcctatcacactaatttgttagtcctgattctgtgcaatgttattgcaactatctgaagtttgggaaagcttaattaactgagaaatctttggtcatggattttgtcctaattgcctgggatctggatctggaatggttgcctgaggtgaacatttctgtgtcttgagtttgctggtgaagaagtcagtgattttatttactctaatgccctacatgctttgttattcttttaatactatatgtgcttctcatttgagaggggatgatttcattcacatagagttattttgaaagtgtcctataatgtatcagatcagatctctctatctctttgctattgttacttttgtaatgttaaacattttattgatgaaaatgattctttgataattatgcttcctaaggatgttctggtgatacgaggcctcctaccagagggtggaagttatccaagcatgtatttttcttcctaagaatacactcccctttgactcctgaaggttatactctaaaattaagcacaaatttattatagtttaaattgcaaaatgaaagtcacaagatatgtcagataaaagaaaataagcatgtcatatcataaagtcataaaggtagaaagagagctttggactctgatattgcttctagtgtggggtataataattccaatttatacctggaatagtttccattcagcaagttaggttttggataaaggtgctttttggagggtcggaaatggcaatgatatatgaatatggtcagatggttggctaccctatcagaatggtcaccatgttcggagcccatcctcactgttaccttctaaattctaatggtacagtttcatcttcaactaaactatattccagtacatggtactcagaattaatccaacagattttccacatgtaccatttgaagcaaaccaaatatttcaaattccactgccgaactttaaagtttcaaacctattttgctgggatggtatgaaagataagtgtaggaaaagatgaatgatgtgataggaaggaaaaaaacattatttaagtaatataactcttaattaattagcaatgatgctgttatcttatgggcattattccatgacattgtggctttctttctttgtttccttttttcaagttgaaacttaaattccacctgcaaattatttaaacctattcctacagacataattccagttggaagatcttgtattatgatctacagtacaaatcattcgttatgagttccaaacattaagattgtcctgtatattgttttagatttccccaaatgcccgtgcccaaaatccatatggccaatgttaactcacagttggcctaacctatagggtgagctaaggcgctaatatatttaagacatggcctaattttatttgtttaaatttagtgtctggccctgagcaacaaattttcacattcaactaggagttagggttttgctttgcttgattcacctctccccttcttcatttactattgactcatttttcattattttttgaaagttgtgttctttttccctttttatgtgatgtatattttctgtgcttttgtatttcttttaaatggaactgcaacaacagatgcaggttctgagtttcatattgatattttttttttattctgccatttgtagaacagatgctggttgtcttagctgattgatttttgttgtctttgttattagttcaatcacagtttgcttttgtaataaaaaattataaatgtatgtcatgtttcaaacaaagtttttttaatttgcagttcactctttcg

SEQ ID NO: 2401 - DNA, 6508 bp, Glycine max
  Intron number 3 from transcript Glyma08g39170.1 (locus Gly ma08g39170) derived from phytozome v7.0 (chr-ID Gm08; pos 38590066 to 38596573 reverse strand)
tctctgcagtggttcttctcttctaacactttccggttagtagtagtagtagtagtcagtttctgttttactttgcttccacttatttttttttggcttctttattttctctttctggttctttactcattgtttgttgatatctgcgctcgttgtgttattactctctctctcatctctcacgttttttgtgctttagcgttaatctgagtagaaacagaactacaagaggttaactagacccagtgatctttgattggttgagaatatgaatactatcagtaatatatgcttgcaaataatacatgatttgcagcttttgaagttacataagaaaaaaggtggaaaaccctaataagcctattggataggcttctcactctcttttttccattggtttgtgcataactgctacactgctttctgtagttaatgtgggtgtaactttaaaaaccctttgtatgtggctgtaactttaaaaaccctttgtttgtgggtgctttcaatgtgagactgtgaccgtgcttaagaaagtttgaattgttttggtcattcatggactgctatgtgtttaggtctatattcttgtgtttttcccccttcaccttgttcttctcacttctcagtttcatctttatatgggtctttgaattaattgctataatctttggacttgtcttacttggatttgttctcttcacactctctttgttttcttttattttctttatgcatttgtcctggcattgaattttctagtttgacgaacatggctttgaatttctagttttgtagatacttgactctgaccaaagaatagaatataagtgatgttttgcaaacacccagtggtcttaaaaggatccttttatcgttctcacaagtttgcatttttagtcttccgtttttgtgtcttcactcccacatgtgactttaagcaatattattttgtctaatactcaataaaaatgttcctaaaagcctttggttccattcaaaaaatattgtcaaattatgaataaatgttagtaatatgtttttacgacattttatcaaatgttgtatatagtttatgttactaaagtctaaaaatatcacaaaaaagttttaacaacatgggttattatatgtaacattttatgaatattacaaaaacatattaataatatttatttttaattttgttatagtttttgaatgccatcaaaaaattttagtaacatttttattaagtgttagataaaaaaaatattgtcaaagatggcgtttgtaatattgcttccagccccgtggattgatcgggtcctgtttaaaagtctcacacgaacaagtttagtaatgattcttgcctcaaaatacttgttttttagttatgagtgatgataatgacgcttgatttatatttgaccttgtctatttttgggaacatttttatcgtttgtgataatgacgttgttatcttttgcttcccgtaataactcctttgctttcctcattagtaactcctgccgttatatcaacttttggaagttgacttttctcaaacaaacttgtgcgtttcatcaagacaatttgtgcaacttcttgttagttgtttgttggttggtattttaaacgtgatgacattgtgcaactagttttagagatgacttttgggtcttttaaatcctacttgttatgtttgaaattcacgtgtctctcatattctttagatgatagtagtactaacagaacatgtgattcaacactatgagttaatgattcggtaactcactccaaatgtggtggtactgtcttatctctttttatgtgtgagaaatatagatggaaaattttcttctttctatctttgctgtaaacacgaaatttctggcctttaattgtctttttatataatattttaacctttaaatctggccattttggatttgaggatcatatctttgcatatttgctttcatactttaaagggtgatgcaggttgttttagatttaaagaatcccctcttggaattatctattgatattgtctgtctggagctaaagtaatgttagatttttgcaattttataaaatagaaagcagctgtgttatgaaaattttataaatgaaaccagcataattgtggttaggtttattctgtttggccttctttctttcaaggcattaaattcgtaaagtttcaaataatgttaaataagggttaattacattgcctaagtatacgactcaatcttgttggaaattgataactcttccatccttgctttctcatcatatataaatattatcaaacagaagtagatatatgttataccctgatttctgtggaaattaaccaatttgcttaggattttttcccttcccatctttcatttatgctagaatcagattgctcactatgttgaggctggcatattatgtgggtcatgatggtcattaataatattttatttaacacaaacgttgtaaatgcaaagtatggtcaggtgggttatggttagcgagtaacataatttatagttttatgtttggaagtacagattaccttttgagtgatgatttttaactctttaatgaatttgtattgcatgctttgatggattctccttaatcattctttttgcaaacctatctttcttgaacgtgtgtctgaaaagcgaaattgacaggacctaaaattccttgtttttttttctcctttgttcttttgatttttaatttttcctagtactgcaatctcttcatgcatcaaattagatcttgtatttttagaagaaaatttctggtgctagcttgaatttaagttagctatcagtgtggcaaatttatgttttattaatagcattgatagggcctttaattagtttgggttaaattactaaatttattgctgtcttgaaactcttgcctttgcaaattatagtttttttttgtcattgttggcatttatatgtatttcaacttgtgtcatttgttagtcttcacaaactacttgaatgtctaatgcgagaacggcttttcattttgatctgatccccctaaatggttgaattgcttcttatttttaatattgttacaattagaatccctccatctactaaatatgtcatgtagttctttattaatacttgaagctgtggttttaatcttcattaggcatctgaggaacttgcccacttgttcactttggtttgtgatgtgtttcaatgttggtcccgttcttttgggattagattctaatccatggtttgttttagaggtatgaaatggaggatgcatgggatgtgaggtataattggagaactattgcctagttataatcatttttgctaaatcaatcttcttattctatacataagaaacaaatggtataatttgttttcctaattataagaatcatataactactttcaaaattattagctatataccctttttgccataatattgtattgccacaaaatgggtctatatttacttgattgggtagaaataactagattatacggattactgtgatctcgtgttgtgcagttattgttctcttatactgcatgcttgtttttgggtaactgatgtttgagaattatataaaaccccaggatcatgcacaggacggaaaacaacatgttatttatcattcgcggttttacttttacattttcttctgggtgatgttttgatgttttttttttccctcctagaagtaaaatcttctgttaataataaagactgtaaagaaaaaaaaaagatgatttttattttttatacaccgtttctcatttatatgaaaataaaattaatagttcacaagtttaatgaagtaacacaaagatagtgtgaaggaataaatgacatgcaagtatcatattcatatccatgctgcaaatatttgatggtcatggttcttttccaaagcttgttgggttttggaaaaactgcaaaagcatgaaatgtagaagacaacctatggggtggaggtagtataaataatactaataattgtagagaaaatggaaaatcccgtgtgcagcgggtgattttaatttaagagtgtgataaactttcacatgcactcccgcaattgtcgctgagggggaaaagcagctttttcgtgttgatagaacgttcaatgccatttaagatctttccccacgcactatgctatgccctccctgccctgctaaggcactgcgcgattctgcgtagcataacgtctgccaattgcccttggattggatattttgttctcttctgctttcctcgtggggtctctttctcatttaccttctggatcttgtttgcacgacaaaacaatcacacttgtccgtctctaaatgccatcactttttgggaaacaggtccctccttctaaggaaaacaatcctattgtcttcactcagcttcaagtttatgccctaaaaaaaattatatatgccgtaatttatttcccggatctgtttttttcattgcctcaaataggattcattcggtagactggaatgaaatataatgaaagtgaattgagattaaagttttgaattataatacagtgtaaaaaatataaatttaatcttattttagtgttaattttacaacaatgtaggttcaaattctctcacatgtgatgactttatcagtgttcgatctataaatgcctaaactttcttttagcatagaaatatgttctaactctatccaattcgtttaatctttaaaaaaatgctaattatttatatagaattgatgcattaaaaagtattttgagttatcacgattggggcgagatatattaaggcattgatatcattttcttaaattattgtgagatctatcttgagttcagaacttgtacttatttgtgagctatatattagccccattaaattctgtacagatagtgatagagattttttgcacaatggttatttcacacccaattttcgcacacaacagatttttaccataaaaagggatcataaaatatataaatataattgctgatgaaataatgaaaaaacttgtcctattttgtctggtgatttaagaagacaaaagagaaaaaaattggatgtttgggccctcaagtagtagctgataccaataagtcaggcgcgtgctcgtgctgttttgtttgtgtagttataccgtggttaatccctgagtttgtcttcactcgagttaaggatcaatgatatggttttagcctgaaataaaatgtgaatttaggtaattttttttattaaaaatagaatataaaaaagtgttatcttattttactgtttatatatctttttaattttctttcccaccaaacaaacggagcattggggaaggttgttttgtttgcttgcttcgttgtaagtaaacttttgagtccctttcgtttggcactgattactgacaatggatggaacttgcctctgaccactgattttctttttgattttcgtttattatttttttctttccaacctaggtcaggtcaggtaaggtcaagtgtgtacactgttctccaatgtggctgtcaaatccttgtcggattgagtggctatcagtaaacttcttcctggccgtggcctgctggcccagtaagcaatctttgccatccttggatttctttgggaggaaagaaatcgaggaaaaaggaaaagaaattattaaaatgtgttttgattttaaaaattaactctttttatttatttattttgtctttagtttataaaaatacaataaaacactattgtttttcttattttctttccacttatataatcagactataaaagacgtgtcaccaaatgaaagatgtatgattcctataaaagcgatttttttcccaacacaatccttggttgtatggtgaaaaaaaaatcaaataaaagaagttcatttaaaatataccatggaaaaaatgataaaggaaaaattttaaacttaattattttaaaatcaatttttcttttattttctctttttaaagaggaattttcatattcaaataaattccatttccctggtgattaaaggtgtgattaaaaaacagataaaatttaaaaattaatgtgtaaatgttagtgcaaaaagaaataagatttttctatcttttgtgaacgttaaatacgagggattttggttaggtatagacaaaattaatttaattttgtaattaaaaaataagcgaaaaaaaggatagtgatctgtattggtaaaaagttattaaaagtgagaaattattgagggtattagtagtgctttcaatttaaaatgacttaaagggttattgatattgtaaacactaaatttttataatgcccgcttagcatatatgaattttatcttgccgaacatctcgtgttgaagaaaatatacgagaactattgttcttgaattatattgtaagttaacaaactgctacagttattatttctctttcaaagttaaggtaatacctacacaaataccgtgttacttttatgacttgtcttgcttctattttggctag

SEQ ID NO: 2402 - DNA, 1219 bp, Glycine max
  Intron number 4 from transcript Glyma09g30410.1 (locus Gly ma09g30410) derived from phytozome v7.0 (chr-ID Gm09; pos 37258732 to 37259950 reverse strand)
ttgagagtacatctgggagtcgtgatctacaggtaaataatacaagttgctaggatttgcgtgtagtcacagagaaatggttttggtatcaaattcgtagaaccctaaaaaagaattctgaccttaatcatattgtattcttggaaatgaaattgatttgagcatctttgtgtctttcctcttgatttgcaggactttttgcattagtttctctactttgtcccttaattccttttttgatggtctgtttgtgtggacattatcttgtccttctgttacatacatcattgttactgggccaaattttagctaactaagtaatattctcaactgagatttgttccattatgtttcaccactgacatgattgccacaactgtgaaacataattgttatcagattgtaaaaagtacatacaaattagtttattttaattttctagacatgctattttatataggaattttgatgtcagtttttaccggaatctggattgcagaagcaatgcttaagattttgtatgactgctatttgcctatttcattcttgttgcctgaagtttgtttttagatgacaagatttaccttatgaagttcaaatgataagatttaataatataattgaatctgttggaatattggttctttcatctagttgaatacattccaatctagtacccccagcattgggacttaagtataagatagtgatgaaaaacatctatctcaattttaatatcagcttagcagctttagaacctgatagattccccctaatctgaaatgatgtaaacagatttacatcacctcccatttggtgttttaaaataatttatttctgaattttgaagccgttagacatctgatatttggctttgaagtacaaatatcttatgcaaatgcttcatcagtatcgaatactctaatctacaatttgccttttcaagtttagcctttgtttctaatgggtgaaggtatctgcatccatactctttccatcactatctgcatattggcctttatcccactgtcctgggtcattctgtgcctttttagctcttctttgaatgataggatgctggaagtttcaattaagactttctaggtaaaaaatctttgatttctagaaaccaattaacagggcaatattgaccttttattgattgcacatacaatgttatacaggtgaaaattggacttcgagttcttactcgcccgtt

SEQ ID NO: 2403 - DNA, 807 bp, Glycine max
  Intron number 3 from transcript Glyma11g05300.1 (locus Gly ma11g05300) derived from phytozome v7.0 (chr-ID Gm11; pos 3709956 to 3710762 reverse strand)
atagctctatcaggtaatgcgcgtgctctgcactttccagccaaataattggattctaaacatgtgtcttcactcttcacacatgatctgtgttccccagtgaatcccattattgggtttcaaagtaacgggtacattttatgaatttaaatttgatccactatctttcaactcccaatcatgtcttagtatgttatttaaaaaatataatcaaatctaagtatgtgaattaatcaacatgttgttaactagtttaaactctttaaataaatttttaggttcgaatattagttactaacaaaaacaaaatcagtaaatatttgtattgcttttattcttattaaatgcataattataaataaattttatacttagtactaacattggacagaaattaatcttttgaaaaaggtttcgtagaaaaattttgaatcctcttattaatctctcaacttttttttatatgagaggtattgaatattctttacatttttaagttattgatatttttatttaatatttatttataagatggtagaaagttttgtagaagaatagaacatcacttagtttagtattcttgaattgctttattaaacaagaatgcaaaatactgaataaatataacttagtgtaggattattttcctaatggatatatgaaatttcgttcttgaaaaaattcaaaaagagatatcatgggggatgaatgaaaaagaaaagtcaaggtaatcatagtttgatttctttttgataaatgattcacactacaggtgctcacactgttggattctcccattgcaacaaa

SEQ ID NO: 2404 - DNA, 3259 bp, Glycine max
  Intron number 2 from transcript Glyma17g06800.1 (locus Gly ma17g06800) derived from phytozome v7.0 (chr-ID Gm17; pos 4870788 to 4874046 reverse strand)
ctcattgcaggtaatttaatttcatttaatctatgactttatacgtattatctacactccaccactatgcttttttaatatttatttttggtccttacactatacggcaattattacttgatgtctttggtagtacgtaacgtaagtacatggtggattgagaaagtagttgaacaattctacaattactatcaataaaaagttatccctattttcctgtgcccttcttgttttcttcttcataaatttgaattgagaacatttatataacattaaaacggaatgggtgtttttccccctacactttcagtttgtggaatattaagttggactgctagctgcttaattcacaattgaattatttaattttcttcacattcaaatgagaaacttccagtgtggatgaactggaaaaaaaatggttgagatgctagattaactataacacaatttaatttggatcatatattaacaaaaataatcactttggaatattttcttcaaatagaactcataatttttataatgatttatgatgtcttcagataaactttttgaaaaaaccacttctgccatatttttattttatttttttaccctttaacttttaaaaagtattaaatgcattttcaaaatcttcttattttatctttttttaatataatttaaatataaaaaattcttaaaaaagaaatagaaaaggacattcaaatctgtatattctttccctttattatttattatataaactaaaaaactttgggagtggttaaaattttcaggacaccttcctttaaagtaacacgcacccttattttttttttaaatttaaaaattttgtttataacttaattatacttttaaacttctatttgaattaaattttcttatttaattttacatttaactaaaatttaaaaacaaccgtacaagatccaacggattcttgaaacagagaaatgatttcacaataattcttgaaaaatacgcttgcttctcattaaactcaaactcccaaatcaactcgacagaacaaaactccaaaatagggacacacagattctgtcttgtataaaatatttatatatttatataaatatttatgtcttttttcacttaagataatcacatgagaaattctcatatccttgtaacacatgtatgattctatttttcaagtttttcaactttaataacttcatatattcttgtcatgcaaagtgataaacaataaatccttaaaattaaataaaactacacataatttgtcatatataaagttgtgtttgaaaagttatttatgacgcagtgtattacggaagctgaaactatatattagcttcagttaagacctgaaaaatagtcccaaattagtgtgtttggataaatctctaaaattatgataaattatgataagacgagttaatcttgaccaaattttacatatttaaattatttttaaaattatagtagaattaattataatgcaagaaaatcatgcatggtagactttaaataaataggaataaattttattttttctaaaattaattctacaataatcaattatgtaaaatcaacttcatttaaaatatcgctaatgtttgatgaagcgcatcctaacatgctgaaaatctgccatgcaacaaacaaagtaacaaacattaccgttggctcataaaactgacatgccatcccaaaattaagtttgatgaaaccctccttagcagtataattcacacagcataatatattttttggctgaattgcaatttgggttttcttaatttttaaaatttatgattttggtttttttatttttaattgtaatatttgatcctctagttttataaatttatgattttggttccctagtagattattaactaataattatgattattaaaaatattaaattaattataaataaataaaaataattaattattaaaaaaatttaataaaaggctattaatcataatcataaaaaattaagattaataaatttttaatgattaataattttgattaatttataattaatttaataacttaattaattaagttaacgatctattaggagtagcaaaattatcaatttataacaccaaagaaactaaatattacaattataatccataaaatcaaaattatgaatttaacaaattaatggaaataaaatcatattttaaccaatattttttaccttgcatgtaagaacttaaattattcaagcgacgttaaagcgacaaacttgaccccccaaaatatctttgctagaagctaccaaacatatgatagaaataatctagatagaaagaagatatatgctaacgtcttatatatatacaagacgtgatggtatcaatctagatcagaaattcttaagtagtatagccataggcatccaaattaagtagtaattagttaacattcagatgagtaaatgtatttttgcatatatgagtatttttattctttaatataacttataaatgttatatatgttttttttacacagaatgttatatatgttaaatatatataatattattttaatatctaaaatgaacacaatttactttaaaatttctttaaattatataaacctgcaatagaaagttaataagagaataaatgcaacgtaacgtagaggagaaaatgtctcttgatgagttagcacacaagaaaaaatatatgattagctagaaataaaaacactagagagaaagttggaaaaccacctatagaagaaattagaaaagatgggttcacagttcactaacttgccttaagtaaggacattattcagaagtttaaaccaaatggagggtagcctaaatgccagataaacgcctatgatatgattcatcataaaatattctgaccattatttgatttagagtaagtagtttatgttttgaccgtataaatttttttatgctattatttaattataatttattatggttagtaaattgttaacttttacaataagtgacttatttttctaattatacaaaattaaactctttgatttatgtaaccgactcagtccaatgagaaaagttttttttattacatattatatattttcgctgtttaaaatataaagctcgagaaagagaggatattagtactttttaattattatacaattaaattctacttattaatcaaatattattataacatttatacgtttggaaagtacagttccaataatttattttatttgacagttattgggacaatttct

SEQ ID NO: 2405 - DNA, 2964 bp, Glycine max
  Intron number 6 from transcript Glyma17g06980.1 (locus Gly ma17g06980) derived from phytozome v7.0 (chr-ID Gm17; pos 5036884 to 5039847 reverse strand)
agtgaggtaccaccttacaatacttgtttcttgtatttggattttggattcgcttctttgccttcttttacaagaatacatggattaagaaattgtccaacaacaaaaaaaaaaacattgattaagagattattaataaaaaaaaattgttgaacgttatgttaagaatatacattgacaattagctaaatttcattgcaaactataaaatcataattaaagcttatttaataaaaaataggacttacaatttttgatgatttctaataaattttagaaaaaaaatgaaaattatgttcaaaataatattttagagattgtgttgctaacatttttcttaaaaattatggtgatgatgtattaataatattttttgataaaaatagtattttttaggtttgataaaaatatttttaaattcttatttagtattttaaaaatgctggttagcatttattaaaaagaattatcccttctttccaaaataaactgagtttttggcattaaaaaaaattcgcattgactgatgtttatagttttcactgaaataataaaaatgttattccaaatttactcctaataaattacatcgatcaagtgtgcttgtcaaattttcaactaccaccatcaatcattcaatagttacaaataacagttaagtatgatacatttataaatattaagaatattttagtaaaattgccccaacaagtaatttttattgttattcttaaaatgtgaaaaacggttaaacatcagtcctttttgggaacttatatatattttttaaaagagcaagaatcttttaaaaaaaaaatcaattttaatgtttctggtaagttaaaaaataataattttgaaaaaaattataaatatatatcataaaaaatattttttaagctgattatttggttggttttgtaattagcatattcttttggcaaagcgatactcccaagtccgtcccaagacatgttatggattcagtagcctgggatcttgggctgtacttctaccaccaagaccaatgctaaaagaacttagtattacgtagatcttaaatattgatttcatattctcttcacttattttaaaagaacttggtatttggaaaattacaagtttagatcaaagaaatgtttttataaataaattaaaaatgtcatctcccctcatttctagcaagaagtttttttactgtttatctcgacaaatctatggaaaggaaagataaagtgaaaataaaacaaaattttagtaattagtagtgaaaataggaaagggtatattattaatgaatgtattaaggttatgattgaatatttaatagtgacttaaatttaataaaatcagatgaaatgaagttaagtgaaacaattcatacattttaaaattattatttcattttgtttcgctctattttatttatttccattcatccaaatccaaacttaatttaagagtatcagtaacaaaatattaatatactgtatttttagggcaataatatactatactaaaagatttcagttacttaaaattattaaatatccttatatttgtaatacgataaatatttttaaaatgattttcatatttatttttttaatcgaagtctttaaagatacccctaacatttatcttcatgacgttgtttccatcaattttgttgttggtcatcaggtaaattaggagcaataaaatgactggtataaccaccacgatattgcacacatttgatgtgtaggaaattatttctgtcaattgaaacgtccagtagattgcgactcgtccacttgccatttttttatcccgttgctagagccaaagcttcaagtttcaagtaattgaagtgcaccaaaaactacaatagaactatagaagtacacgcaaaaaaaaattgcctttaaatactaaatacttctaaacaaaagaaaagtattaatattgattatattattactattattattcctttcaagtaatattattattattattgtataatttttctcaacggcacaatttctttgttatcatattaagatcagtttcatggcttcaaacaatcaaacttcctaatataatactctattgtcagctttccttttatttaatttccatggctttgctcatcagtttcagcagtcagaaatctgatccaggatagattcatccttattttcccaaaattccaatggcggcctatttttcccatgaaaattgattaatcacttgatgttctctcttacctaattttatcctttgtgctaataacaggacacctgctaaaatatatgacactccacgtgacaatatatatatatatatatatatatatatatatgtatataacaaattaaatgcgtaggttctattaggttccatgtcacccttgagtgatgatttgtacgtacctttatccaacacagagatgaaaggcattcaattcattgggattgtaggcctcttgttcttgctgtgaatcacgcataaaccaataatggttgacagtatgtgcataatgaattaatgatcagaaatttttttaacatagatcatgtgtacagtgactttactattagatggagctttagagatgatttattatagattgccttttaatcttaaaaaaaaatagtgtacgcaatagtgtgaatgatttttatacagtcattcagttataatttttcatcccctattttgggtaacagagctcaataggaacataatagggttacctagttaccgattttcttgattttgtccatgggttgggtttttatgtccccatgtttttggttatgttgttcttgttgtttttttcttaatggaattcctgatttgttgcagtagtctatgataaatttattgatttttaatgattatcttaaaagtatgctaatcataattttagattggttgataatattatttatttataattggcaggtattagagata

SEQ ID NO: 2406 - DNA, 4894 bp, Glycine max
  Intron number 5 from transcript Glyma10g13190.1 (locus Gly ma10g13190) derived from phytozome v7.0 (chr-ID Gm10; pos 14892431 to 14897324)
tgcaggtatcctatcatattgagtgccttccacttttgtagttgatttttctagcatattagaatcaacactacattgtccacaataatgtacaacttctaattaatatatgttataccattctaacagtcgttgacatagcacaatagcatcatttgattcttgcggtgtggccagccccacctagtgaactaaggttttgttttattatttgtttgtttctttatgtcctcttcatttgaaatgccatttgagggggcagaatttttacccttttcccttctcaagttaatcatgaatttatgattgctgttaatatagacactgagcatatcttttactatgaactatgcaaattcattgggaattatattgtctgaatttatctagtgatccaatgttaccttttgtttgaaaaaatgcagtaactgctgtaacttttagtatctttgagcctgtttggatacactctagaaggacttctagaagcttctttattggcacaagttcttttttgtttagaagcagtgtttagatgcacaatattttcagcttttgtaaaagtcaaccataagccagaattttgagcttctcccaatttcaactttttgggaggctgtctcatatggacaaaataccctcatgtaatttagaaaattgcactgatgtcccacactttctgtttggagtcacgaaccctaatcattctctcttttgttctctctcgcattcctcttttttcgtttgttcctaaacttcgctcctcgtctttgatcaaggtttgttcctcgtcttcaatcaagttccgttcctattttctgtttttttctttctttcgtttgtagtctcatgttttaactgaaattgttgatttattccatattttgtgaatttagtcttggtgaaccctaatcatttgatcctgtgagcgttcctatttggtttgtctcctcttcttcgatttgtcaacatcacagtaagccaatgcttcgattttgcattttaatctctttttttttattaattgttgattcattccacatttagtgaatttagtcttggtgtttgttcagtatggccatggtgcagttgtgtgtgaattcaatctttgtattgttttctttgattcccctttttggttttggtttctttcccatgaatgaataaaatgaaatttcgtgactgcacatagcgagccacatagccttgacgtcttcactcagaattgtgctttatggctttgaaattttaattcttggcatagggtgtagtagatttgtgtgtgttgtggttccaagagagtggggaagaggagatgatcttcttgtgaatagaaagagggtccaaaagagttttttattttttgtcttctgttttctctattgctgctgtgttagttttggttttcaattttggttgttgatgggttttaatggtgaaagaaaggagagaggttgggagtgtagtgtttgtgttgtgggtgaactgtgatctgtgttcatttttgtgctgctggacgttagagaccagctatgagacttgtgagaagaggataggttcctatataagagaaatttgctaaagggtgggtagtgctattacctagttttgtcatgtgtctgtgattgctgcaaaaaattggggagaagggtaagggaatctcagtttaatttcaatctcttacttgtgttgtgtttatgtgtttttctgtgttagatggaggttcattttttccttcacttgttatctcttttgtcttctcctgaagctttgatatagttgaccaaaattaagcaattatacaacaacaacaacaacaacaacgccttatcccactaggtggggtcggctacatggatcaacttccgccataatgttctatcaagtaccatacttctatccaaatcattaagttcgagatcctttttgataacctctcttatagtctttttgggtcttcctctgcctcgaattgtttgtcttctctccatctggtctactctcctcactacagagtctaccggtcttctctctacatgcccaaaccacctaagtctattttccaccatcttctctacaataggcgctactccaaccctctctctaatagcttcgtttctaattttatcctgtcgagtcttaccacacatccaccgcaacatcctcatctccgctacacctactttattctcatgttggctcttgaccgcccaacattctgttccgtacaaaatcgccggttttaccgcagtccgataaaactttccctttagcttgatcggtacctttgcatcacataacacccccgatgcttttctccatttcatccatcctgcttgaatgcgatgattcacatccccttcaatttccccatcatcctgtattacagacccaagatatttaaaccgtgtgacttgagggataatatggtctcctattttcacctctgagttagaaaccctccttcttttgttgaacttacattccatatactccgatttgcttctgcttaggcgaaagccatgtgtttctagagctcgtctccaagtttccaacctctcattcaactcctccctcgactctccaaggaggactatgtcatctgcaaaaagcatgcatctcggcgctatctcttggatttgttccgtgaggacatccagaattaaggtaaaaaggtaggggctaagggttgacccttgatgcaaaccaattgtgatgggaaaatcgtctgactctccaccctgtgtcctaacactagtcgataccctatcatacatatcttggatagctcgaatatatgcaaccctaacccctttcttctctagagctttccacaaaatctctctaggcactctatcatatgctttctccaagtcaataaaaattaagtgcaagtcttgttgggccatgcgatattgctccatcacccgccgtaataaataaatcgctttcatggtcgaccttcccggcatgaaaccaaattgattctcagtaacttgagtctcctttcttaatctccgttcgatcactctttcccataatttcatggtatgactcatgagcttgattcccctataatttgcacaattttgtatatcccccttgttcttatagattggcactaacgtgcttctcctccattcctccggcatgcgttttgacctcataatttcgttaaagagttcggtgagccaacaaactataattctttgaaatcataattatgttttatgaatgccattgttcagtcccataatcaactacttatctgcaacatgggcactgcttaatatggttctatcattgtcataattgatatgttatggctaggctgcttctgttttggatttttcaaatgagtaacaaatatattgaaggcaagcaagagtaaaactttagatttatactgttcttacctgtctaattgtgatatttaacctccacttccactgtacttaatcaataccaagacaatacttgtgctctgccctcttgcctactgaacatatttttaggcatgttatactagactagttaaatggctgctcaaagaagttgaaattccttgaaaaatcaaatcatcactgtaattttgatgcaatgtataataatagaatgtagatggcatgtcagtgtaattttgatgcgcatagccagccgcatagccttgatgtgccagatatttagcttcactcagaattgtgtttttatggcttctaaattttacttctttgtgtagggtgtagtagacaaacaaaactgttattagtattaatatgaagtgtacaagactctgattcccaaccatttccataggggaaataattctcccttttctggacttcacattattgtcagtgactctacgattgtaacagcttgtaactaggatagcttctctgtctatgagttggctttatgttttatggtttctatataaataagaaattcgtgaatgattcaatcagtcagtatgagttggctatatctctgaatctctgatccatttatctttagttatattatccctttcaattttaattactaatctacatctagatggcctctaacatggatacaggacatagagtgaattaaacgtgcctgtgctcaatttaatagttgtcgatactatgctttattttattttaatttaatgcattttctgttttgagccttggagcatcttctagaaattcttgtttattggaagacaaggttacatattcatgagatggatacatttggacaattttatattggatgacatgttcttttttttttttttggttatacattattgttgcataatgatcaaattattattaggaaggtgagtgattagattgttacaaaaaataatctaagaattacatttttattttgccaattattgatgtagaaagccgtatagttgaaccttttaatagtaacaggcacttttgtaattgaaccttttaagacctaattgaaccttttttagaaattatggaatctaattgaaccttttttaattataatacttttacaaaataattaaagaaaatatataaggaaataaataaatagttaaaatagaaatattttcattaataaaagggaaaaaattattacatttaattgtatttaatttaaatatttcatttaatttttatgacctttttattaattttaagaatataaaagcacttttgtaaattatccaagcactacttttataagctcttcaagggaagcacttaaataagtatcatccaaacacctaattaactagtctaacaagagcttttcataatagagcttctggataagtttttctcctagaagctctactagagaagcttatccaaacatatcctttattaaagttatttcttcttattctcgtaggacc

SEQ ID NO: 2407 - DNA, 1941 bp, Glycine max
  Intron number 7 from transcript Glyma20g26700.1 (locus Gly ma20g26700) derived from phytozome v7.0 (chr-ID Gm20; pos 36057220 to 36059160 reverse strand)
cagcacacaaaagactaggagaagccgtagttcaggtaagtaattaaatttggtttctaaatttattctgtttagaaaatctttcaatccagtttataatttgcatacttacctcctaattgtctttcaattatagtgtcctatagttatattcaaaattgataatacccacatgctaaatcaaagtgtggaaaagacttttggttgtgagggggctgggggagtattgtttttctttcagtggatgtcttagaatttattgggtaaaaactccggagtttgcctgaaatacagaaagtctattggaataatgttgttgaaaatattttgttttactgtaccaacacatacctggtccttttatgggaatactagttatcatccctggtgcagtacaccatttatttcatatagtatttgtttgtaatttcataaaaaagatattaaattggctgttatccaaaccatgatacatatcaataagtaaaacatgaaaattatttcaaaaatgagtgctgaaatttgttgagtttttctcaacatttttcacattgtagtttcattaaatcctgttcattatattgtagttgcattaataatttatatatttttcaagagcatatacggttataaaccattaatttgcttaaaagagaaacaacattaggttacaaatagtagttccatcttgattggggttgtgtttaacgtatctattttgatatgatgaaggggaattagaactacttagagattagagttactgattgactgaactaaaatttaatctgattcaagttggtgctcaatatcttgaaatcatagatgaaaatactaaagtcttgaattttgggctgtgtaaaaattgctaatgacaattattgtaactgaactcagttttatatgtatagcttgatagattgatcagattttggtttcataataaacaatctactacaattataacatttcatatactggcaatagagaacagagaacacggatgaaatcttgaaagacctgtgtgagagaacatttactgcaacaaaatgaaaggcagaacaatctcagagagcagggaacagtgagagaatgaactgaacagaattagttgaacagaatgtccgagatagtgccaggaaacagagcaggtgtggaaacaccaggaaggtgctggaaaaaattcagaaattgcaggggacagtactagagaatagtgggtcttgtttgacaaaattatttgtttgacttgttagaacggtaaaaatatttaaaatgggtacaagtatatagaaaatatgaatgaaatagtgaaagtacaaataggtttctaggaaaattctaggatgcaataatatcatcttagaattttggcatgaggtctaactcaatcctataaaatccacttgtaacgcaaggactgccgaagctttataaattttatttaagctatatcttttgtcaatgtgagattaaacaccaccattgaggttgcaattaaggcagctcctaaagaggctgcaattatggcttgctaggtgaccgcaattaaggcagctttccaacaaatcatcccagacttgagagaaaaattagtagacaaagagagtgtccatagtcttttccaaaactcaaacatcattgcaatgagccacctttatgctacagctgcatcaagccatcatcggccttctggatgctttaaagcctgcatctctttatttaaatgacctgcttgtctcagtgtgaattgacctacagcttgcatagcagcttgtcttgtaccattgatttatatatatttttttctatctttccattcaagaggaggcgaacaacatgcacacatttgcatggatgttatggtaaagggcttaccttagaatgattattcttgtattttcagagacttcacaaatcttttaaagaaaatcagtatcc

SEQ ID NO: 2408 - DNA, 2581 bp, Glycine max
  Intron number 2 from transcript Glyma17g11300.3 (locus Gly ma17g11300) derived from phytozome v7.0 (chr-ID Gm17; pos 8494269 to 8496849 reverse strand)
ttcaggtttttcgtgcccttatagctgttaactttttttatgatttttccttataaaatggaacatagcatatctattttgttcattatgtttttactggttctgtcttcgcactctttatacatgcctgtgtgaatttaattaagatcatgaagcctatgggtgagtttctgtcatataaggttactgaaaaactcccactctctaggctagagtatcaattgttctcggtgatactttgattttatgtgggctttaaagctattttttcttgttttcatttcataagcaagcaaaatggatcatgttgcttaaccaaatatttgaactctcacaatgtgtatgcataagtttgtgagtgaatttactcatcaacgcaagtatcatggaggaagatattcccaacagtcaatatctacatcttcgtgaatagctgaaattatattcttcatcttctaacttatcgttcagaatattttcaccatgtgtctctggttgtgtatgggttcaatttcaaaagatcagatgaactatgtttgtagttgcttcagaatgacttatatttaatggcatattaccaggaggtcgcatgtgctgggattggaaacaatggtgaagatagtaatttaaatcagctgcaacctttggttttggcagactccaagcagggtcaaattattgctcatatagatcaaacacctccttcaaaacccagcaatgtaaaatatgcgtacacttatgatgcagattttattttgggtgacagctctcatagaggattatgtctccctgctgaacaagagaaaaccccaagtggcattggcactttgtctgaacagatgccccaatcaactccagttttagattcaccatcatttgagaaggaggctggttctgatgagggtatggattgtgagttaagcaatcagatcacagaagacttgccctcaaatgtgtctgctgagagaaattcagggtttctgtcaattggaggccttaaattatacactcaggacatctcggatgatgaaagtgatgaatataatgatgaagactcatcagatgaggacagctctgcgtcttctgagccagaagagttacttggatcatctgaaagcaatgactctgaatactcatctgatagtgattcagacattgatgaagaggtagcagaagattatttggaaggagttggtggtagtgataacattatggaagcaaaatggttgctaaaacctgttttggatgagtcagatgatgatagttcttccagcagttgctatgatgaggcattggagaagttgagtggctttgtccttcaagaagcctccagggaatatgacacgaagaaagctcaatcatggaagaaacgctctgtaggttctggacctttagctttggaagacctaatgctggcaaaggatccaagaagcatctctgctagaaagaagcatgttcctcggttccctcaatcttggccttcacatgctcagaacagtaaagcttccaaaagaattcatggtactgctatcacacatccacatatgttaaagatccaatgttgttgtctaagttctaagcttttaatttaagtaaatctctttgtcctcattgaatttacttctacttttcaaatcccaaaagcattgaattttccagtcgaagtgggtcctgacaaaaacttgttggaaacaattgtatgcttaattcgtgtagaggaatgttagtagcatattctctaacactcttttcaacactctatcctattgggtgaaattcacatgggttccactaaatatgtaggttcccattctccatttggttagtcctattcctaaactgttgggattcacataaatttcaaccaatagaagagtgccagagagtgtgttgctggaattcctcatttctgtttcttcagtttgatgcatgagctttgaattccatgaatactttttggtaaaaatatcatagttgatggaatcgtggtacaagcttatgtggatttcaccatccgtgaagtttgaaactggaaatggtgtgtgtgtgtgtgcgcgcgctcattcattcattctttaagtttgacgagatagtaatagtatagagtttcagccacttcattttgctaacgtagattctatacaggtgaaaaaaagaaacttcgtaaagaaaggattgctgtaaagcgcagagaaagaatgctgcaccgtggggttgatcttgagaaaattaattcagtatgggataaaaaattaattatttttcatctgcaatgatatatagaatgagtgtcccatagtcatcttcttctcccttgcctgtgtatctaaactttcaatttgggttccttacacattatccaggtcttgtgatctatttctatatataccaaatcatataccattctttgttgagtgtaactttatcttttcaaagttaaccatgttggacttagatgaggtagtgtatgaatattcaaaattcaaattgttcttggcactcacatctctacctaactctttttttttttttttttggaattctagaaattagaaaaaattgttttggaggaagtggatat

SEQ ID NO: 2409 - DNA, 1624 bp, Glycine max
  Intron number 3 from transcript Glyma08g24660.1 (locus Gly ma08g24660) derived from phytozome v7.0 (chr-ID Gm08; pos 18832537 to 18834160 reverse strand)
gagcatttcagctctcaaagatttttgaggagcaggttttttccacctttatctcgcacctagaatatgttctgtaagatatctcccaatttaaatatgtaattaatacaacatgatcaaaattttcacaggacaacattgcagtagagggaagtgatgatgaggatacagcccaacacactggtaaacttctttatttcttttttctcccttccacctattgcccaaagaaatttactttttgaatacccaatttattttagaggttttcgggataacttttaggaacagttgaaaatttttggggttactaaatgtctaaatgttattaactttactcctgtgacatgcatataataatatgaatgattatacaatagattatatacgcattaaataaaacattataggttcattatattatcctaggagaattaatttaaacctcatgatatattttaattaaagatggttttcttgtgaaaataaaatgagaagaataaataaataatataagttttactacttctctctaagaacaattacttttgacatcattatgctaattatattcccaatcaaattgagcaatttaatcaatagatagctccttgtaatttcattagaattttaattaggtccctattgtgtaaaaacttttaatgaagtccttgtagttttaaagttttataattaactccgtaagaaaccgaagagactaaatggctaattcaattaatctcagtgcctactgccaagcaattaaagttgaatcatactcttgctttttagtggtttagttatcattgaacacctttatatatacaggggatttagggatttgatgataaatgtattttaagaaacaaggttttgtgtaaaagccaagaggttgctcaatattgataaatttttaaaactatcaggatttaattataagtatttaaactacagggacctaattaaaaatctaatgaagttataggaacagttaaatccatttagccttaaattaaatacaagtaaaatagactggccacatatatgattgcagatggcttgattattaaaacaaaagctcatgttctatggcagcaatttgattgctgttggttgtgatgactgtgtcagtgggagatagcatcagtattgcctctatgtgtcattttgcagttgctggctacagtggcgggctcatttaggagtgtttttatagagtggaaatcaagggtgtttcatggccaattcataactatagaagccagtccactaacatgcaaaatattcattttgcccacccccagttttcattagccagcttatttaagatttattttaggatttcctaccatgttctgcttctgaacctctttagggttaatttttccgtttggcaaaccagcagctaaaatgcagaagctctatttttctagagtctatgtcaggaaaaataagaagaggaagggacagaatgatgaggtggtagagagagaaaggggtgagcaaattgtgtgagggattctgttatatggggatcgtgtagggagagaaagggtatgatgagagaatcatttttcagttaggggcagagaaatttctattctctgaaggagcatagctctgt

SEQ ID NO: 2410 - DNA, 2771 bp, Glycine max
  Intron number 3 from transcript Glyma20g23310.2 (locus Gly ma20g23310) derived from phytozome v7.0 (chr-ID Gm20; pos 33193267 to 33196037 reverse strand)
gaagtttttaccatccttttacttctaaaagctaggtatgttcttttaatgcatatttgcattgcatctgtcttgattcttgacttgttggctttacatgtattgttaataagattatcacttggaatttgtcctagctttggaggcatttaagaatagttttatgattaatttggttttttgttcccccatggtatcaaaatgtaaaattttggtacacggtcagtgtgaagattttttcatggtcagccaattagaaattgtgcttgatataacttttaaagtaagtattataaaaagcaacaatcgtaccataaatgacaattcatgattggatgacagtataaaaaacatttacactgtcattgtattctaattaacttctaatatcaaaatgcttatgatacttccaaacagtctttcgttgctagcatatttgacttaggaaagtttacatccatttgcagtggtgcatttttatgagttatcatatcaattattcagcattagtttgaaatggtttacttctatttattttttcctatggggcttgtcctttccatatgaactacaaagttcatttattcttctctttttgtactcaacatcaatgtaggagcaataactgtggttttgatttttggttttagactgtttgaccccctggtgttgtggtgtgcaataggaagaaaagaagggtagtagtggattagtgtcatgcaggaaatgaatgaaatatgtatgattcatgttgggaatctgaattgtaaccaaccagcacacatgttaagtggcatggggagtgctaggccaggggtcagttagcaatacaatttacaaaggaggtaatgaataagggagaggcaagcaaattgcaagtaaggggttttggaaggaaggaagcaaacccttgaagtgctagcagtgtttctacatttattttctgctttctgttttgtgagtgccattaagtatctaataagattttgcaattgacatgaaattcttgatttcttctccttggaagaataaatttgatttttgagacttccaaatatgtgcaaaagcattgtttaaagttaccccaagtcccaacaccatccactcccccgaaaatgatttagccttgtgaaatttgtcaaaagctcttacatagatggctaaacattaacctggctgttctttaaacattttatctacaacttagcatggcacccaaaaaagtggttaatttcaacctcctagtgattgtaaacttgtacattttatgactaaaatatgtttttcgtccttgtaaaattggcgaagttcggatttagtccctataaaacttttcgccctcctaaaactttaatgtgtcattttttggcccggagctaggttcggttatatctgaaacaatgtgacattttttttattttaaattttaaaattcgatttatgggggttaaaaaccgctacaaattgcataaaaaatataaaataaatacaaaaatacaatttctggcagttaaaaactgccccaaattgcataaaaaataaaaaaacactgtttgtctccatctttctctacctctccagctctccagcgcatgccgccccggcaccagaccacctctctccttctccatatccaaacaattagcaatggagaaaaaaggttgtgatataaaattgaatcaccgtatatgatctcgtacacaaaccaagatgaataggaatgtcaagtctaaattaactcattgaatcaccgtatatgatctagtatatgccttaggaagagtatattcagtgaattggtgaaatgtgtagactatgctattaaaacattttaccatagtttagagaatctttctattcttaatttgaaaacatatcattctcttgaccatttaaagagaaagtctatttgattcttcaaaagtcaagatttttttttttggcaagagacttcaactttatctaaaatggaggaacaaaagcatctgcagaaaacccaaaccaatgaagacccccacgacgacgacaacaaccctgactatttgggatgtctttgacaccccgatgacctcagggaaagagaaagagaaaatcgagctgagaatgtgaggtcctcaactaggattagtgcaaccaagaagtgcagatctggaactcatagcggaactgggacaacaccgttaacgaccttgatgtgcagatgtgggaccttgaagccagatctggaatcaagaagcgccgatctgggagattgaaatgacaatggtgtgtggtgtggcagacctggaaaatcgaggaagaaaaccaaagaagaaacctaactcagtggtggggcgcaaatctttctctccttctcactcttcatctccccaaaacctctcgcacacgtgtccaatccttagtggacagtcattataaacgtaagttcggatatgattgaacctacgtccaagccaaaatttgacacataattttaggaggactaaaaacagatgaaaaattttgcagggactaaattcgaacttaggtaattttacagggactaaattttgatcatgtttgaagctcaaatgctagatctattgcgacgatagtatctttctgctcttcatctaattcactttcatttgttgtataatttttgtattttgttgagaagcaactattggtgtgtgattcttttatttttttcctttgaaaatttacacatccttttatttttctgtaatgtcacagatacccagctaatattactcttttacgtggaaatc

SEQ ID NO: 2411 - DNA, 2834 bp, Glycine max
  Intron number 1 from transcript Glyma07g09840.1 (locus Gly ma07g09840) derived from phytozome v7.0 (chr-ID Gm07; pos 8300469 to 8303302)
tttaagaggcttattctccttggtgcttctcccaggtactcttacccttacacatgtatccttcagagtcaattttgtttgatgaaatgttcaacattaaatgacatctctttcaataaagatttaacctttgattagatcactaactccttcgatctcatgtacccatgtggtcacttatcctttgctttctcttgattgttgcttggttagttatttgaaaattaagaaataagtttattttttatttggttaaaaaacaccccccccccccccccctcctatatattccgagtaaagaactttttcaacttgttatagtttttgtgatactttgaaatccttgagtttgttgatgaaaaacagtgactctcttgttgcattaatcatggacagtacttctttgaactgttttattaaatattttaatttatttaaaaataaatattaaataattttagtatgatataataaatatattttaataatatttttattttctatttatttaatcctcttaatattttattttacatttttattattatactatttacacaagagaaaatgttcacgcactaaaaatataaaatataattatttaatcacaattaatcatgataatttgttaatttcttttagaacaacttactaaaaagttatataaataataattgaatatataactattaaactctttacacgataatttttacaatattttatttaacaatatttattctctatatttctaccataccactcacgttatacaaatatatttttttttgtctcctttaacatgcatgcattctcctttcctcactgtcatttttttttttaatatttgtctcactaatcccatcatccctatattgttttgagttatacgtatgctatttttttttccttgtctctttctcttcagcgaatccttatacctagagaactgcgtttagggggtttggtcctaaaattctttctaggactctccactgcctgtaaatgtagtatacagtcgagggaaaacgaacaataactcgtcaatactattcacacacctaatcatttgagcaacttgcaatttttgactgtacaaaagataaggatagatcataatccaaataagcaataatttcttctattttttttttcctatttaaatgaactaaccagaaaccaggtaccaaaattaatgaaaaaaaaagatgaaccaaccaaaacatgtggtctatacgggattgggggagggagttcaattttttgcttgtactcttgtgctatcacctttttaagcgtggtgggtttgatgatgcactcgtgctttcatccataaaaataaaatatgttaatagaataagcataaaagctctgaactaactcaaaaaagacaaaacttcactttcccttcccactttgttgatttcaattatctggctcttttgataaaatacaatttggaagattgctccgtagcttcttttgaaatttgcacaaccaattagccggccaagtcaatttcaattagagatcaaaaagatattctctcagcatatttttaatttttaattttgattcctttaaagtaaagggatgtataaaaataaaaatagaaatatatttattgacaatttaagcggttgaagtgattaagatgtgtgttcatattaatctttaatcacaaatcttggactaaaagacatactgcagtgtgaaaaattcaatttgattctaagccgaatgggccctaattcattgcaacccaacaatgataaaaatattcttaataaagtaaagtatataaaagtaagggtaattttgtcttttactcataaatcacccttttcatcttttttcctcttcaaattggaaggattacaattattcatcggtctcacaatttttttcttctcatcttttactttttaaaatgtaccaaaagatgagaaaaaaaatattcttttctatccctccattatcattacttccatattccatctttctgaacatactataaaagatttaaattcgaacttctaaaattccctaataagttttgtttaatttgaattgtaggacctaggttgttatgattttagttattcgtgactaaaacaatatgcatagattttgacctatgttttgtttacattaattaaatctctcacctttaacttgttttcaatttcattgatgtgatgttaccattttttaatactacaatcaagcccttttttcactaggtgagacatggttattattgttgttgtatttagaaaaaaaaattggtagagtcacattaataaaattaaacctaaggtcatctttaacggtgatttttagaaataagaacttgtccttgtgatattggtactggcttacatggctgccaagtgtagaatggtacatatataagaaccgagttcttaagattaaaaaaatattttgcttaacagaactaataattttttttatataaagatacagtgttcattatgagattcattttaagttctgaagagttctatcatttgagtaaaaatttgctcgagttcttaaatcctatattgcattatagagctactaaaagtaagttaagaacctctttatcaaaaaaaaaaaaaaaagaagttaaggacctacttgatgggtttttcattgaaaatgctcttaagacctttgctttaagcttttaatgactatggtaacaaaaaatcataggttttgtaaccaactcacaggtgtcttagtatttttattccaaatgtttaattctcaataaagaaagggttagtccctctaacttgccataacatacaggtatattaatacag

SEQ ID NO: 2412 - DNA, 1172 bp, Glycine max
  Intron number 8 from transcript Glyma18g03280.1 (locus Gly ma18g03280) derived from phytozome v7.0 (chr-ID Gm18; pos 2189029 to 2190200 reverse strand)
ctcacatacagatctgcctcagcaagaaaggtatatatatgttccaatctccattctctccacatcttatcttaaatatcttaatttgtttctatatattttctaccttacgtgtctcatttaactgccgtatttcatggcatatgctaatacactagtcaactttcatggcatgtttgtattggtttccaattaccaataatgttactcaccctagctcacattgagcatcatgggtcgttaggatttcataattttggtcttgttttcttctatacccaaaaactagattattaaatcattaaaaaacaaacaataaagaggactacattggctatttaggactgtccattttctgttatcacaccttgacatctaaggaatccttgaaacctcttcttgtggtgttgtgtgcttatttgaggatatgattccagcttaatttgtgatttagcaggaagtggcttcttatctcccaggtagtgtaagtcctagtgccactagttatagtattttattagaatttgaaaatttatgaaacaaaatgaagttggtgccgtttctttgtcaattgtcgtttagttatgtatatgctatggtagtatagtcaaactaccacgggtactatgttaaccacatgttaacaatgagctgggccatgcccaactagcccaacctaacactctcaagtgttccttcacagcactcaccatgctaatcctattcctactcctaccatgtgttcatggtgaattctaagttagtactatttgcttcactggatacttcacttgtacatataataataaacatagaagcaagttccttaaaatgaactaaaatattgaaattgtcctctttatgatcaagaaaggaataagttaatttatgatgacaatgatttctaatttttatttttgtttataataatgtccaaaaagtgtttcttaatttgattttgcagaatagaaactacgttcattatgttttatgaatttttatgcacatttatatacgtatcttatatgtataattggatacatactgaatcttatacacatatcgtatttgtggttgacactattggcacatgaacagttcaaaaaacaaaagttaacaatttggaagttcatttcctaattatggttatttgttttggtattttaaacaga

SEQ ID NO: 2413 - DNA, 2226 bp, Glycine max
  Intron number 1 from transcript Glyma08g43320.1 (locus Gly ma08g43320) derived from phytozome v7.0 (chr-ID Gm08; pos 43153188 to 43155413)
tcctctctgatccaaccgaccctgaacttctcgcggtacaactctctctctctctctctctctcacttttcaataaacaaaatttaaattttttcaacaaccctttcaaatttgtgtccctgttcgatttcccatttcttagtcgcgttagaaactaataattttgttggattatgtgattttgactcgttggcaatttgtttctgtttgaagattgagactttgtgtgaacatgtggcaatgaatatgaaatgcagcccaatatgttaggtttcgataatcaactgtagtttttttttttttttttatagttgaatctagcaaatggggctagtctctcacgaagtagagaaccaaggtctgaatccctattaggagatgttaggtttcagtattttatttttttgtttgtttaaattaagtttactagatatttttgtagcagcttttgcaatggtaaatgggtgcaaaatattgaggattgggattagcagcaagaagataagtattctgtacatgttacaggtgttaccttcaggcaagcgaagcctatattgcaaccagtcaaatcttgtttgttattttaaatctgctgagctgcattggcataattaacaaaattatttcattctagtggaacattgtcctgccctgagaggagatataaggttggcccagtggttggggaagggtggagggagaagggaggggggagaggtcatgggtttgaaccctcccatttgacatttctaacaaaaactaacaaattaacatttgtagataaaaaaaaattgtcctgccctgagctagtgagctagtgagacttgtagatgttatattgaatccaacttgccaatgagggactgtttggtttgagaaacggtttctgttttcactttatttcctgttttcagaagtttgcataggaaatggtgaaaacaactttctattgttttctgttttcactttttcctgtagaagttcagaaaataggaaacaaaatgaaaaaaagaaacattttcttgaatcaagcgacccctaaaatgtgagatgttctcataaaactaaggtctgatcattttcatttatgtaaagttatgttctagaatatgtacacatgtataatatacatataaaataacacaaacaggccatattgaattcacaatcctaactagcattttaaaagtatgttctgtttcaaaatgcatgatagatgtcactttaggagattatgtataataagtaagtacaactggggaacaacaaccagagaaaattgagctacagcccacataaatcagacatgggggaagtagagaaccccaaattcagtccaagttgaagtgacacagtccagaagtccagagctcagtcaatgtcaatcatcccagttgcatagtgacatagcttagccaaggctgtattctgtagaagtcataatcactagaaggaagattatttcaaagagaaaagggttaaattaggtttgagctcacttgactgggtgggtgtaatcttgtaggctgtattggtttttttggccctgctgcctgactcatgaacatgcttttgttgaaattttgagaatggctgaaaacatgtgattcagtgcacttttacatgttggcatgcgattcatctccaatcgcagcaaattgatagagtatatgtctagtgtggactaattacgtactgtgtatgtgttggggagatataaggttggccaatggttggggaagggagggaggagaggttgtgggttcgaatccccccaattgacatttctaacaaaactaaatctaacatttgccgataaaaaaaaactgtgtatgtgttggttaggtttctgttatgacaactgtacttggtttgaggcagttactgtaactgtagattagtcggcttatcagagaagcctgcgtctgtaggatataaataagagtctctaagtttaaagactcagaatcaatatgttgatttttcagattagagaaatcagctcccaatctctctctttattcttcttactctctcaagtttctacacaaattgtgttctactcccacctgggatcagggtcacagaaactggtgcaacatgttgaattgtatgattctatgatctagagcatgattttgacctcatgattatgtcaaccaatctaatatttccaaggctagttttatacttaaatttcttaaaattgtttgatattccaggttc

SEQ ID NO: 2414 - DNA, 2910 bp, Glycine max
  Intron number 1 from transcript Glyma08g06450.1 (locus Gly ma08g06450) derived from phytozome v7.0 (chr-ID Gm08; pos 4621402 to 4624311)
ttcttcagtgtttccctttcaggttcttctcataattctaattttgtttgattttcttacgacccattaagcatatttcataattagtaacggatcatgtgtttccttagttaaaggagggacttttatagcttttctggaatagtgaagacttggggtctttgatgagaaaaataaagaagcatttttagagtatgaatcattgaatttccaacgtttcttatttattctaattttaattttggggtacaccgaaagaaaggagtgtagaacaaatagaggattcaatttccaagtaatttgcaatgtggggtgaatttggcgtttgtttgaatgctttgattgatgaaattttcccaattagttattatccttgttttcttatttaattaagtatcttagagaggttaagatctattgtttcaatttatagctccctcgcactttgccttctcaacttccaagttttccttttggtagctccaaggatgctacagtctgcgggttttcaatcattcacttgttattctcttctgctgctgttgattctttctatcatccccttttacgtgcaagtgtggaactactgagctcccctggctcacttgtcacttacaataaagtattgaatcaaaataaagcttctcaacttcttctccctccagttaagatgtatgtctcttccaggcccataaactgtgtttctgcttatttgagtttgtgtcatgtgtgcatggcattgatgatgatgatgattctgccatcatgacttgctagttgcttcaaaggaaaggcaatagacacaacaattatattaccttctgttatggtgtgatcactggaacatgatgagcctgcttgtgttcgtgatagtaggcagaagagggtttcgtgaagggaagtgagagtgaacaagaagagaagaagaagaagagagagagagatcgtgctaaatgagtgagagttttcttattcattataggaatacagtatttataggccgttatggggcctttggcgggacagtcagttatgccacatgtcacatacggtttgcatttcatgccctatgtcggtggtttcaatatccttactttcttacaaacttcgatcctatcatttttaatgccggggtaatccccgtaacagtagccccgaagctgtgttactttgtagaagtaataccagcttaagagtatagaagcgaatatcttcccgtaacagtagcccccaagtcagtgttgcttcgtagaagtaataccggcttaagagtatagaagcgaatatctttcccgtaacaccttctaagggaaatatctaatcaagtgccccataatgcgtagtagctaatgtaggaaaggcaatataggactatttatatttattatttaaagcttataatcatatggaaatccttcaaggaaactgtagtgatacataaatgtatatatatacactagctgctccaaacctgttggtttctcagttgatttcgtattttatgtctattatttcctatcacagcattactttttgtatatctatgtcttcaaattgctctagatgtatcacatgtaaattttcagaaaaaggctaatatcataattttaaactttggattggtcatcaattcagtaattgattaaatggatttcgttgaaaaaattagtgaatttaaccaaactgattagggactcaagctaccaaatttccattctaagtggggccaaacttatttgagttttatatgaattgagttacttagatttctctcaatgtaaaaatattgatagaatttatagaatatgatccttttttttataagcatttgcctagtgatattttatattcattttaagtatttttctttgtcatgatttttgattcatataaaatcagtcttatacctttacctaattgcttaaacgttttggagagttgcggcttaatatggtatctgatcctttagaccatgaccaagttcaggaatttgatagttgtgggtccttgttcttgtaaaaagagtttaatttcggcacaaggtagattcgccttgtgaattctctgcaattggcccatatggattcttgcattggggggcatgctagggatataaaatgagtcttgtgcattcgcttcatagcttaagatttaagatatctgtttattatggccacctcacaattgtgctagctcttcagtgatccatcaaattctcatccacacagtgcagctcattggtcacatcttttcaccctctcccaaatcttctcttgcctatttcttactgcctccatcatcgttgtcttttgtttgtccacttcggtctttgtgcacaaatggacaaataacggtttaatggatagaataatctcatcgtatgcataaaagtatttatcaaatattctttatgtttgaaattttttgttataaatggaaataatgaagtttggatagcttttattggaagctagggaaaatagtttattcatgggagattttacaagttaggtgatgatttgtgacactgcattacagaatgagcgtttatttttagtattgtatgcaggaatatggataacagcactggatgtagttttgaatttgttttgttaattgttattagaatatgccaaaataactagtgatgttctcctagttttgtggacaaatttgagattgaaacataataaaccattctacattgagtagtggagggcatttattttcagaatcgagtgagttttgaatcacttgatgcttataattaaaatagagcatactagtataaaattaaatttaaatgcatgtcaacataaatggcttttgtttatagaagaatataaaagaaactgttgtttgcttatcaactatgttctaattgagatgatattggtttgcagatatttg

SEQ ID NO: 2415 - DNA, 1653 bp, Glycine max
  Intron number 1 from transcript Glyma04g42350.1 (locus Gly ma04g42350) derived from phytozome v7.0 (chr-ID Gm04; pos 48113115 to 48114767)
acgacgctcccattcccgctcacaagcatcttctggtcagccaatttcttctcttctctttcaattgagacgaagcatgcgtgttgctctccaattttaagtggtcactgtatttttttccggcaaatgtttagtttttcttagtagcaggcatcaaacccgcgacctttcccccttcccttctttcttaacctctcaaccaaccttatatctccggtttaagtggttactgtgatcacagtgtccgtggtctgtgatttagttttgtccaattgattttttcattgatcctcgtttgtgctgattttttttatatatacgaaaaattgaagttatgtgtgaaaggtttatgaaatcaatttgtgattctctaatgaaccatgtgtatgtaagctatggtcttgctgtttttttacctgtgtggattaggtttcatgcgtatctggcatataacatttgaatttagagtaaactgtcaattaaatggtccttacagcagaataaaattactcaagtagtactagaagtttattagaaatcatgttgaggattcccttaaatattgaaaattcctccaaattagtcgctgaattttactgaaatacaacaacttaggactcaactgatagatattcaatactttaggaactacttaaacaatttttagactttagggtgtctatttaggatagagggtaatagtttgagaatgaaaatggtggtttattctttgaatttatgaattaaatgatgcagctttttttttactagttcaataatggatgtgatgattttgactgtttgataactgagaggtgagagcaaataaggttttaggcttttaggagctattttgaaatccatgctagggaggtgaataatggcctgtttggcagaaattttatcttgggcaattgcacataaaatgcggcgtaaggcatgttttcctgaaggggggaaaaatgcctccgtcaactgaccctctgattcctgacagctaaaacaatcaagatttaagttgatgacaagaaacttttacattgcatgccatagtatactagattgtgttacctatcttgtccaaaatcagggtaggagtgaagtagtagtataatatgctataataatgatcaaatgagttgagaaacaatttttaccaaggatatgtatggctcatgaaaggctataacttttattcgtacttttagttttttctttctgttaactgaacagaaggaaatgccacctaacttgtttcctaatccaaaatttggcctttcttcttatttttgtttttgtaattttctttaagaaatgcttgacaatggcctgtgaattgactctgaatttgtatgcagattagattcaagaatcttgtagttctcaccacattgaattggactcagttcggatatgtaaattgattaacaaaatttaacacaatatttttatccctgactggtttatttaaccaataaatgaggcaagcatcacaaatactttggatattgctttccggtgcagttaggcatccttgattagatttgctacattgatgttgctatgatttattcttgtgttttggctgttcttgatgaaactaatgatgttttatgatacgattaggttagtcgctctcctgttttcagagca

SEQ ID NO: 2416 - DNA, 234 bp, Glycine max
  Intron number 4 from transcript Glyma07g03820.1 (locus Gly ma07g03820) derived from phytozome v7.0 (chr-ID Gm07; pos 2640379 to 2640612 reverse strand)
caattctagggggtaagccttcgttgttctttcagtcatccattgtatgtagtagattttgaaacatgtttatgttttcccaaaatatcttcatttaattctttgtttataatgcttgtatatgttcctaggctgtgttgggttcacttttaatttgtattatctcttgtagagttgtagttatgttgagatctgattgaattcacttttacttaatcagggcttctggtgagc

SEQ ID NO: 2417 - DNA, 704 bp, Glycine max
  Intron number 3 from transcript Glyma11g33210.1 (locus Gly ma11g33210) derived from phytozome v7.0 (chr-ID Gm11; pos 35000845 to 35001548)
agttaccctccatcaaaggtacctagctactacctataaggtttttgtagacataattaaataaaatcttagggcatattacactttatatatcccctttttgtttcacgcttttccaactaattatattccattatgctttatcatcgtttcttattactaagaacatctttaattggtttcttgaactctcaagaactaattagtttttttaaaaaataaaattctgtgtaagtaaaatttaagaatttaaattggattttatcactaaaataaaaaatgagaattttttttttacattttatgtaatattatgagaccaacaaaaaatgatctaaaaatctaaaatgagttctttcactgatgatgttataagtcccattataatttggattaaaatgaaaataataactaataattttaaaatcatagttaaattaagtatgaataaaagtattcaacttttttttaactttaattcaaacttgagaggagttgggtaagttacaagataatatatatctaatggctgtcaaatattaaatcattatattttaaaagtcgtatagtaagaatgacttctgattagtcgttagtgtaagaaaattaagattgacaatacatgtttattaaactagtgaatcatatgcacatgatatgatatgatttgcatgcaggtggatatagcactagagtgtgcaagg

SEQ ID NO: 2418 - DNA, 968 bp, Glycine max
  Intron number 3 from transcript Glyma08g16580.1 (locus Gly ma08g16580) derived from phytozome v7.0 (chr-ID Gm08; pos 12152789 to 12153756)
atttgaaatcccttctcagcaaattgaatcactcagtaagttcagttatcttctagtagactaatactctttcacttttgcctgggagcctttggtatgatttaagcgcattcatgattggctaaaatacacaaactgcctttgacttctattggtgcatagtcactccccttatctaacttttatctaaattgataatgaaatcattctacgtaaaagaattgtaaaacattcacctcttattgatctagtttacactttaatcgtgatggaaatgactaattcttatgattctaatctttaataaaaaaaaatggattgcaaataattttagaggttttatgttagctactatttatttagattgaattattattaagtctctcatatattgttcaaacaacactacttttatagtcaaggtatctgggtatgtatttccctaatcatgaaagcattgtaattgcaagaactatctgcccttaactgtaactttgtgtagcctcaaaataactacttgccattgcaattctatttgtagatcaatccacaattacataatatatcttaaattatatggcctttctacttcacatgtcaatgtatggtaatttatgccactttatttctcagtagctttctgttctcaggttgacctatgcatggcagggtagctatgtagttattctcatatataccctgcatttttttttttctcaagtccgatgagtttagttataacttttcttaggttggatactttaaatgtttctactccccactgtaattaattatgacttcagtcctaagctcaagtagaacccttagcccttgttccacatcagagtgagagaatacttttcttttatgaagtaatgcttcatcatttttagaaaagaattacatttttcacatacttttttctgggtgcagattagagagacagggttcttagtaattgcaagcgt

SEQ ID NO: 2419 - DNA, 1106 bp, Glycine max
  Intron number 3 from transcript Glyma13g36940.1 (locus Gly ma13g36940) derived from phytozome v7.0 (chr-ID Gm13; pos 38144699 to 38145804)
ttgagagtacatctgggagtcgtgatctacaggtaaataatacatgtagctaggatttgcgtgtagtcacagagaaatggttttggtatcaaattcgtagaaccctaaaaaagaattctgaccttaatcatattgtattcttggaaatgaaattgatttgaaatgaaattgatttgagcatctttgtgtctttcctcttgatttgcaggactttttgcattagtttctctactttgtcccttgattccttttttgatggtctgtttgtgtggacattatgtttcaactgatatttgttccattatgtttcaccactgacatgattgccacaactgtgaaacataattgttatcagattgtaaaaagtacatacaaattagtttattttcattttctagacatgctattttatataggaattttgatgtcagtttttgtgtggattacaaattagtttgtttttggatgacaagatttaccttatgaagttcaaatgataagatttaataatataattttgaatctgttggaatattggttctttcatctagttgaatacattccaatctagtaccccatcattggaacttaagtataagatactgatgaaaaacatctatctcaattttaatatcagcttagcagctttagaacctgatagatgccccctaatctgacatgatgtaaacagatttacatcacctcccatttggtgttttaaaataatttatttctgaattttgaagctgttagacatctgatatttggctttgaagtataaatatcttatgcaaatgtttcgaatactctaatctacgatttgtcttttcaagtttagcctttgtttctaatgggtgaaggtatctgcatccatactctttccatcactatctgcatattggcctttatcccactgtcctgtgtcattctgtacctttttagctcttctttgaatgataggatgctggaagtttcaattaagactctctaggtaaaaaatctttgatttctagaaaccaattaacagggcaatattgaccttttattgattgcacatacaatgttatacaggtgaaaattggacttcgagttcttactcgcccgtt

SEQ ID NO: 2420 - DNA, 2506 bp, Glycine max
  Intron number 1 from transcript Glyma01g02270.2 (locus Gly ma01g02270) derived from phytozome v7.0 (chr-ID Gm01; pos 1783645 to 1786150 reverse strand)
tccttttttttctgtgtggatctacacccactaaggtaattaactcaacacctttctcttctgcattttctccacctttcaatcactcttttaatatacattcctataaccatttcaccttggaaccttaaagtttccgttttgcagagctacttgttccatacacatggttgtatgttttgaatctgattttttaaaatctaatttgaggatgaaacccctctcactttaacccctttaggtggctaattttgcaaggttcaattgcaatctgttttgttgcataaccctatggctatgactgtaaccgtgttgtcactaattaaagttcccatttttcttgcttgatttcttcctgccacattatagactgttactagaataactttatagttcataccctttggctcagattctttgtcttttatgatctgggtttctgtaataatttactagttgcttattgacatgtactcatgttggcattgcattctattgatttttttcaaaagtggacccccaagagctgcatctcaagtggtactaagtcttgggacctgtattgtccaaacctcactgaggtggttttgcatgtactgtagttaaccctcattttccctccctatacaaacttgtgcacctcctttcaaggctgtaaacggcagtctcagtcacatttgtggtttcaagtgatccttgacattgcagtcgatgcagctgcaattgcgggcacatgtggttgcaaagagtctaaaaagcttgatgttgctgctaagtttgcagtcacacggaccgttttttaaaaccatttttccttcataactgaaagtggaaaaattcttaaaattggtccactttacgtctgcaggattccttatttacctgtcctagtgtgccttgcccttgtcttttggacttttgttttcttttttggaagagaatacacaatggaacctacttgctcacttttgataaaacatttggatgaatttgcagttaaatgcctgtattgaattgtttatttacttttgttatttattatgtctaatgaagcatctatggataagatgagtggttgatgagctattatgattccacatcagctgagtatatgaccaaattatcctttataataactttggtgagccttcattcttgaactagttttgtaggttgaattaggtttagtacattttcatctaatacaagcttttgaaagacatttcatctttctatgtgttgttaaatagccactatagtggggctatagcgcttctgctgcattatggaatttcttggatctgcaattgtgactccgctgttgcggctgctatgggaatttcttggatctccaattgaactttgagttaatattatgttaattttgtgcatttgatttttatttgcctacaacttaattttctatacatatataattgatatatatcatatatttcaattgctatgcaacttctgctattggcccgcaattttatctgctatatgatatagcagattattggctttccgccattttcagatgttctgcaattgataacactggttgtcataagactaataatctgggaaggttcacctcttctggttaatgactgcctctagtctctggagcagttaattcaagagtttcatagtatttcatttacatggcactttcaaaaggaagttaaatttcaaaagtgaactaccaagcataaaattcatcataaaaaatgatacttactttacaaaaccctaagctgtttgctgctaagagtcccaaaactaacagttagcaaattaggtggctagttctaagttcttttaacattctgactatttcctccttttagcatcacaattggccagttagatggctaggctttcagagtattttagcgttatcaataagatgctaaaggcatgtcttgcatgaactagaaatgctctgacccttttggtgttgtgtgccttttcatgcctttgagtacactttgatgggattttagcgaaaataatataaaaagagggctgaaagatatgaaagaggagagaatcatcattttgcataattggcaggatagcttttacattttgcaggagtgatataaattttttgatttctaattttaatataattttgtttttgttttgttccattattgacatttctttgtctttcataacatgtatatttatttaaaagttttaacttatccttgaggttatggatggagcactgtcagaaaagtggcctctcaatgaagtgcagacactattttgaagtagttttttctcggctttatttgttggtgattatataatatgattaattgtgatactggagaggctactgaagcctaaagggaagcaatgtagactaaaaggctagcttgctctaaaaaaaaatttcatatgcatgcatcacgaggaatgacattaaatgattttctggatttcatcgctagctgacgtgattactgcagatgttacccctattctgaaa

SEQ ID NO: 2421 - DNA, 2816 bp, Glycine max
  Intron number 3 from transcript Glyma13g20420.1 (locus Gly ma13g20420) derived from phytozome v7.0 (chr-ID Gm13; pos 23892132 to 23894947 reverse strand)
tcacaattcttcaacaaatactgctactgtctgtggggactaaggaatctaaggtaacttaactttttgatgtaaaaattgaataatttatcaaataacaacttagttgcatggcaataaacataattcagagtataatctgatagacccgatgcttacagcaccttcaaactagaaaccaaaattgagtcttgattgatgaagacaaaggggaaagagagtgaataagagatctaatcatgtaactgaatagaaagatcacacacaccgaccatagagacaactgtttcaccttttatatagccaacacaggtacaacttattttgaaggtgagaaacacttcactcttcctgttcagcaagtagatccatacctttcttgagtaatcatctataaaggacacaaaatatgagctaccccctagaaagactttctcaaaagggccacacacatcaatatagaccaaattcaaaaatgttgaagacttagttggtatttcagtactataagacttccctggttgtttggattcacaacagctgtcacactttactaggttgttgtatattagccattcctgtaacaattttattattactcatcattcgaagccttttaaatttcaggtgaccatacctcttgtgccatagccagcttttagagtcttcaatgattgagagacatttttgatcttgctgaacctggatttcaatcttaaaggtcctattgcttgatacgggtgccttgataatcatcctacccttttgataaaaaatcttcatgtagtggtcctcaagcgttgtcttgtatcccttctggagcagctgtcccaaactcaaaagttgttgtgcatggtaggtacataaaggacttcattgatcaaggaccttttaccattttttctgtggatcaacaccctcccaagacattctgccttgactgtgctgttatctgcaaacctgacatttttttttacagaatcatccagatcaatcagccagtctttcctcccagtcatgtgatttgagcgccttgtatctaggtaccattcattgttggtagccttgcctgaatcatttgtcaccatcaaaagaacttgatcatcctttaagtcactctcctgaaccagttgtgcttgatcatctcttgtcttttgtgtcttcatggctttgcactaagttgcaaaatgaccccattctctgcaataccaacattgaatatgttttcttctggagttaccactcttaccgctatattcaaagcccttctgccttacttgtgacccactatcatcatgattggtttcatcagcacttgaatcttcagtgccatcctttcttgttcctttcgatttatggctttttggtttaaccttccttttactactgcttgagccatttttgtatctccttccactctgagtaagtaaggtctgttcagatgacctatctatttccctctctttgattcttttcttgtgtgctttaagagagcattgaagctcatccaatttcatttctgtaaaatccttagattcttctattgcagcgaccacataatcaaatcttgaactcaaggttcttaaaacctttaccacaagatcttgatccttcaagatttcaccacaagccatcatctgatttgacagactctgcacacaatttaggtattcagctataccttctttctcattcatctgtagtagctcgaattgtcgtttcaaggtttgcatcttgactcttttcaacctatttgacccagcgtagacctttgcaagaatgtcccaagcttgcttagttgatgtagctgaggcaatcttggcaaagttttgaggatccacacactggtgaataaggaagagagccttacaatccattttcttggattctctgaacataattttttgttcttcccctgcatctttctccaattcttaaagtcctatcataacagactcaagagcatcctgcattctaaagatgactttcatttgaatgcaccatgcatcatagttcttctcatcaaggattgatagatgcgttggaagcccgttcccattcatctctacaacaatgaagctttgaggatcccacataggaaccaaacaagactctcccaagattattggaaccataagctcttgataccactaatagacccgatgcttacagcatcctcaaactagaaaccaaaattgagtcttgaatgatgaagacaaaggaggaaaagagcgaataagagatctaatcatgtaattgaacagaaagatcacacacaccgaccatagagacaactgtttcaccttttatacagccaacatagggactctgcactagttctacaaaactaacttgcagattggtccttctaactgaaaaataacataaacaacaaactaactaactttagatacaacttatcaagggctgaattgatatttttaactaactccaagcttcaacataatcatcacttcattgaagattagaaatactattaattattgtagaacttcacttaaccatattttagtgaatgccttttaaaaaaacatattttaatgaatgataagttgatttttttataaaaaaaattaaacagaaaaattctttttattttttggttttgtttactttaatcaagaccttcatgtgtttaaataaaatattatgttttttgcgtcttaacactccattccttcttaatcctcaacttatttttagtccacactagagtttgtgaatcttgatattcaaaccaatactatgccaaatttgcagctctgtgggacagaatctcttaacaggtacacgtg

SEQ ID NO: 2422 - DNA, 1350 bp, Glycine max
  Intron number 4 from transcript Glyma18g43130.1 (locus Gly ma18g43130) derived from phytozome v7.0 (chr-ID Gm18; pos 52464784 to 52466133)
gaattaaacatatatcacgtcaaaagccatttgcaggttcctatagctttctcttactttcaattttgtggtggagatttttcccctttgaaaaatgtgagaaatgtgaaaggaatagtgtgtgcgtgatctttctaaactcaattttgcattgtagttttataaatttcactaaaagaaaatgtgttactacacatgtacatctcataataattgttatataataaaaaataataagtctctaaataatttttatttcattttttgaatgtaatattaattactattttatttatttcttatataatattaatgatgaacaataaaattatataaataaattaataataataaattaattttataaaattagcactttctattaggatatagagaagtataatccagcaattttactttgtgcaaataatccagcacttgactcctacatcaattcaatgggcattaaaaatgtaattattcaaaaaaaaaaaatacaaaatagtgcaaaacttaacaggcaaggactacatcattcacaagtgtgaacctataaattccattagtcaatcgtgggcttaatggttaaaatctcattgaagtaggggtccatcatcaacttactcacaaaattcataaagtaaaaaagtagtagtaattaaaacgtttacagtctaatattaataataataataataataataataataataataatgttatattcaacagaaaacctttattcatacgctactgtattgacaactactgtcgacattttgttttagttttttttttcttaagagaaaacagaaatataaagtgtctgaagtaaattatgaataacgataacctatttttcatacggtgttttgcctattttatatattaatttattaattaaagaaacattcaatatgtgtaattgtgaattagtattctttatatatatatatatatataataataataataataataataataataataataataataataattattctaaaaatacttaaccataaatgattttcaccatttactatttttctggctaaaaaaattgttaattaatctagggtactttaagaaataataattaatacaacacagttaaaaaaaaatcttataaaagggataaacaattttttaaaattgtcttataaaaagagacagagagtagaaattttgaaattcttcaactttaaatgccattattcagatctaaaatgtgaaatcaaataatttacttggaaatcaaaataaagttaggttcagaaatctaataagttctgcacgggtgttttcagaaatacaggatctccaaattgattccagagtccc

SEQ ID NO: 2423 - DNA, 1260 bp, Glycine max
  Intron number 1 from transcript Glyma14g33960.1 (locus Gly ma14g33960) derived from phytozome v7.0 (chr-ID Gm14; pos 42375695 to 42376954 reverse strand)
gaaagaagcaactgacggacggtcccttctaacctgtacatcctctttcttctgttttaatattaatcatttgcacaattctctctcagttttaaattcttttttttttaaaatattgatattgatttcatttactatatggttgattggcctctaaatttctccttgtgttctgtttttttctttgattttatagtgtgaatgaaaaaaaaaaaacggttgtgggttctggaagttgtgactcttaatatgtaccatttcaagcttatgtttttttgcttcggtggattagaatttctcttcaaaaccggtcttttattcatttggctgagtttatttattttgtcattttttaaagttaattttccaaataagaaaaaaggtgaattgtggggatgtgaaaaaaatatagtggtatagtgttgtatctgtgtttcgtgtatctagtttcaaaatttgtgtttagtttggttatttgtcaatcacaattcacaactgggttctatgcgatctgcacagtttgaatgatgcatctctttttttttttgtattgttaatttggtgggtgaaactacctgcacagataaagctgaaactgaatcaaaacattaatacatacctaatattttaaaattgaatttactaatcaagaaagagagggaaaagcacactcatgaagcccttaaaaggtgaaaaacgcggttcttgtgaaagtgggagaggggtggagtgtacctaacacccctatgatttggttttctctgtttttgtcattttaaggtgtgcaggtgtcatattaattagaggaagttttatttatttataatattatattttcaactaagtttttttgcaattgtacgtgatttcttagcctcaggaagactgctactgcaagttaaagtcatgccggggagggactgtttgatgtttcgtcattttattgttatcaaccaacgggttgttgcatgcttttatatatggcttttctggcttttttgttgttatcaacttatcatgcttcctttaagtgttaaagatattctggtagattttttaatttccctgttctgagttgtttctgcagttattaacttaactctaatgttcaatagatcggctattcgtgtcaacttcttgatctctctgagtattcttgttatcctagacatgttggaggcttcctatgcctttagttttacagcagctaggggctgaagtcaaattttctaacatgtatttgatgcagatattgagctt

SEQ ID NO: 2424 - DNA, 3258 bp, Glycine max
  Intron number 1 from transcript Glyma13g26890.3 (locus Gly ma13g26890) derived from phytozome v7.0 (chr-ID Gm13; pos 30073097 to 30076354 reverse strand)
cccttttgatcaatccatcattccaggtctctctcttcaacttgattttactttgtccatttccggggttctattattgtcgctattattatgattattattcctttggtgggattaaggttttattcatgcgttgtgttcctttggggatttttgttcgtatttgttgtagatctgtggtgggtttggtttggaatatgatgaatttgttgtttgaggttagggttttgattgtgtgaatggatgaaacagtttgttctatttaaggtttatgtttgacgtgttctttggattgccgaggctgttccctttttctgcttggtcaattaggtggcttggattatgtggaattgtcaacgttcaaaattaagtgtcttggattgtttgtgttcatgcatgtgttgctgttggtcatggctttgctaccaagtcttttgattctttagtatgtttttcgcttgatgtgtgagtattggttttcatgggaaaacacatatcacacgacccttttggaagctgagtctagtttgtgtgttatttggtgaagttattctaatatgcttgcaagtggtttacaactttaccttttcatggttgcaactgtgcgtttcttgcgtcctaatgcactttgtttcaaaggaaaattttcttcctactaccaaatgctgagggccactgtgaaaacaaactgtttcctcttgggatttgacttgggctaaactcaaagttgtctgaaatgcttttttggatcaaatacaaggtattccttgagcgataattggagaagttagcttcaagaggtggttgtatgtcttcttaaagtgcaaaataatggagaacatgagggattcgcacaactcatgtcttttgcagttacttgtattctaaagaaattggtctgcttaatgtatatgtagacattatttatgaagggataggaattctaccactatcatatctcaaacatatcatttcctaagaaattgaatttacttgaagggtaatcagattttggtgagaactcataccatttgtagttttgattcctgagtcttaggttgtttagatcacaatttgatgccaggtaggtaggctcttttacagggatgggtgttttcaatctttgtgactagtcagtatgtttggatgcctccaagttcttcctttggacctttttcatgtgatctctttcatcaatacaagaagctagatacaaaacttggcttgttttagtagataagaattcatgttaggaagctatttttgagaagggggcaatttttaatagggtatttactttttgtcattttattcttgccttttttgactttgaaactagttcgatgacccatgtggccatgcctacaaatttccaccaatgacctgatcttgttaataaactttcttttttctttttcttctgtattgtcatgggcttgtttatttgtgcctagtcaggattgatcaaaaccaacacagctccgcatcaagttttcatttttttaataagtgcataaattcacactgtcatttcttttgatcagtttctattgagctctattacaagtattaaaggatttttttaaaatttctgccaatgtgttcttcgtcttcctgtaattttacattgacaattttttttttggttccctttgctcctagtcttatggactgaggacaacctaatatagctgtgttacatggttaaatcttttggtgaaaaagtttaatgatgtacattgcctgatacaagatgtttttttttgctcaatttgagcactgcaatcttagaaaggagttgtgtgagtcagtcaggccttgaacaattaaatgttttttaccttattttttccttagtttgtttcttaatattcatacaaatcagttatgtctcttaaaattgtagtttcaaaacctttggtggtgtatctgtcctattaatcggaattttcaatggtttccatattcaatttttacattattgattctctctattttaatctaataaacttctacagtataatatatgtaaactttacaagagatttgttgttctgatcatttggaagtgtaagtttcattttactatcatggtatatttctacttaattcatgtaagggatagcatgataaatagaagtcgaagagtaaagaaaacacaatgccaggccatcaacaaaaacctttattaaaatggtcttgcatgttgacaaaacacagtggcttcattttatccatttagctgactccaacatctagtgttagtatttttttacataataataagggtatcataaaaatggctctgaagccagaaataaagattaagtagaagaatccatttttaaaacatttaaactttttcgttaaatcatcagcatttggaatgtttttgttttgtccggcaatagtaatttttattagagaagcaccagtagtgctaaaagtatacatggttaaggatcatctcaaataaccaaccacgtacaagaacaagcctttgagtgtctcaactaccaacccaaagcccaccatacatggccatacgtccatatcccacccttaatacccacccaaagaaaatgaatcttgacttatacagagaaatcctgcatacgaatggaatgttaatgatttatgtctggtggaatgtttaatatttgaaaaatattgggcaaactgttcatattattatattctatgatattctattttatggtaatacattttgcaggataggaaataagacttcccaattggtcaattataaaagtaaagttgagaaataattaattgtaggaatgtattttaaatgtctaatgctgatgcattttggctgcttgatgtgttccgtttgctttcataagccagagtttgtaaatttgttttaaaactgagtttggggaatgccatgatgcatctttgatcctctcaatggaacatcaggagagggtgataggttcaacatagaaagatggattcatgatatagttgtcagtggtttttttgcctatagaatattacagtgttgtttgatccatttacagtcaacgtcaggtgaaaaggcttggtttattgttgttgtttttaatgaactagagatgtgaatttaatagcttacttgttctgctatgttataattttaactgtttggtgaaagtaaaaagaatcactgtagaattttagtttctgccttcctgattgattctaatattttttcccccactcacagggcagccagtagttgcttttactagc

SEQ ID NO: 2425 - DNA, 1127 bp, Glycine max
  Intron number 4 from transcript Glyma20g11610.1 (locus Gly ma20g11610) derived from phytozome v7.0 (chr-ID Gm20; pos 16418980 to 16420106)
ccttttgcgctttgataccccggaaacacttaaaagtaagggttgatctttatgacttataacttaagtgcttatttttaaatttgataagcgtgcagtttttgcaatactttctttttagattgttagatggtagatttaaatatatttttaatccgtgtgatttagtgttttttttcctgtaactttatttttattttagtttttgtaaaatatttattttgttttttattcttaaactaccttaaattggatttttttattatttaaaatattttttactgttcaaaatactatctaaagcattataaggactaaaaataagataaatattgtaaggattaaaatgaaaaaaaaaatatttaaaaaaaataaaaaaatgttaaattgtagggatgaaaaaaaaatttaatcctagagtcaaatacattttacaaattgctgatacaaatgtactatagatgccaaagactatttttctaaaaaaaaccaagagttaaggcttaacatttgtttttaatctctaataagccttctttgcctatagccctttgaacttgaactaagagtaaagcttataggaccactccatgctgtattgaaatttaactttaaattgagcagcaagtattgaagtcccaataacttggtaatagaagctccagtatcttgtcaattaattaagggtatgtttagataattttttgaaataatatttataggagaaaattttaagatagaaaaatgaaataagcttttctataagttaatttgtataatctatctcatattagattctccgaatttttttttaatttatggataggttaattttagtttatgaagaaacttaatttattttttcttattttttcatcctacaaatgcatattaaaaagtttattcaaaatagaccatctcacttttgtatctaacaattaaatcaaaataggtggaaaccaagtttgtgtctatcacctttattgggaactctggttaatatagcgaaccaaagctcaagtggttgattacttaacactaaaagataccacaaaatgcaaactttctctagctctggatgaatgtgagttttggaaatgcaggggacaaatttttttggttttcag

SEQ ID NO: 2426 - DNA, 855 bp, Glycine max
  Intron number 4 from transcript Glyma09g39870.1 (locus Gly ma09g39870) derived from phytozome v7.0 (chr-ID Gm09; pos 44849841 to 44850695 reverse strand)
atctataactggccatctgatcaggtattgaactaatcttggtaaagtgctgcattccttttcttttcattcatgatagtaaatgggagcaactttttctatttatttttcccttttaatatcaacacagttttcttaagattgtgacttgtgagtgttaaaactattgaaacttggttaattctgtacttattggaattctctaattctgtagccgagtttagtacattttgcgcttcctgagggataaactggaattcaacgaacatggatgttgttgtatttttgttttgtagaaaaaaaaaattctttatatgtaaaaatttgtcaaggaaccaaagaagtttcactatatatggatccatttcaccgaggacttttcttggacatgaatgttacggtagtttattgtgtttttttaaaaaaaaattcttacaagctcatcctgttatgaggaggtatatgtaggtgttaggtttataaaatagaggggaggtagttgaaaaaataggaaaatctagaggatggagtattttattcttttttcattattaagtgacattattctatactgtcaaattatctgccttgcataatgttgatacttttttaaagtttattattgaagttttctagtgattgaggtatctagttgtaattgtgattactttatttcttctcactttaactgacttcaacgaaaaatgttctggtaactgggttacagttcaattgctatgcacatacatgccttgccataatttaggagctttttggttcagtgagtagcaaacttgctccttgccctgatttattattggttataactatcttgtttccttgtttcaggtagac

SEQ ID NO: 2427 - DNA, 9732 bp, Glycine max
  Intron number 1 from transcript Glyma20g23760.1 (locus Gly ma20g23760) derived from phytozome v7.0 (chr-ID Gm20; pos 33513671 to 33523402 reverse strand)
gaatccctcgctaaggtttctaatttgcattttttaacttgttttctactgtgttattgttctgttactccgttagttacccaacttatgtattgttccaagggctggcttaaggcccacgtaagggctttaggttaaaaaaaaaaaaagaccccaaattttttttaatattaatatacctcaaaaaaaaatttattgtaaaattatatttaaaaataaattttaattaaaatattataaataattgttaatttttttattagtatcgtacataacaattaatgagcaataaatcttcactaatatcataactttgtttagaaaaaaagagatttaatagttaataataaagaaaccaaaatttttttcttttatttctattctcttatcttcctattcaattctaattcggtcttcttttcttgctatttctcatacttctctctcttctcacatgcttcttcagtttacttgattattgttttactttgacatattaatcaatagttcctcgatacttatttgtttattctcatctcttatgtgcatgtgtctttatttagaggataaatgcaaaagttgacatttcttccttttaagtgtgtcaataccaggtaaaagccaaaaatagaactcagtgtactcttatttactcaaattttcttttgttgataattattacatacttacatgttcctttatcaaattatagttgtattttctattgaaaaatgttaatttaataatctaaaatcttatacataccgtaatagtctcattattaagtccaaaaaactaattttaaataaaataataataattttaataaactattttatgagtaaataaaaggtttcattcttaaatttgttttaggccgcccctcattgttccacaaactttgcaactaactaccacctggatcgatgtggggttgatccaactaaactagaagacttgagttctgatttggatatccggttgtgttaaatacttagagagaactttgttacgttagtggtcctatggtgctcaaacagatttcctccggtggagtatgtggtctatacaaaaaagtaaaaaacaactttgcaactaacttaactaatttacatcgtttaggactcgagagtaggtcttcttgagggtagatgttttccttgttgctggaatgaataattagatctgattttctcactattctgtcaacttgatgctagctagtttaatattttagggggatactttaatttgtaagttttcatgcaatgctctctaagactagagagtggtctaatctgccagtcagcgatgttgatatgatacggatggaggaaaaataaaaattgcatagcaaaacaattaagtcacaggacaagccatgtcagcaaagcagaggtagcaaatgtacaggtggaagtagggggcatgaggagaagtgtgcatgttggacattttagtgtaattgatctctttattatgttaaaataagagtgcacgcttgttttaatgtaataacgagatgttcggtttaggcaaaggttggaaattacatggaagttactaaaacttccatcaacggttggaagttacatggaagttactaaaacttccatcaacggcaatttttaaaaataaataacttccatcaaccgccaaaaaccacctgttctttgattataaataatcattctggttcagaaagcataacatgtgaaaaactcacaagaccaaaacaaaactcttgaattataatcttctgattttatccgattgaacaattttggttgaaccccgaaatttgattcaatctgaaagtgtttatacacgacttcagatttatccaggattatctcgattttcaaaattaaccaacaaaagattgaatcaaatctttcgagatgacgaacgatagttcgaagatgacaagcaagtttgcaaagttggacaagtttgaagggcaggatttcagaagatggcagaagaagatgcactttctcttgacaacattgaatgtggtgtatgtgctgagtacaccgatgccggtgtatatggaaggcgaaactctggatcaaacaaggaagcgttcgaaatgggagaacgacgattacatttgtcgtggacacattctgaacggtatgtctgactctctctttgatatttatcaaaatgttgagtctgctaaggaattatgggactctcttgaatccaagtatatggcagaagatgcctcaagtaacaaattcttagttagtaatttctttaattacaaaatgattgattcgaggcctgttatggagcaatataatgaactgctgcggattttgggtcagtttactcaacatgatttgaaaatggatgaattcattgcagtttcatctataattgataaactgtcttcttcttgaaaagacttcaagcataccttgaaacatatgaaggaagagttgactctggttcaactcggcagtcatttcatgattgaggagtcgctgagggctcaggaaattgacaaagtcaataataaaaccgtagcaggttcctcttccgttaatatggtagaggaaagtggaacagttaagcaaaattacaatgctaaaggtaacaaacgaaaatttcaaggaaataagaacaaaggtccaaacaaacagacaaaattgtcatgttggaagtgtgggaaacctggtcatttaaagagggattgccgggtgttcaaaggaaagaacaaggctggtccaagtgggtctaatgatcctgaaaagcaacaaggtcagattgtagtgaataattttaattcgaatacgaattcaaattatgtatcactaatatctgatgcattctatgtgcaagatgatgacgttgcttggtggtttgattcgggagcaacaagccatgtgtgcaaagatcgtcgttggttcaaggaatttagaccaatcgatgatggctctattgtgaagatgggcaatgttgcaactgaaccaatcctaggattaggttgtgtgaatttagtttttacttccggaaaaagtttgtatttggataatgtcttatttgtacctggtattcgtaagaacttattgtctggtatggttttaaataattgtggtttcaagcaagtacttgaaagtgacaagtacatcttgtcaagacatggttcgtttgttggatttggttatcgttgtaatggaatgtttaaattaaacattgatgttccttttgttcatgaatctgtttgtatggcctcgtgtagttctataactaatatgacaaaatcagaaatttggcatgctagattaggacatgttcattacaaaagattaaaagatatgtcaaaaacaagtatgattcctccttttgatatgaacattggaaaatgcaaaacttgcatgttgaccaagatcactaggaaaccttttaaggatgttaaaagtgagactaaagtcttagaccttattcatagtgatttgtgtgatttgcatgctactccatcattaggtcataaaaaatatcttgttacttttattgatgatgcatcaaggtattgttatgtatatttattaaatacaaaagatgaagctcttgataaatttaaaatttataagaaagaggtagaacttcatcaaaatgggctaatcaaaactcttcgtacggataggggaggtgagtattatgatccggtttattttcaatctactggaataatacatcaaactacagctccctatacaccacaacagaatggtgtagccgaaaggaagaatagaaccttgaaagaaatggtgaattccatgttatcctattcgggtttaagtgaaggattttggggtgaggctatgttgacagcctgttacttgttgaaccgaattcctaacaaaaggaataaggttaccccatatgaactttggcacaaaaagacaccaaatttgagttatctcaaaatttggggatgtagggctgtagtcaggcttacagaacctaaaaggaaaaccataggtgaaagaggtatagattgcatatttattggatatgctgaacattctaaagcatatagattctatgtgctagaatctaatgattctgttgctgtgaactcggttatagagtcacgggatgctatctttgatgaacaaaggtttacatctatacctaggccaaaagacatgaattccatgtcgaaagtctcagttaatattgaggatataccttcaactagtactgaaactagaaagagtacgagagtaagaaaagctaagtcatttggtgatgactttcaactctatttggttgaagggtcaaggaatgatattgaatttcaatatcaatattgccttaatgttgaggaagacccaaagacttttagtgaagcaatggcttcaagggatgctgtattctggaaagaagcaatccaaagtgagatggattccatcatgcaaaataatacatggaaattggttgacttacctcctggatgtaagccattaggatgtaagatgatctttaggagaaagatgaaagtggatggtactgttgacaagtacaaagccagattggttatccaaggctttaggcaaaaggagggtattgattttttcgatacatatgctcctgttgctaggatatccactattagactgttgttagcacttgctgctatccacaatctgatgattcaccaaatggatgtgaaaactgcattcttaaatggtgaattggatgaagagatatacatgaaacaacctgaagggtttgttatgccaggaaatgaaaataaggtgtgtaaactgatgaaatctctttatggcttgaaacaagcgcctaagcaatggcatcaaaaatttgatgaggttgtgttgtctagtggttttgttataaaccaagcagataaatgtctatacagcaagtttgatactcatggcaaaggagttatcatttgtctgtatgtagacgacatgttgatctttggtaccgaccaagatcaagttgatgaaactaaggcatttttgtcttctaagtttgatatgaaagatatgggggaggcggatgtgatcttaggaataaagatcaaacgtggaaacaatggtatttccatctctcaatcacattatattgagaagatattggataaatttaattttaaagattgttctccggtaagtactcccattgatcctaacctgaagctattatctaataaaggtgtagcagtgtctcaacttgaatactcaagggcgataggatcactcatgtatgcaatgattagtactaggcctgatatagcttatgctgttgctaaactcagtaggtttacaagtaatcctagttctcatcattggcaagctatgaatagagtattcaagtacttaaagggaaccattgactatggtttgacatatactggatttccttcggttattgaaggttactctgatgcaagttggataaccaatatggaggattattcatccacaagtggttgggtattcctccttggaggaggtgctatctcttgggcatccaagaaacagacctgcattacaaattcaacaatggaatctgaatttgtagctttagcagcagctggtaaagaagctgagtggctaagaaatctaatctatgagattccattgtggcccaaacctatacctcccatgtctatcaggtgtgatagtcaggcaactttggctaaggcatatagtcaagtgtataatgggaagtctagacacttgggtgttagacacaacatggttcgggagttaatcatgcatggtgtgatatcagtggagtttgtgagaactcagcataatttggccgatcatttaaccaaagggttaagtagagatctcgtaaaaaggtcggctgtgggattaggattaaagtccatctgaaatctcttatgttaagatacccaattcccatctaatatgacattaggtgttgaattcaatgtggaaagcttaacatgtagagattggaacacatcatcgaaagtatcccaaaaggtatgtgttcggttctgtaagttaaggaggttgaagtataacttctcaatggttcttttgaaaaattgcatttacaggtgcaagaaagaaaaggactacctatataagcatgaagtttagccgcttcaagaagctgggacttggctttgatatgcttatgaaggatagggacacaggctagtaaaactagtgtcgagcaagagtaatgttataaactattgtgcagattatcttcatgtattcattatgaatagaaagggttcaatccttagtgacaccctgatattcgaatatttgaaacgtgtaatttgctaagatgaaattcaatcgtcacgatatttcatctatgcagtagtttgtggtatgttatgactttggtgatttgatcggtaattacactaaaatgggggaggtttgttggacattttagtgtaattgatctctttattatgttaaaataagagtgcacgcttgttttaatgtaataacgagatgttcggtttaggcaaaggttggaaattacatggaagttactaaaacttccatcaacggttggaagttacatggaagttactaaaacttccatcaacggcaatttttaaaaataaataacttccatcaaccgccaaaaaccacctgttctttgattataaataatcatcctggttcagaaagcataacatgtgaaaaactcacaagaccaaaacaaaactcttgaattataatcttctgattttatccgattgaacaattttggttgaaccccgaaatttgattcaatctgaaagtgtttatacacgacttcagatttatccaggattatctcgattttcaaaattaaccaacagtgcataggaaggtacctaacaacttgatgcgtgattttgtacagagcaaggatgagagtagagaaattatcgtatggtttaggactaccgtggtctcagacaatctccacctgacataactgaatcgaaatgtatgacatgaaaattagttgggatcatagacatgtagtgatcttagactaatttctcgtgagaatgggggatataaaaaagggtaggcagaaaagggtgtttctgaattcttgagttcaccaccaaatttccttttgcctttcttaataccacatatttgatttgaacatagtgaactagaggattgtcaccttctctagtaatcctgctttaatactaagaaaatggagattactttaatcgagtgttactgcctatattttgcaatgagttgactgttacattggtgccctcgttaactcatggctgacaaaacaagactcaaggagtcagcgactgatctgaaagacttgaaatgaatggtggatgccttaaaaaacaaagagatcaggggtacacttccatatttaaaatttgatacaagattggaagaattgaaaacactttgaaattgttgactaaacaaacttcgttggtcacaggtaaaggtcatggtgaaccaaaccccctactgaagagctcatttaaacaatccatttaggtaaggaatgttaagcttggctttccaaagtttgacggtactcaggttttacaatggacattcaaggcggagcaaattttcgattattatgagattcctgatgagcatgattgacaatagctggaaaagggtgcccttaaccggttccagattattacaagaaatcaagcttttccatcttggaaagtgtttaccagagtcctcaaatcagagtttggtagttggtcagggaggatgatgcatgcgatcaagaaaaattaggatcttagtaggacattaatgggtgggtcattatgggagctcctaaggtcaacttgtttatatcctaagaggtactacttgtataggctgatgaatccagcgcatttcgtttacctcatcttttaactgatatgatttcgaacaatacatcgcccactcagcccctagctttggagaagcattggggcttgaagtcagaggaacattgtttaatttaaggaccaatgcccttgattctttggtctttggtttatcatagattgatctatggcaaaaaattctgtgatctttcaaatgcttttactggttaaagaggaaaggataaattagaaatttaaccaagaagaaatacatttttatcggaaaaaaaaagaaatccttgtatgcaggtgaactagtcttttggaaaaaagttttgtggtactgaactagttgaccatattattaagtaatgataggtaccaggaaatctgatgcaaggagggaaatgaaaatactttattcaattaataaacatcaaacacaagttttgagggcgagccctggtgcagcggtaaagttgtgccttggtgacttgttgatcatgggttcgaatccgggttaggaatgtactctctaccacactttactgtttattaaaaattattggaaatcacaaaattatttggttctcactctatatccaatgaatccacttgttattttttgtagtttttaataaattttaacttatgggaaaaagtgtattagaaagaatatgttagaaagtgtgttgctaatacttcttataaaaaaaataacccaacaaattgcaatagaaaagaaaaagagaggtttgtgatggttgatgtctaggttttgcatcgaggtgatccaaaacttgacagtaacaacgtatagaatggtgaaatggagaagaaaaaataggaaatagttctaggctttttagaggcctagactctcccactaattctctgcctccccttgtatacccctcctcccaacctatattctctcgaaccatacacacttctctctctaactttctgccagcttggcagctagttacaattttctttttttgtttaattccattcaggtgcaccacaccccattttctggccttacacctgcactctgcttcactcttcttttctaaactttagtgatcctgggccttgagcttgtaccaaatgataactgtttgatgattgtagaatgaatctcaatgtaacgctactaatggtcattggtggaagaggtatagcaataaaaatctaaagtagaagtcttgtttttatgaatttaataaagtttttggtaattgctgctgaatgcagtcacagtaacattagaagaatgactttgagcaaacatcatcctctctataattaactccattttgtgaaaaactcaggaagttggagccaattgtatcagtagggagctaatctcctgtggtttccaatgcaacttcaacacaatctttaataaaagctttctatttattgattccttaactagtgtcttaagggcacttgttagcaagactgcaagaccctatttttttttatgttaatgcattctcattcataccaatacaggacatgtaagggcaattaaatgacaaaatgcaacttacgtttcccataaaagttaatatttagtggagagatccaccatgcataaaggcacatacttgaaactgaaatttgcaattttttaatgttatacaaagtttgacacaatttgttttggttggatcattctgattcataattctaggagcaaaattttcactgaatgtaaaacaattagtatgattttcctagaaactattgtcaagtgttctttaggatattaatttgactctgctgaattatatatatatatatatatatatatatatatatatatatatatatatatatatataacaaattgcaggaat

SEQ ID NO: 2428 - DNA, 5430 bp, Glycine max
  Intron number 17 from transcript Glyma02g48070.1 (locus Gl yma02g48070) derived from phytozome v7.0 (chr-ID Gm02; pos 51492730 to 51498159)
gaggtcataccttttctggttttagctgtaagtctttgtttttatcattctcaaggtaattttatgaattgctattagagataccatatttatcttatataagtattatgcaagttgaacggagtaagtgcctgtttggttgcctccagaatcatgttacggggagataggggtggggggaccaaaatcaaccagtcttaatgttgctggaccagtaatggaaaggtatattgaagtttctctcgaaattttttaaccacagccagcaaaaaaatagagcttgttccaagactctctgtccatcaaatgcttcgcctgaaaagcccaatttgttcctttgataccatatacaccaggtgagagaagcccacaaggtatgccacctattctgaattagcccaggcagatgacagtctggatgttgtaagaaatgatgtgctggatctgctgggaaaaaagatttgatttgtacccaagatagacattcccaccacataggcaacacctttgggcactgaaagaaaatgtgtgacgcatcctcctgttgtgttaagcacgacagacatctatcgtcctctaaatctacattccttctccttagattcttcctggttggtaacctgtcctgaaccagtctccatacaaagtgctgaaccttgctgggcactttcatcttccataaatctacaaaaacctccttatcattgttttcctccacctgaccctcccaacttggcaaaccatatgcacttttggctgtatattccccacttgcatgaagtttgatgccatttctagttcacttttcaacaggttccttctccgtctgaaactccattcccaaaccccttccgcagctgaccccatttgttgtacctcatgatgttgctgttctgaaatgctgtagagtctcgggtatttccccaacatcgactcacctcctctgactcaaccatcttcccaaaactttatctttttaccactccccaatttccacctcacagcattattaaactacctgccttcctctattgtcccaccgagagatttctattggtctgaatatttgatactgtccaaaattcagtctatgtttcccctttccagagattcctgcttatacaccagtgttagacttctctaggaagccaattacagtatttaactccaactaacccacaactttcttaatagactatgatagttgtcctaactaaggtagtgataccgatgcacaactatatatatagtgatgcgtgcaaaggttaatgagatgtcttctctagaatataatgccatagaacatttgacttcataaccaccaaataagtttgttattgcctaaacaatgtgactaagctattgcaagatgaattaaagatatgaaaatacttatgctaggtttcacagataaagttgttgtttggacagaatgagagggagagagtggagagatagagagagaaatagaagagggagagaatggagagacagagagtgaaatagaataggagacccaagacatatctacaacggtaaacggtgcaactggcgagcacgctcgcatggtgagccaaatggaagaggcaaaaacagtagagagggcgtgaaaaactggagggatgctccagacattcagtcattctacttcactcgatttgcagaggaaatgggggagaaggagatgtggatgcagtttaagaagtggggagatgtgagagaagtcttcatagctcgaaattgtaataagagcggatggaggtacggtttcgttcgtttcaaaggagtcgagaatgtgaaactccttgaacaacgattagacaacatggtcattggtggccttaagcttcatgctaaccttccgaggcacacgagggagatgaaaacagagaaaaggccaatagcaaaggtgcagaacagggaggggatgaacaaaagctgagcacgagctgatgatcaggaaattaacagaaacaatgacatacccagcacagaaggaggcagtttggctaaccacaataaacaacaacggtcaaagacaaggtcgtatgcggatgtagtggcaacagaaaccaaaagcatggggaagacaggaaatcaaaggcaaaaacagcagacatcaataatatcacactcaacaatgcaattgaacatccctatggagcagatgaacagattcaataacacatgggttgggaagttacgaaaactggacattttcgacagattggaagaggagcttatgtgggaagcaggacaggagatcaggcctatatacattggtgatgacatggttctcttggtaggtctcactgactcacaagcagaacatatgtgtaaaaacgaagacgaaaatggaatgtcacttttccattcactagaaaaatggagcccaggtatgcaaccgggaaacagactggtgtggctgcaatgttggggtgttcccttacacgcatggaacatagaaaacatatcgaagattgtggcagcggtgggagaaatggtggaagtggatgaagaagtggaagaaatgcaaagaatagacagagctagggtgttaatcagaacacctcgaggacccatgatacaacacacaatcacaacaatgattaacgggtagaatatgcaatacacctggctgaggaggttagccaaaactcatgcagacacaaacaaggtccgttgagcatgtttgggtcttcagatgagatcacctccattgatagtgaggctgaatcactcacgctgccagacaccaactccccgaaagaagaaatcacggtgacaaaaggaaaaactcatggtgaaggagaagaggattctggaagtggtgacaaaaccaaaagacccaatggtcaaggacatgacacaagactgatgggtaatacccagccaacactgttgcaacgtcagaatgctgatgacaaagacccaactgctggtacagagtctgatagcatgggaaacataaccggtgcagaaaagtgaaaaactaaggcatattctgggcaagaaccatcagacaacaactaggactggacgttaggggacaatctggtggaaacaacagagatgaaaagagagtggaaaagaaaacacaaatctcgaaaaagaaaaaacatggtcagcagaatttaaattaaaggggatgaagcaaaaggtgggaaaagtaacacaataacgggtcacaacaaagcaaaaggtggggaaaacagccatggtgtagacaacaattgtgggcttactgccactgggccagaaaaccaatgaaaggtgtattcaagaaaaaactgcaacaaaaaggaaaataaaacagaaagagatcaaggcccaaacaaggaccaggctaacaaagaaaacacagtagctgaaggtgtcaaagtcaacattgtgaatgtatattcaccttgtgatgtgatactgaagcgcaatctgtgggagcaaatcaggcaaatcaggcaattttggttacattgacactttctttttggtggcaaaagattgcttatgttcttttatttgtagctgtggatgtcattttttgttggcctctttaacaacttagcatcaagaatagctttcttaatggagatttataggaggaagtacacatggaacaacctgttgcttttactgctcagagggagtttggcctagtttacatgctttgtaagttgtacatgttttagtattgtattgcaagcctttggcatgactagaagtgaagccgattattccatttcctaacaatgtcaaactcttggtcaatacatttaacttgtttatatagaggacattgtcgtcaccaataaatattaggatgctattgaatggtcaaagcagaatttgttcaagcttttctctgggtatagaagttgcacaatgtggatttcctagaggaaatatgccttggatattctagaggaggctggcatgaccaagtgtaagcctgtcaatacacccatggttcccagcataaagcttttaacaagacagaggaagcattaccagatcctaaatgatattgaagaattattgggtaactgaaatttctcccaataacttggccaaatatttcttttgatgtgacagtgttgagtcaactctttgatcctccatgtgactcgtactaggatttcactgttcaggtcttagatacataaaagagctataggaagatggttactctctgactatgaggatatgctgatcaggcaggttctcccttaggcattcttcctcaagatactgctctcattttggaggtaatctgatatcttaggaaagaagaagctgacatcaagcaatggcagttgcaatgtgtgaattcgtatggctaaaatagtttcttaaggagttaggtgtttgtaaatagaaattcatgaagcttgtgtgtgataatctagcttccctgcataaagcttcaaatccaaggtttcatgaaagaataaaacacatttaggttgattttcattttgtgagggagaagaccatcctggagaaattatcacttctttcatctcactgtttcagtgagcagctgttacattttcaccaagattcgttgatgtcctcaagttaattatgtatgaaataagtttgctgtaagactcctatgcaacacctttagaggaagtgatataatgttcttagaatttgagtttgggcctaattgaacactataaaaccggcttgtaagctgaggaatgacccccacttgtatactttaatttggatgtatcactagtcgatgtaggatctccaacacacacacctcatgctggggactagacatctcaagcgtgaagtttgcaggattggacagttgcggatagtcagataacagactgatagagggtggcttaggataacaaatgttattataattattagaatgtaggaaagtaaacactaagaattgttttatttggttcatgcatccttcgagcaattgtgccataggaagtagcttaaattcatttttttgtcttgtaaatactctcttgatatatatatatatatatttttttggaaggcaaaattatagtattattaatatagaaaacatacagtaccagaggtactgaatgaaacagatacacagcactcaaggtgccaccttccaaaaacaaacccaacaaaaaaccccactattagatatattacaaattaaccgaaggactccagaagattggtagaccactggttaaaaggaatattaaaccccactctcttgatatatataaatataatatatgctgactgctactttcttaagataattcagaaccttctaaatttgggtcattctctaaattcaagttttattcatttttgtgactttcctgctttgttttctgcaagtgtggtgagatttcactttttgtttttttggattttcatttttttgatcaggttggtgttgataac

SEQ ID NO: 2429 - DNA, 478 bp, Glycine max
  Intron number 5 from transcript Glyma03g26370.1 (locus Gly ma03g26370) derived from phytozome v7.0 (chr-ID Gm03; pos 33795296 to 33795773 reverse strand)
tgcaaagttgggcaatacctaagtacagtcaacaagtaaatatcaacaatttcattctttataattatatatgtattttttttatcaatttgttgtatatttaatgaaaattatttagtatatataaaataaaatagaatattattgttttttgtttgataatgtcttcttaaaatcctattgaatattgcacatcaagttgatatgtttatatttaactttttggatgttgaatgttataccggctagattcaaatctaattcgttatggaattgtctacgaaacttattatacaaaccaataatgtcagtatttaactaacaagttaaattattaccttttcatatgctttattcaatataattattttagggattaattatttcagcaaaactttaatgtaattttatgtgatctcttgtttattatatgacaatatgtaaaataatataactatgcatttttttgcagtacttc

SEQ ID NO: 2430 - DNA, 1851 bp, Glycine max
  Intron number 18 from transcript Glyma20g00320.1 (locus Gl yma20g00320) derived from phytozome v7.0 (chr-ID Gm20; pos 127385 to 129235 reverse strand)
attcccaaaagctaagtgttgcaacaaaattcaaggtacgttagcttaattataaagtgatccgaaacatcatttatcacaaaaagatttaactgaagtgtgatctgcaagtatatggaattgcaacatgtaatatagagacgtgtatcattcacatgaggattataactcgagtactgaattcacaattgaatctctatttgaactaacaaattcagaagagtatggatgagtatccactaagtgagaaactaaaattgccaatgaacaatgagaaaattcactcaaaacaagtgaagttcagaaaattagagactcattctctcaaaatctcatatcatgcagtcagtcatgctcttaattcagatttcaaattttcaatgcccagttgatgatcaaattcataaaatttggtcaattccaatccctttggaattatacctatctcttaatcgaaagtcctatttccttaggcgagttcaattgagacatgcattaggtttaggaattcaaaagatcacataactatcaaccccaatcctttgataatcaatcattgtgctgtttacttcagatccaaacaattcatcaatttttcaattgtgagaaaaatcccaaaatcactttatgaatgaccaaaatgagaagcgaagcaaacaatcaaattgaacatgaaaaaccatagattgaaattgcaagaattggattacacgaattcaacttcaaattgggagtcttcttcccattacctaagaatttagcaaaacatagcaaaaacagaagaattaacagaagagaagtggaaatccaaaacatgaattgaagataaaatttcttattttcacaaggtctcagcccaaaaatcagagaggatgagtgtcttgattcctgttaaaaaaatgacataggtgccaaaatttgatcaagacatctatttataggcaccgggcatgtacaaaatgaaaatagggtgtgtacatggtgatataacagtaacacttcaggattcaagattgatgtttacacagtgaagaaaaggtgtgttaatgctattactccaatagctattttacgtttacttaattggaacatgcacataacaaaaataataattgtgtacacagtacacactgaggtagcagaagcaaaatcctttggaaacaactccatattgggcacataagactattggtgtgcacatgctaatgctccaataaccagttcaatcactttgcttcctttctttcccttgggaacttcctacgtcaaccaaaccaaaatacaagattttgatgtaatcaagatggaaaatcactgaaatctaaactaatctatatggtaatggatattatacaaaggaagtagtatttactatgaatctccatcaaatgtgggaaaaatgtatggaattaagctttatttgccctccaaatccacttatggaatggattattatacaattaagtggatttatcacaaaaatccttggcagactaatatttaattttgtctcagtatttcttttaattgttatgaatgaataataattaaatcatgtcacgtattttactgaatgaatagttattgtaacatgttttagctgataagtaggattgggtacagacacaaatattgtaattttgtaggacgcaaaatgtaagtggggtgggaaatagaataaaaattctcgtgtattaaaccacgtattatttgaaaagtagatgatcatcaacttccccctctactaaaagcaacttaaatattctttttcacaggtagtgatattatcgcgctttagttgatattaaaatgatttcctctgtttgtgtccagggtcaattgtttcaactg

SEQ ID NO: 2431 - DNA, 1032 bp, Glycine max
  Intron number 1 from transcript Glyma14g04010.1 (locus Gly ma14g04010) derived from phytozome v7.0 (chr-ID Gm14; pos 2673058 to 2674089)
cactgatttcggtctctctgttttttacaagcaaggtcaatatttctcacccttctctcttctagtttagtttccgtggaagaacgtgcatgacatgtttgttttctagggtcatggaaacgatttgcttagcatggaactaataattggctcttctgttatgtttttttataattaaattccaccatgcataaaggttttaaaaaacgctatgtgactacaatttcgttcaagatttttggaatttctgtgattgtattgattacacttatttagttttttaccaatgaaaatttcttaattgaattaattgaattttttaagttattttttatgatgatcatgatgtcatatcatttgtaagaaattgatacacgatttcattcaaatgataagaaactctcacttttatatttttaaattattaaataattaaacacaatgacattgaaaaaaaatagttagataaatatattttttattgatgataaatagtttattgtagaagagacaaatattaattttaagaaattctctctatcacatagttttactccaataaaaaagaaactgcaaaagaataattttttcacttaacaaaccctccaaaaaagaaacctccattggagatgttgtaagaaatcctacaagaaacagtttcgtctacaacaagatatttgaaatttctgtgattttattgattacacttgttcgtagttttttacaatataagaatcacgataaaatcacaccgtgacaccaatttaaaacttttgtagcagatattgataagagaactcataccatcagtgccgccttttaatagaacttctctttgatttttatttagagtttatttgctataagattgaatgtgtgattaaacatcaatatcttggagaatgcttaagctataagtgaacagaatcatcaatatatttgttgcttgaaataatcttaggatgataacacaatcttcaaattcgaatgaagcatactctaacatggaattcatcccttttgacaggagag

SEQ ID NO: 2432 - DNA, 2042 bp, Glycine max
  Intron number 1 from transcript Glyma16g06180.1 (locus Gly ma16g06180) derived from phytozome v7.0 (chr-ID Gm16; pos 5605931 to 5607972 reverse strand)
tcacaaaggtggttctgctcaagcatagatcaactgtaagcattctttagattcttttaatttgatttttcttaattagcattgaactgatttgtttaaatttatttgttaaaagaatacttattttaatcaaataagcaattttatgtttttttagtgtgtttgtttaaactgtttctgcttaaaaaaaatattctgcttattttaagaaataaatcttatatgtttcttaaaaaaacacctacataaaaaatatttattttaaagttgattttttaaataaaaaaaattaaacaaactcttccataagtaccacaacttctcctcaaattataaattaattgaggcattggagttttatttggtaccaattggtgattggtttaggtgatagatgtctgctttctttaaattgtgaatgaaaattttgtttcctgagagtgttaatttgatcatgttatagatgtcctcatttaaaagatcttcataaaggatacttgtgatttaaacccaaaagttgaagctttatttgattaaaacaaaaatattgagaaatgaaattttaaggtgaaacaataagagttatattcaggtatatgtaacttaaccatctatctttttatacatatataaattattaatttatatataaaaaacgcatacatttgagagcagttttcaaaaaacagaacagaacaaaaaatatattttgtcttctgttaaagtcaagtgttggggcgttattaactgttctgcaacatgtttgaggaaaaaaatgtaaatttattgtcattgttgtatgaacccgcagaattaccaaaagaaacaataaggttatccttttgttcttagagaatgcgattgtatgtcatccgatatgatttgtttaacttactagtcttctttttgtagtataaactcaaataagactcttattacaaaacatgtgcctgtgtgtgtgaacatacaaatttaaaataattttgttgatagaaaactaccttaatgataatctgtaaatattttgttatatttgatattaattgaagaaatttaaatactaattgaataaattaaagtattgttttcaattaataaataattaaatgaaatacaatgacttatttgaatttaaaaaccgatatacatttaataaaataagaaaaacttataataagagaaagatatatataaagttattttgctttcattcaagaggattaaatcttttttaaacaaggattcaatttttatttggagtgtatgtttgcaattctgtttttccattatctgatcattgtattaattttgtactatattaatcttaattggaacaaaatctttcaaaattggaatacgaattttttttccatcaaagaaaaaagaagtacaaagttgcatttttcgtatgaactatatatacatttttgcaaatatacatatgatataatttagattatactacattattaaagacaaaatacatttttcactccgataattattttatacttagattatactacatacactttgaccaagactaattattatttttcactccgatgatatcaaaaattgaatcaatgcataggaaatgtatgcattgtgttgctgttaagtttactgaaatacatatgatataatttagattatactacattacctatttaactggatcttaccaagtttgttcatgcagaatataatcgagtctaatcataggaaagattctcttcaagtaaaatcaacctatcctctctgtaagagccatttaattaggattcaaaattgttataggtgtgtgtattgtttttttttcttcacattatcatgtaatttgttattacattattaaagagtttatattgaagtcaaccttttttaataatgtaaggacatgaaattgaatggactttaaggctggtcaaaattgactgttgggatattaaatgagagcatatattgagtaatttttcaaaatgattttgagttctgctcagtttatttaccattacttccctatcagtattactcagaaa

SEQ ID NO: 2433 - DNA, 2492 bp, Glycine max
  Intron number 2 from transcript Glyma01g01440.2 (locus Gly ma01g01440) derived from phytozome v7.0 (chr-ID Gm01; pos 1048124 to 1050615)
ttcagtgcccgttgccagaaccatctattcttaacgtaagaccgatatctctggttttcttatgctgaatggccaaattgatgatttgaatttgaaatgattcagtgtctgctaggtaaaataccacaaacagtttctccttacatggtacactattcaatgtaagacttatggcttagattaatttacgcatgcatcctagttacatgcggcgggtaaaaattaattccatcaaaatcaattttaccaaactttacaacaaattggctaataagaaatttggatatgtagcaacaaattgcatattattatcaaaatcatcataatcaacatggttattattagtaattttgtttttgttgtttttattagagtttgattttgatacactgttagtggaaatttttttatactatcaaccaattggaaatcaccttagatatgatttttaaagtaactatcataaaagataattttcaattatatgacaattggttattggatgactacgttcagagtattccaattaaattcttatatttattatttatttagttgactgaaagtatgagttgttttgttaagcatccaacttgattgtgttgggacttgagatactagggatgctttttatttaatttctttcgaggaaaaattactatttttagcagagttttgaggaaatttttttagagactttctatagaattaagcaaaaacaaaaatgcaatattttgataatgtatatctttatatcagcatattaaactcataaaaatcttgttttgtaatatctgcatattattattttaaacttgttttgcattagcattaaatgcattagcttcaacaatgagttgtacattttgtatatgttgccattttttaattagcaaatatgttacctgtttaaacatatataagtataatgccttgataaaaaaataacttgagtgatttcatttcaactattcttgcgagactacttagagcaattttttttcttgatgaaaaaagaattttattgagaaagaggggagaaatacaaatgtaagaggacaagatatcttctacagctaaaaagtacaacaaaagagaaaagaacatagactaagagcatgaggcatgtaggacggcaagccaatatccctgaatatctctaccaaagacacccccttaaagagacctttggcatgactccacaaagaagctagataaactactccgtccctaactaaatctataggtaggacccgaccagtgaaaattctagcatttctttccaactatatacaccaacctactgcaatctgagaacacatccaaaagccttttagcatctctattggtgcctaagcctcttaaattgatttccagtaaagactgaagatccttaggataaacccatcccttcacccaccacaccaaacaaatgacaaactgatagaaactggattagaataggatgaaaacataatttctttattgattgagtgtgtctctacaaagaattccctggatatttgagagatccaggcccaatactaactctccaattgactaaccactattccttagccaccttcctatttataggcagcatgccttatttctctaattattccggctctcagtttaccaactctaataatttccccaactaacttaattaactatagggattacctttcagaagcattttcagaacacaaaaatccaaaggtaaagcagttcaggggttttctaatttggagcatgtcagcaattagctataaagctcaaacataattgctaaataactgactgccatcttatgggatgtggtgatatcttactaactttcaaagaattctttgggttgtttcctataacacttctctttattttttcttttttagttttttctgtgtttcattgtgaatgtgattgcaacctattattgccactacaattgacaaatacggcatagttagtgccatttatgcacattagagtggaatatacctgaggggatagctgaggtttcactgaacttggtaaggtggttttggtaattaacttgtctttcctctgggttttctgttcatcatataccctcgaaaaatttgtagttgtgagagggtagccatatttttactttagtttgtaaatgctgtggtgtaactagttacttctaacttcaaagctaaagcccagggatggttggaaaagtgggctgttacacaaataaaaaattatcatgagtagatgcctgcatgagtaattttaccttctactattagttgatagttactgttaaacttttgaaaaccagaattttactttagaaaaaaagaatatagttgaggacttgggaggtggttgtatatacgtgattgcctttctttcctgtttgttgaatcatgaggaaaaaaaagggaggggagggggttgagttttcttcatttattgaaactattaggattctgaagtattgttcctcaatcattagg

SEQ ID NO: 2434 - DNA, 2949 bp, Glycine max
  Intron number 2 from transcript Glyma08g09340.1 (locus Gly ma08g09340) derived from phytozome v7.0 (chr-ID Gm08; pos 6677625 to 6680573 reverse strand)
ttgtggttaggattacttttccatccctctcttcttttattagcaaatttattagttacaaaattttaaataggtaacttttcttttccctacgggatcaattttatatttctcttttctgatctttgtctgtcatcaaatttgtttgtagttcaggctgtttggttggaatgctagctttttttcaataaaaaaaattgttgttatattaaaaaatattttttaaccttatttagagtgattgttttaaattaaaaaataatatattttttctatgaatagtttgtgtgaatatttttacatcgttatgtcaggactaatttttaaataattatgaaaactcagatttttagttatttgataagttattataagtagttccttaaaaaatgttgtacttataattaaatttcaatgtaaaaggttattttataaatataattatataaaaaactacttatatttctataaaaaaaatgaaaataacaccttttttttgcattcctgaaattactctttttaaaatttaaacaaatgacttaatagagtgtgggttaattaaatagtattgttaaacatttaatcaaaccaaatcaactttattaaatgtgatatatttaatatattttaaatttgaattctaactaaagtggtccgctaatatataaataaagtgtgttttgtttattttttttaaaaaaaatagcttaatttcatcaaatttgtaaaaaaaatgaaatataaatgattatttctcaaaaacaactttaataaaaaaaatatgttaaatagtgatattaatacgtacgaggttgtatatagctaattatatatttgaatagttacttaatatatgagattaattcaattaaaatttatttgttttaataagacataaatattaaactaaactttaatttgaatctattattcattatttttaattcttaatgtaaataattttacactgttaattaataatttgttcttttaataaatttaatagtataagttgttaaatttgttaaatcacgttattatacgttaaaaaataaatgtcttacggtggttatcacccttaattatataaattttattattttttatttaaaaattaaaaaattaaaaaattaaaagacatgaaaatatcaatatgtcttaagagcatctttaatagagtttaagtgaaaaaattatttcttaaaatttatttttcattaaagtaaatttacatgacaataaaagtgtttcaaaaataaaatttgtatattttttaataataaaaaataatatttatctaaatatataaatgtgtcaaattttcttaaaggttctcaccattaaaataaaattatatttaaattttgtataataatgtatagaaatcacctaaaatactataaaaacacgaaaaataatataaagaaactcatttaaaaaattcgaaaaatattctaagcattacatactattttgcagtggtttttccacaacaaacgcgcaggcaatgacacgtgtttgactatctgttacccttcatctttgtttttctcttacaactcgtactcttccagtcttctgcttttctgaaagaatatttaaaataaaaaaacaaaaaacaaatagataatgtatgaaaaatgagtttttgctagaaaaagtgaacgttgaggtaattttatatttttattttttaaatgaaagtattttttatttataattataaaagtttcatcttttttaattttttagtttttctaataaattataaatcgagactttattttatttattattttatttttaaaataataaaatgaaaatataatttttaaatatgaataaagatataagtgaaaataaacaataaaaataaatataaaaccgacttttcgcacgaggaaaaagaacaaatgtaaaagatactatactactactaatttaaattttcgacggtctcatatttgaatttatttaataatactataaattttatgatctaattatgatatctatggctataattactaaagcacatgaacataagatttctatcgctaagttcaatggactcaactggaccggtgctggttgtgccataaattattctgtttatacttcccaccgacaataacaaattttactataaaagatgtttctgtactactctaatatcatcataatttgctacccttccttctaaggctttcattgcaagagattattatgcttacttatcatgtaagaatttctcgagaaagaagcatatcaatttgcagaaagattaccccacatttgaattgtggaattttgggatgtacctaacacacgagtccgtgacaattcctcatttatactaccaatcttcttgaccatattcaaattaattttttttttttatgtacaattggaggaaacgaccctggaaagctacagtcataccctaaagaataatcaatctaactacttgtgtttgtataaatttgtggtaagatagaaccgacaagtaaatagctatagtcaactgcataaatgaatctcgcacttctatttttgtgagctactaccactataatgtaattgaactttagctgaacatttttttgaatgacaaagattatactcaactttttcacatatatatatatatatatatatatatatatatatatatatatatatccaatttccaatgatggttgctttcatcaataatatttgctcaaaacgcaactacaataatagtcatgcttgcttttgctgaaatagccgagttattactctttgagtgagtaatggcattcatacatttcattctcttaaattaccttagcattactaaatgctcgttttttcaccttaacagcacataactactttgcatctgaacttaaccaaaagtatggttcattaggtgaaaggaggaacgttgagagcatctgatacatt

SEQ ID NO: 2435 - DNA, 1529 bp, Glycine max
  Intron number 9 from transcript Glyma14g33850.1 (locus Gly ma14g33850) derived from phytozome v7.0 (chr-ID Gm14; pos 42192942 to 42194470)
cattgggaaatcaagtggtacctggtaagtttacatatatttgattagaattttgaaagttgtcaaaaattgataaactgcattaacttgttttcgtttgaaaactaaaaggggatacacactcgtgtgatatcagaaatggaagcaatgcagctaatggtgaaataaaatattgatgactggagaggaagttgagataaattttaaaagtaaaagctacatccattaaaacatttaaacatcaagggtgttgtttaagcaattatctgcaaatatggatttttattttatctatgcatgtatacatcagctacaaatataaaagagcatattcaatactacagtgatttatggtctttatataggctttcatttaaactcatttaaaaagtttataaaaatctatatcaaaacaagcttctctttgaatttattctaataagtctgtcgataaaagattaaatagattcctattagacaaaaacttgagaaataaatattttattgaactatttacccaaacaagtcctaaaccaactattaacactgtaaaaataattattatccctgtaaaaataattacatattcaataaaggtatggttatattaacaacactgaattaatgtcttgaatttttcgtttattttaaatattttaattaaatataaaaaataagtcaaaatactttatattattagtaaaataataagccatgtgtttattataatatagtaataaatagttttatacaataatcaacactgaattaacgttcttgacttggctctattcactcgtattcctgaaacaaattccttggatttttcggaccattagcttccaatactgaaataaatcatcaactcaccaaaaattcacatacaataatcaatataaaataacataaggaaagtaatacagtataataataataataataataataataataataataataaaagaatgactaagaaatattaacttcaggtgcaatagcgtgtgaaccagattaatgcattctgagtccttgcccctcccaatacacaccaaaaaccccaggttcttctcttctatcttccttttgccatttgaactatcatgtctaagtaataatttcaatatatgtaaaaacagtcaagagacaagcccaagcactgctagaacaagcccaagcacataacacaagctaataaaataaaattgcttacaatgactaaataaggaaacataataaaattatgaaacaagtctcaagattacttccttagtatgatgtctatttgattacataatatttagagatattctaaaatattttaagacacattaaatatattctgagatattttgtataaattcaaacacttcccttgaagctaatgcttaaaaaaattttaacattgtcacaattaaaaaagtaaaaacaagttacttacagtgtggaagagtaaacaattggcagtggagaaatggaggatctatttattttattgataaaatccccgaaatataagatccccgaaa

SEQ ID NO: 2436 - DNA, 3134 bp, Glycine max
  Intron number 1 from transcript Glyma07g05150.1 (locus Gly ma07g05150) derived from phytozome v7.0 (chr-ID Gm07; pos 3817480 to 3820613 reverse strand)
gtagcaccaccttccactctgccaccgtcggtcagttcattactccttaattaatttaatcaatgcattgcataccatacaatataaactatgtaagttattaattcatcatattaaaacaagttaggttaatctcattggtaagaataaaattcatgtcgggtgtagatataagtttgaatttctatcatagaagaatcttgtttgagatgttgaacttgtaacttttaactttatgaaaaaaaataatcgcgctattcattcactttgatgaattctgaaaccgtgttcatctaaacttttcatcaaatgtgatgggttataacggtcatgaggatttttagattaaatgtccctaccatgtgtgaataaggtacgaagatatttcatattcgacaagataataaatctctatcttttcaaacaaaaaatattcattttttattcgtataaattgtgatatatgtattttgttaatattaatataatttgctaatagatataatgcggggcatgtggtgtcctcagaaaatgcttgtccattagtattagcaagattttgttttaacaatgacggcacggagagtaaagagtaaagttcaggactgggggtttctgacaactatcaaatacagtcttcaataataaataaactatagtacatttgcaaaagttgtcgatatttttctagaacatgcatgtgtcacaaaattaagggtggaaagattgaaaaggtatgaagctccttcactgattgatcccgtgaaaggtttggtgaggcttgagataacttagcatggttggcccaaaatatggttaaccagcgacaacagcactgacttgtgctgttataaataaacaatgttaattaactcctataatttcgggatattaaggtcccagctagaagacaacagaaacaacaattcccggtcagatagtggtgtaataatcctaactttgtatcatattacatgatttggaaatctatcttttcaaatcaaccatcattgtcaataaaattggtttgcatgcacatgggttgctctgcattctgatttttataactatttttttggtcctttgtagctactatgtctgccctagtggtaagttttcgaggttatttaaattaattcccatgtctaatgtcttgctcatgtatgttttcaaaacatttaaaatacgttttcaataatttaaaatttcataattttccttttctcttttcgccttttctatttggcttgtcaattgttttgagaagaggtctctgtctacagtctatacaatgtaatgtatagttgaaaattacgaaacattacatgaattaaaaaattaataatataaaataaatgttaggtttatatatgtagatttgtaaaatgccatctatacattattacttttttatattcttaattaaattatataaatcgaaacaaatattgtttcctaagcatatgaaaacatataaagaaattaaactaactataaatcattgtcccactgttgactatggttgctcagacagaaattgacacaatattctttaaatggggccgtttatatttgctttctaaaaggtttcttaaaaatatatattttttataaaagttaaacaagtttttcaaaaatagcaacaattagaaagtcttaataattgcttttcttaaaggacaaagtgtgttacttcggggagggggggttctaaaagatatcatcaaatcaaaatttcaaacctatgcatccttgattgaattgcatgtatgatttaggatatcgttatttcactttgagtttctttatgaaaattaatatcctcttttgtagtactttgtaatatgttttaattttatctaagaaatcatattaagatttttacatggaaatatttaatttgctagaataactttttctcaataaattatttttaatataaaagaatagaatttttgaagaaggatgttctttcttaatggagaaaaaaagggttcggatacagctagacaaaattttattatttaacaatgactttatatatgccattctagttccccggtctttttgacatttcttttccactttgaagccacgagcattcggtgatgcttccttctaccctattctcttcaatcattcatgcgttctgtacaataatataatatagtcatatacttgcatgacacatcacggacaatctaagcacccccattgtttttccttaatatgtttccctaacctgtcattatcttctgtgatataaaacgtctagcaaactaaaatatgttattgtttaattattagtaaatccaacttctaatattgtcttatagcgtacattgcgcatatagtctatagcatatctcacttgtccccttgtatcaagcctttgttaaacaattgccccaattctatcgtattaatttgatgataagaccattcaattaatgcattatcgtaccctttgagctgtagtttgtacgcacctatcaaactatttcctcttgacttgcctcaagagaagtctattggtcaaatttaagtgttacgtacaagcttccaccggatatgccttccatttactaacacttggaccactctattgcattcaatccattcaaccaaatatatttatggtatctatagttcgaacctatatatttaaccaccgtggttaattatcaaacccattctttatataaatatgtttctaaaaactaaatagagatttcaaacttcaaattttatcaattaaaagaaagtggaattcaatctatgattgtgttttacttttctaatagatcaaaaagtgtataccattcaaggaattcaaattaggttgatattcattggcacacttcaaaataaatgtatgcctttattttggaataagtacgggcaacataaattaaaaggtgagcacacctcacacgcaactcttctaggctctctcttctagcaagtaaacgtgtgtagtacatacatgattgttattgccttttcatttttgtcccttatatgactctttttgtgtagtcacttttcaagtttcccaatcataatttctactctttttttttttttttgcgcatgcagctgtggtgggttcaaatttcttggcccgggactta

SEQ ID NO: 2437 - DNA, 3205 bp, Glycine max
  Intron number 1 from transcript Glyma20g08920.1 (locus Gly ma20g08920) derived from phytozome v7.0 (chr-ID Gm20; pos 12655992 to 12659196)
caacggttatcaccattcaactgctcgatccacaggttctttctccttctcttcttcttctttttcttcttcttcttcttcttcttcttcttcttcttcctcctcctcctctgtttctcaattctctctaagtgttttttttgcttttaatatgaaccataactatgaaattctgcgaatcaaaactctattatgtggtttcagctgtttaggttttatttttcctttgttttcgcaattcgcgatttgcattccgcattcggtggttcttcggattttcgtaatcggaatttcgtggacgtgtttggatttggattgggtttgttcgttgatggatccttgaggaggatttgcggtggcttttgggttgttgtagattttgttgattgttttgtattgggcgcacgttggcaacctgcttagaagaccgaagaacaattaatttcactgattagtagcactggatatgttgcagtgataatctcaaaaaacttttttttataatatttttcatgactatgcagttgtgcttgttctaattgtagttgtctgtacttttattagtataataatataataattagtataataatattgtcactactgttttgattaattgcaagtcattcaaaggtagttgaaaggttgcacatgactgttatgatctttgcataagttggatttttgttttcttccttgaatatttctggatgtactttacggctaggagtgtgtagtgattttttgcacctaatgccatgttttatcctctcagtaaaaaggattggaaggtaaacaataataataaataataaaaatggaaggtgagtatgtatttgatttttaactttaggctattcacattcgcatggggggtatgcttgaaaagaatattgatcaaacaatgataattctgatttttgtttttgttgagcttaatgttccttcaaaagatcaatatgcagtgtggaagtccactaaagtcatatagtcctattctgattgtttagttcccttgtttctatcataaggttatttacagaagaatggggagattagttaatagattaataatgttggatgacgataggactggctgaaacggggccgagttttctggcatgttgatcataaacctttagtgtgtgtgggtggggggttgccatagattcttcttctaacgcttagctgcaatgaatgctgttatatattggacttgacatgttataattgtacctttgtttggaggtcagtattgtacgccttttatggtggttggaaatcttttgattgggaaaggttctgttgggtatctgcaaacagttaaaagttatcaggtgatgagccttaaatttctgcttgagattaatattgttatctagaaagattgattataaaatgtactgtggttgtgtgctttgaaatagtacagtagtatggcttgatctctttaagatgtatgctttcatctcttgatgatttttgtattaagttctgtgttggcattcttaaagctttatttgttgcctaattgtccagtaaccttggatcatcttgatttttattgttcactttattagaatacaattaaatcaaataatctcctacaacatattatttggtttcatagtggtaaaattcaaactggatttaggggtttgactgttttggtcatggtgtcttaggggtttaagatgaccattgttttaagtgacgacatttagctgtttacttaaaagacttgttctccttttgcctcaccctctaccctaaatatgaccttataatccttagttgaagaaaaatatttgttgatggttcttcaggtggcagagggtgtaggaaacttgattcattgcattttggtatgaaaataataagggggcaaatgtttgagtggatctttgttatggattctttatgttctgtttttaaatttcaatataattgtacctgtacctgattgaagtcctgtaattttatctgtgtgagaagttatattgcattatgtttggaaatctcctatagtgagggtgtgcacaaggaagaaatgtagggaatcttgatcttaagtgggcaagggaattggcatgactgggaataacctattgccagcctggccggccataggggaaattggagggaaattctgttgtaagcttttggagaaatagagaaatattaaacaagggaaggaagttgtcactaaggaatggatatgataaatcatggcctctcaaatgtcctttgttactgtatttttttttgttcagttgaatctcaatccattctgaattattgatatccttttatttctctatatgaactgatccagtaagtttttatctgattattttattcctaactatctgtttccatcctttcaatacttgattaatcaaattatctacttctgttgtattggttcataatattattagtttttaaatttttgatgcagttgtaaatgtacctgattgaagcattgtagttgcatctgtatgaaaacttaaattgcactgtgatttgtgcactaagcactattagattccattctttcaatgcacagataaaacaaactaactactttttctgtattgttgtcttttaagtggcaacaactcaattttcatgctctgccctgtgcttctgtagaggacttattgttttttgtcaaatagattatgtattgcatgaatccttcttattaaaatttccagagatcaccatgcacataaatgaaattagtagtcactttagaagaaaggtcccgtgttattaaattctctttaatcaattatagtgctggaaaaatattggattggatgtgaaattcataaacctgatttatttctctcgctccttgctagaaatttctttcttttttaacaaagaatttattgagatagaggagaaagttacaaatgcaattgcaagagggtaagaaatcttcagtttatgccccctcccttgtccttttccctctgtagtttgttatgttgtcctccaataatcgttgagcacttgattgtttgctaacagatccacacccatgatgatgaaattaacagaatgttatgtgataaatgtgctttggtttttttatttttttttatattaactctattaatttggtagttcaatagaaaaaaaattaatctgaatgtttcttttatgttgcaggggcatatttgctactgaagag

SEQ ID NO: 2438 - DNA, 2671 bp, Glycine max
  Intron number 1 from transcript Glyma03g15820.1 (locus Gly ma03g15820) derived from phytozome v7.0 (chr-ID Gm03; pos 20140107 to 20142777)
tgtgctgaggcctggttcaagattaaggggaataggtgagtttaatattctttaatttaaagcttatcttttcttaggttgtttttcgttttcaattggaacttggaagtctcaaaatctgctgcagaaaaagtaaaattggaaaagcctcttgtttggttttcaattaggccaattgtaaactgaatcttgcctcaatttcgccttgaaactcaatttgaaatggaagtaaaaggagaattgtttttgcaaacgcatttgtgaaatgaagttcgttcaaacttaagcttacaatttttaatccaaagatgctcttagttggattgtgaacttggtttttattttaactttcataattttagaaaaacagaaaatacaaaccctcctttttcttgatttgttgcattgggaatttgagcttattaactagtcatgtcatgccatgtcactgcttgcagaaaattttacaatttagtgacatcttgtatttagtggaagggtatggatatgatactcaaaactttagtgtagaaaaattctgaaatgtaagtgaagtatttagtaggcaatttaacttatgaatggtttaattgaattttgagtataaggaacaaaacttttaaggcagaaaattccatcgtttcttcaagagtggggaatgttatagaagattacattatttaaagaagacttaaagagtaaggcataaagcattagtcagtcttactgattagctgagttgtgcaagcaaagtgggattccttgttgctttgtcccttttctgaaattaaggaattttcatattatttctttttcattatctttatctcaatctaagtggagatttgacaccttcgcccttttgttcatgtatttgggatttatttttgttgtcttggtggatgcttatagcttgatgatgtgtcaccaatgatattttaacccaaaatgttaaggatttgtgaaaatttgttcatttatgatgtatgatgatatcaaacttttagtatgcttagttgttttactcaccacaagatagatcctagtcaaagaactttaaagttaattattgtcacactgcatgtaaaggttcagcatgtcacttgcagatagtagaacagttaaaacctgtactcattgtaactgtgctaatccctgattttaattgcaatacatgaattctaattcaatataatgctataattttttccccttgtttaatgcatggtagtgaacctattttattgatgaattatctcttctccatgtttgggaccatctatggaggcaactatggttaacagtataacatatctagttgctgatgaagtggagggaggaatgtgaggtggtgaactagtggggccatggtcacccctaatttttgtgatgttttttgaaattactataaaaattattttgtggtcccctatattaaaaatatttgtcttatctatataatttatttattttctcttatattatttctgtactcaatacagttatgtagttattttatttataaaaggataatagttatatattaatttctggcatatgtctgtaaccaaaaaaaaaaatatcttgcatatattaatgcacataaaagtttaaaatttctttactaagccatgctatttgatcatagcctcccttaagccaaagttatggctctgcccctgcaagcgcatgattagtggctttattaagtgaaacagaatatgaatatgttctctgttctttctttgacatatcgattgatgcttttgttttattgatagaaaattcttgaaataatctttttcttaatgggtttagaagaagctgcatggtttaccttaccacgtgattttttcattgtcccaccaaagacaagtgtagatttgtagaaggtatcaagtaggaatcagaatctgtctggtatgacatcttagtagaaacacataagttaactgacaaacactttcattcaatttgaaaaaaattccttggttgcaatagtgaggaataattgctccacccatcaactatgcccttattctgtgtatgagcttctaaactcttaaggatttggttaatgtactaagtttgtggttgttgaaaatgtggccttttcttttctgtctagtttctatcatgcattgccaatactatgcgagttctcttttgctagtttattttgatttttcagtttaagaggggataataatgcccctgatccttatacagagcatgtactcaatggtaccagcaatttttcacctgtgctctctctatcctgtttcacttaaagcaataccttggtgggatttatcatatttactttcttctagttgtgtaacctcacaattataactgtaactatttatatgaacatctacctctttagtttaaaaaataggttaaatatgtttttagtccatgcaatagaataaaatgaataactaagaagagacaatttatttttgagagactaaaagtgaacattatttcatttgtgaggactaaaattattttttttgtcacggactctctgtgagattggtgtaaagtatctattgattttttcaatgactaatttcagttagaaaacatgactttgttgatgactaaaattatatttagcccttaattattttttctaatttttttgtttgttaaaattcaggac

SEQ ID NO: 2439 - DNA, 433 bp, Glycine max
  Intron number 1 from transcript Glyma14g08970.1 (locus Gly ma14g08970) derived from phytozome v7.0 (chr-ID Gm14; pos 6972144 to 6972576 reverse strand)
aggtaaagcaagtactttcatcaaacccttttgaaaagttcttcactttgttaaattgtctgttattggatgagcgtttgcaagaatgattttaaaataacatgatttatctaagaaagtttttattctaaaagcaagttaataataaaactcaatataaaagtcttgatctaacctcagaagagctaaagtcgctttgattcaaaatcaattatagacccaaaatcaatttcttaacatgaaatccaacctacgaatatttatctaaaattatgcaagctaatattttaacgtgattctggatcatctaacatgaatccaaacatgttatgaaggtgaattccatgttcaactttgaagtaaccttagttgttgtcattgttcttttgtgctgcttcctcaggtgattgtttcagaggttagaagccaagtt

SEQ ID NO: 2440 - DNA, 1535 bp, Glycine max
  Intron number 1 from transcript Glyma05g08040.1 (locus Gly ma05g08040) derived from phytozome v7.0 (chr-ID Gm05; pos 7954301 to 7955835)
atcttcggcgacgggcgtctcagtgggttgcttttgtaagttgcaattgcttctttagttgtgaattgtgattgattctctttgtttttagctattgcttttctgtgaacttagtctagcatgtgagtaaagagagcagagcggacaagcatgcattttgattgtgggattattcttgcttgctttgccattgttaaaacttatagagtgtatggtactgttcattagttgtcgcgtgttgtttgtagtttgttgcgtatgatgaattgtgaggatgtgcatttgtgtcattcttttgtcctttgccgattaagagaaattaaatgtgttaagcaaggttttaaaggtcgtggtatggtcgttattgctgaaaattgcggatgaatgcagccacatttatggttgcagtcactccaaaaaccttgacgttgtttgtggccaaaatcgcagtcacggaccattttattaaaccttggtgttaagtgtgattggatagagagttttgagagagtttaatttttaagtggatttaaaataccactcataaaaagggatttgactccactgaagtaagtatattgtaatgtattctaagttccaacacatttatgatttgttatgtatgtatatataaatatacggttgattttttcatcaacatttaagatcccttattttacctcacttgagaagagtcggatcccataaaaacggcacgattggatatcaaacccaaagcatttttaaaatgattttttttataagggatgtttattttttaaattaaatgaagggattttaagtaatgcctaaaataaaagagttagaaatgagctctctcacctttaagcttaggtatgctttttcagcctgtttgtctctctctctctctctccctcctgttacctctctttctttcccacacctcttgtcactatccaatatccatatccttataagattaagagtttatgcgtctattaataataaaaactatcaatttgagtttttcttttccttctgaaacagcatgttgatagttgcaaatattgaaattataataccaagtatttgatatttgattttgtagttattgatcatctatgaaaagaatgttataattaatcatttatttttttgtaatttttcaaaattttgaactactttttgaattttttattatttaaaatttgtgatgtttattgtcggcaaaatattatattgaaatctcaatttcttaataaatattgacaagtgaaatttacatatggaaattgaattcctttatctaaacaaacaaattggaactcaaggtatttgaattcacttatccagacaaagtattttgtaaatgaaaataatttaattgaagcaattaaatttccatacaggccaaattccctataattttgaaatgaccggcagttttctttaatataccgtatggtgaacttatacaaaaaagaatgcagggtgataagctaaactaattatcctgtatggctggtggctttaacagaaattgaaagtaactt

SEQ ID NO: 2441 - DNA, 2393 bp, Glycine max
  Intron number 2 from transcript Glyma08g42010.1 (locus Gly ma08g42010) derived from phytozome v7.0 (chr-ID Gm08; pos 41887481 to 41889873 reverse strand)
catactgcaaatcgttaaacacccttctcgttttggtaagtttatatatgtccattaattgctcatactatatactagtagtatctgatttttttccactcaagtagtagtagattcctttccccttgcttgaaatttcatttattatatagttctctttaacttctaatagcaatagcacaaataatgcaaagcaatttattactccctccatttcttaataattgtcgtgcaaaaattaaaagtaaaagcaatttcatctatatatagttctctttaccttttttttacttaaaggttttttttaagttaaaattaaaaataagagtttataaaaatataatttttttaacataaattaaaagaaccttttaagaaaaaagttgtttgttaaaaaaatttaaaaactttaacctgcttgtttaaaaatagttatcttgtccaataaacaattattagtaaaatttacattttttaaacatctaatgtatatttaaatttttaaacattttttagggaagattttttttaatatttaaaaatgtaaaaaaaaagttaataataatttcttatgaaaaataaactattttatggataggaatttaataattagaagttaatggagatcatataatttccatcccactattgtaaatttgtgaaagtaaaaaagaaaaaaaggcaatcgatggtttggttatctcaagcatttattattattagtcttgtcaagaatgctggttatgatggaaattgggtttctccaagcattatgaaattgaaaaacaattgataccatgtttcaaaagttaaaaatactctacgaagcacattttttaaaaaaaatgaagtacatcttctaaatcacataaagtatttctatttttatcgggtaatattgagtgttgattttatttttaaatttttttatagtcaacttgagtcgcatatgagattgttaaactcatacttgacccaaatgaattgtgttaatataaatcctacccaatcaagttcatcaacacattccaacatgcatatttttacttgagctggattgaggtggtccaattgacccacctatcaattatcatcaccccctaatagctatattgaaggaaagttattgtttgcagtgtcgttttaatgcaatacatttagattttgcacttatgcttatttttttattcttttaatcacttttcacagaatttttcgacagaataataaaataaacaaatcatgaaaaatgtaagatttaactatttcattaacactcgagagaagcataacattaacgaaatagttactcctcacatagtgattattttaagagagtgaaaaagcaaagttatttttcttgaaaagctatatcaaactatagatattatatatgttctagtcacaaatatgttcttttgccaaaggatctcttattatgccaaaagatttattgagtcgaaggatcatctgtttgatgtttcttgtcaaagtctcgagtgcgtgagtattcggcaaagcgaagaaaagagtacttgcaaaaaatattccaatgctcaagtgagggttcgactaggaaaactatcaatgatatgtaatgaatatgtgaaaatgaatcagcccttttagtgtgtgtggggggggggaggagttcaccccttttatactaacattgttgggtgtaaggtctatggttatatcatatcatgattaccagttaaataatattcttattaatcctatttaaatacctctaattgagtgattaaccttaagtggatttagtgatgataattatgatcgaatgatgttcattgtttgcatatgctgaaagtcgagatgtactgttcgacatatgtgaatatgtccaaagaatatgttttgatttgaacatgttagatgtccgttcatcctcgacgggtactttattaattaccaagtatttcaaaatctaatttgacttaaactaagatacaagaacaacatcgataacctaaattcacctccatttaatccttatactcatagtttgagctgaagcatatttcaaattgagcattcaattaggtggagttgttgtaatgctaaaagaaatactcatgataaatatcatgtaaaaaataaaattaacttctaaaatgagtatcgttttattttttagtgtaatattaattattttttatatttttaataatattattgattcataaacaaattaataatgataagatcaattttacagaattattgttcttttcatttatttattagtaatttttttaagttgggtaaaaaagttagaataatacttaataaaaggagtatcaatcttaataatttatcactatgcacattattttttaatttgcaggttttgaggtagcagatacggg

SEQ ID NO: 2442 - DNA, 1149 bp, Glycine max
  Intron number 1 from transcript Glyma06g18090.3 (locus Gly ma06g18090) derived from phytozome v7.0 (chr-ID Gm06; pos 14407471 to 14408619 reverse strand)
tatcggtggttcggtaccaaattagcgattctgaggtattcgaattaacgtctttggtttgttttgaattttaggtttgaatttgatttcagtatttggttataaatttgaagtaattaataattgtccgttgaatatatctctccttaataccgccgtttacgcagaaaattttaagctattgagtgattctgtgtagctaatggttggtcaaatatgaatgtgcatttttgaatcatttagttaattagttgtctggaaatttttttcatgatatattgttttttcttggttttaagttagttggaaagtagagtgaagtatgaagaggagaagaaaatgaaaggatttgcatttagcatgttaggattcacctcgtaccttacataattcccctcttatttgcttcccaaacaagccagtgttaactacatgtttgtgctgatgaagtctatctatttcaattcgttttacaatttgtcatttaagcttcttggaaagagtgaaagcctctttttttttttaataattgaaaaaatggatctggcttctcttctgtttttgattagcaggagaggattcttttacatagaaaaagagaatttactttgaaagtaactggtggaccatataactgatcatggtaggtccttgcatgacaaaatatcgcactgttgctttccatgtttggggggattcacttttgcttttagggaggctgattgttatttagttgccattttctttaaacacaaaatctatacggctaaacctgccatctaatctgttggatttgccagcctatattttaaagtgttttacttaatagtattttgtttgataatattgttcttcctttacttctttttttcatttaaggttaatacttaaataatttatgcataaactaagagatctagcttaagttaccaggattcttttgggaatacttgattttggaatcaaataccaaccaggcctctttgtttgcactttaaattatcatcccctcctcaattgggtggttgagctccaactaaatttgttattgttctctttaacttgttccattaaaattatgtatttatgaatgtggatatcttgcattatacagagtgacctggaccgttctcagaattctaaaagtcg

SEQ ID NO: 2443 - DNA, 926 bp, Glycine max
  Intron number 3 from transcript Glyma13g08930.1 (locus Gly ma13g08930) derived from phytozome v7.0 (chr-ID Gm13; pos 9746395 to 9747320 reverse strand)
cattggaatcggtaagagacaccaagtaaatatctaatactatcagttctctttatattacttttttttacttggatttatgacatttatgctaataaatgaacattcatgtttttgttttttgttttatttgtgcgatctaaatatttttattgccattatttccaattttccgttatttgatatacatagttgctagctcatgggagtaggttggaaaataccttgtagcacatgttgcttaggttgtttactttttcagcttcaccttcaatttgtctttgctttttacataaagaactatttagtagtggaaagtgtaagattttatgcatcagtttatttgaccattaaactaaaatgctgtacttttaatttgatcacttggatcttttgggtggccatggactcatgccatggatgagcacagcctactccaacatcccaactcccttcaggctgggagcaagatagtatggcctttcaccatagcgtttattcaagaattgaaaaatgacctgtcccagagagatgcaactcacttccactcttccaccccttgtggatgttgggggacttggttatttttaggaagttttatcatcaaagaatgatcttggtatctaataattgattggtagatacttaaatgaacagctgctttctttttattcataatatactcccaaatccctttctcgtacctgtaatacaaatttcagaaaatattggcttattttcacacaaggaccgtcagcagtgagttacaacaagcattaatactagcattttcagctatctgtacataattgataatctagttcttagtctttttattttttgtttctttttttaaatagaatgtaataatgcatttgtaggttctgatgtttgtatggtgcagtttttgtcagtattgaattctg

SEQ ID NO: 2444 - DNA, 4913 bp, Glycine max
  Intron number 5 from transcript Glyma02g17490.1 (locus Gly ma02g17490) derived from phytozome v7.0 (chr-ID Gm02; pos 15743881 to 15748793 reverse strand)
gattagtcgtgacatcatgtatgttcctgatctcttgcactgttgtttttagaaagatacgaatgattaaaagataaagaaactcaggatattattgcagaagaaagactgttttattgatctgaaaagcagagtgcattttacaaagagatgctaaaatatatagataaaactcctatgggttgttgcctaaaaaatagaagataaattttaaaacagcataacagcctaacaacatatctgaacaacataacaacctaacaacatatctgcagcataacagcatatcctaaaaaaaaactagcaacaatttaaaaaatttgtttcaagagtcaaacagttaacactcctccttgactctggaacagcacacaccaagcctctgcctcaagaattcatatctagctttaggaagcgcctttgttaggatatcagcactttgttcctttgttgtgcagtaaattaatttcacttctccttccttttgtgcttccctgagaaaatagagctttatcttgaagtgttttgttttgccatgaaacactggattatttgaaattgaaattgcagcttgattatccacaaatatctgcgtactgtcctgttgttccatatgcaaatctgtcataagctttctgatccaaagagcttgatttacagcagcagttgcagcaacatattctgcttctgctgtggattgagctattacttcctgtttctttgaataccatgagaaaattccagaaccaaagctaaaaagataacctgacgtacttctcatatcatcagcacatccagcccaatcactatcagaataaccatgaagtctgaagtttttaacataatggtatctaattccaaaatcaattgtgcctttaacatatctaagaattctttttgctgcctgaaaatgaattctactagcacagttcatgtaccttgataacaagcttaatgcatgcaagatgtgaggccttgatgcacttaaatacattaggcagcctataaggctcctatacagcttttcatccactttttcagctccatcttctttgtaaaacttctccttttgattcattggagttgcagttggtttgcacccttccatgttgaacttcttgagaatttcatttgcatatttttcctggcaaagaaatatttcattctgtttttgatccacctgcataccgagaaagaatgtcatccttccaaggtctgtcatttcaaaagcatctttcatttcttccttgaacttgtcaatatgctccccactgcttcccgaaaccagtagatcatcaacatatagagatactacaagcaattcaccattagtcttcttcacatataaagtagattcacttaaactttttttgaagcctaagttcaccaagtgtgcatcaattctgctataccatgaccgcggtgcctgctttaaaccatacaaagctttccttaatcgatatactttctcctcctgtccttgaacaacgaacccttcaggttgctcaacaaaaatttcttcctccaagtatccatttaagaaggctgatttcacatccatttgatgtataatccaacctttttgtgcagcaagagacatcaacattcttatggtttctagtctggcaactggggcaaaagtctctgaaaaatcaacaccaaacacttgagcatatcctttaacaacaagccttgccttgtatttgtttacagaaccatctgagttgagcttagttctataaacccacttgacaccaatcgctttcttgtggttaggtctgtccaccagctcccatgttttatttttttcaatcattataagctcctctttcattgcatttctccatttctgatcagctgtagcttcttcatatccctcaggctccattacagcaacattacacctttggtagatgtctgaaagtgatctggttcctctgatgggttcttcatcaacatcttcattctcctcctgaaactcagacctcttatcatttttccagtcccaactatctgactccagaaatttgacatccctgctgacgattactttgttgctctgtggtaggtagattctgtaggcctttgaagttgagctataacccacaaaaattccaggttctgctttcttgtcaagcttgtctctctttacttgaggtatgtaggagaaacataggcagccaaatgtcttcagatttgttagctttggtttgtagtcgtgccatgcttcaaatggagtctttttctgcaaagcttttgttggtaacctattcagcaaaaaactgttgtgtgtgcagcctctgcccaaaattcctttggtagccctttgtcatgaagtaagcaccttgtcatctccataattgttcggtttttcctctcgacaacaccattctgttgctgagtgtatggtgctgtcaattgatgttcaatgcctgcatctacacaaaacttgttaaatttttcagaggtatattcagttccattatcggacctgatcacctgcatcttgcatccactttgagtttcaacccaagctttaaacttcacaaagatgtcagcaacatcagatttaaacttcatagaataaatccaacacattcttgaataatcatcaatgaatgcaatataatacttactgccattcaatgatggtgttttcatgggtcctcccacatctgtgtgtactaactgtagcttttgtgaagccctccaagtcttggtttgttgaaaaggcagtctggtttgctttccatattggcaagcaacacagtttggaggtaaatcgtctaattctggcatatctttcactatgttgttctttttcatgaaaagtagtgcagcatgatgaaagtgccccaatctcttgtgccaaagcattgtattatcatcctctttgtgtacagctgcttgctgctcctcattcatcaagtccaagacaaaactcttgcctttcatttgaactttgatcatttctatgttgtttgcatctttaatcacacagtttttttcctcaaacagcaccttatatcctttctccagcagttgagtaacacttaaaaggttttgattaatttcaggaacatataatacatcagaaattaatttcaaacctgagtggccttcaattgcaaccgttcccttgccttttactgcaatgagtgctccatttccaattctgactttggaaatagttgtctcgtccaattctttgaaaagttcacgatcataagtcatgtggtttgtgcaaccactgtctataagccagctctccgtagtggtgttggttgcaaagcatgatgctacaaacagctgctcctccataggctgatcttcaacagccttggcttctccttgttgttgttgttgagtcttgcatattctttccacatgtcctaattgaccacacttgtggcattttatgtctggtctccaccaacacttgttgtgtgggtgattatttttttgcaataaggacaaggtgaaaagacacgtgtcttgctgctttggccatttttgttgttgctctgcttcttcttgttatttttgcctcctttgtaattctgtgatctggcctgaaaagcaccctcaacagacccttcttgcctcataagcctcctttgttcttgtgcttgtagggcattcaacaattctgccaatgtaatgcttgacaaattccttgaattctccagagatgcaattgtggcttcaaacttttcaggtattgtgactagaattttttgaacaattctagcgtctgaaaattcagtacctaggagccttacattattgactatgccaagaagcctatcagagtattccttaatcgtttctgattccttcattctctgcatctcaaattctcggataaaattcagcacctgcatgcctttaaccttttcatttccttcatactcttgtttcagaaagtcccaaatctgattggttgttttaagtgtcattattctggctagaatggtggatgaaactgctgcaagcaaagttgcttttgcttttgactttctctgcttcctttctttgtgatttttgatttgagcaaccgttggattgtccggcaagggttcgacttcgtacacatcttcaacagcttcccacaaatcacctgcttcgagataggcttccattctaaaagcccagagatgataacttttaccatcaaacagcgaaagtgtaagtggaatggatgaaccttctggattcattctgaccaggttatgtgtgtttgtgttttgaatgtgtatgggttctctcaatctctcagatccctcagaataaggctcaggataccaatttgttgtttttagaaagatacgaatgattaaaagataaagaaactcaggatattattgcagaagaaaggctgttttattgatctgaaaagcagagtgcattttacaaagagatgctaaaatatatagataaaactcctatgggttgttgcctaaaaaatagaagataaatttaaaaacagcataacagtctaacaacatatctgaacagcataacaacctaacaacatatctgcagcataacagcatatcctaaaaaaaaactagcaacaatttaaaaaatttgtttcaagagtcaaacagttaacatgcactataattcattaatttttgttactggaagaatttgaaacctcgacctatctctccctctcctcatcctttaactagcaaaccttatatctcctatactaaaattaattcatgaaaatcccctgcaccgcatattgaaattgtagctatcctaacaaatgggtgtgcatgcgttaacttttgtctagcaaacaagctccttatattattaaatcatgcacaaaatcgagaaatactaatggataaattacttggatataaatgcagaagagacttcacatactacgcagaagt

SEQ ID NO: 2445 - DNA, 1209 bp, Glycine max
  Intron number 2 from transcript Glyma20g37040.1 (locus Gly ma20g37040) derived from phytozome v7.0 (chr-ID Gm20; pos 45007521 to 45008729 reverse strand)
tggctgaaagacaggttccatttcactttttcattgtatctatattgatgcataaactgcataatatatgtgatagaataccaataaaagttgatgtttattatgattaaacacagatttttacataaactacagcaagaatgctgtctcagagttgagaactcctacaaagaatgcactctgtccaaacttcctcttaactctacttacataatatactacagatacataagtgctacataactatactgcattgttagacacaccactgctgaataactgtcctgcagagttaaatacataactattatgcaaccatcctgcataattaaatgcataactgtcatacacaactgccacatgatcagatttctacatccaatgtcccctcattgagtataccttccaaataagtggattattagactctatggtcccatgattcccatcaatatgtttattatgcatgcttgtagttttcaattgtttttatttgatagtttagatagtaaatgaccttatcatggcttcggactttaaatcattgagtttgttactttaacatttgatgtctggtttctcctaggacattttaattaatgttattggcattgaatcataactaagggagcgtaaccaagtattgtacaagtgattatggatgcaaatttagagtgaattttacacgcacaaaacaaaataaatcagtattatttactcatcagaagtggtggttaagggtttattgattttgtatcttctttgaatgattctttggaattgtagaaacacaaatgtatcataaatactgctaactcactagaaaggcattgaacaggtcaaattgagatgcatttccttcccttgtttgacaattattagtagtctttaacttgttaaataaatatcttgtatgttgcagtggatcttgtcgggtgccttttctctacatacaaatggagtaccataaatcagaattttatgtgtctgtgtgtgaggtgttgatgatagatacattattgttcacatgtttttgtgcacgtagttggatttgaactttttgttgctttctgttatcacttatcaggcgttaagtgggaaaaggcttgattgttgttgtttgtaatcaggcattactgttttcctttcactacttactacttgcccattgcaggaaagaattcttttggatcgtgacagagtagtgtc

SEQ ID NO: 2446 - DNA, 2967 bp, Glycine max
  Intron number 10 from transcript Glyma19g05640.1 (locus Gl yma19g05640) derived from phytozome v7.0 (chr-ID Gm19; pos 6219252 to 6222218)
agaagcattacaacactggctgggttctttctcaggtaactttggtagtttggcatgctttctctggtctttcattgggattcttcatacatatattttgatatagagatatactgcattcatgctcatgaatcatgatttttaattccaatattttgttatgtgcacatagaaattttgttttttgttgtacttaattttttcccacttcgtttgagggatatctagtttgccccttagttacacttccccactttcctcactaataaaaatagtatttttctgtatatgaagtcttgttgtttgaggttctaaactcaaatcataattaatctcactgtcttgtatccactttataactaataactaatgagttaataaccaatcttttacatttgtgacttaatccaatgaatataagatgtaaagaaaatcacaactttttcaacttttgacgagattataaatacagaaataaaaacaaagaacgaaagaaactgttaaattaaatttcagagcctaaattaaatctcagcagtcagcacaaatgtatattttgcttgtgccttgctcaggcttcaagcctggaagactcttgtgtgggggttctgtaaatatataaattgttactaggcttcctccacctgatagacaataggtaatctttttggacagttgctctttgattataagtcagttggtgggagagaacaaggagatatgaaactatgacctatgaagcaaacataacaatttgctgtagtttatatatgccaggcacatgtctgacttggacacatgtgtccaattattttttttggaggggcttacaaaatagcatgtattggcgcatatgataagtatgaagatattataaatcctggagcctatatatatatatatatataacaaagtttgtatcattttccttgaattttcaattttgtttatgttaagtaccaacaaactatcttaactgcttcctactgtcacaccacatattaaaactcaccattaaacataactgtccaattaatacaaacataactgccttaccttgtgtttggatcaagaatttcaaaatttcaaggaatttgaaatgcctagaatttgaattgctttgattttaatttccttcatttttcaaatgctttgtttggataattcaattcaaatttcttctattttaaattctttgtttggatagggcaattcaatttcctccatatgcaaaatttcaattttatattttaaatagatgaaattttaatattaaactttatagaaaataaacacaatctaattttaaaatattaattaaaaaatatttttaatttttaataatttataaatataaaatattgataattttaactagggttgttttgcctgaccacaaccagtgatgtttttaaaccgacatcaaccaaggctatttttcaatcgacatcaaataggatttttttgtcaacgtataccgggaatatttgttagctgacgttagccggggctatttttttgccaacgttggttgattctatttttcagccgatgttggctagatttttttaccaacgtcggctagggtttgtttggccgacaccggctagggtctttttgaacgacattgaccaaggctatttttagctaacgtcggcctaaaaaatcctagcagaccttgacaaaaaaatctacccaatatcggctaaaaaataggttggttgatgttgaccaatagaacctacccgatgttggccgaaaaatatcattagtcaacgttggccgaaaaattcctagtcgaagttgtctaaaaaaatagtcctgatcaatgttggacaaaaaatcttacccaacatcggctaaaaaatagccgtggctgatgttggctaaaaaatagctctgactgatgtcgacggaaaaaactctaatggatgtcgactgtaagaacctagtcgatgtcgactaaaaataatcatgtccgatgtcggttaaaaatacttagctggtgttagcagaaaaaaccctagacaacatcaatcaaaaaacctagctaatatggttaagaaatagctttggctgatttcaaccagaaaaccctagtcaatgtcagcaaaaaaatcctaaccatcgttggctaagaaaatctagttggcatcagccaaaacaccctagctaacatcggctaaaaaataaccttaaccgatattgactaaaaaatagctttggctgatgttggctggaaaaacctagttgacgtcggttgaaaaaccctaacaggtgtttgctcaaaagttagtcatgaccgatgtcaatagaaaaaatctaaccaacgttggccaaaaaaatcattggtcaacatcaactaaaaaaacctggatgacaacggccaaaaaaatccttagccgaaattagcaaaaatttctcatgattgacgtcagtgagaaaataaccataaccaacatcatctaaaaaaaatcttagccgatatcgacaaaaaatagctttggttgacatcatacaaaaaaattctgaccgaaaaaacctcggccaacgtcagtgaaaaacaacttatgtcgatatcgtccgtaaaaattttggtcacccgtagtcgtgagtgttgagcgaaaaaagaatttcaaattctctattttttgagagaatttgaaatctcactgtattagtcaattaaaatgattcataaaataccaaaaattaaatctccttttaaatactctatccaaacaagttattttatcacttccttgaaaaaatgaattcccctattaaattgttccatctaaaaaaactataatagaatttggccaatcaatgcctccttgtacagaaactactccttgtacatactgtttggatttggtttcatcaattcaactcctttgaaatctccttacttgaacatgttttaatgaaggttgggaaagcatactttgagctagttgattattt

SEQ ID NO: 2447 - DNA, 1130 bp, Glycine max
  Intron number 6 from transcript Glyma02g31370.1 (locus Gly ma02g31370) derived from phytozome v7.0 (chr-ID Gm02; pos 34215120 to 34216249)
ctacaggtacatcatgcatgtctttacattgtatcagtatctctatccagttcattatgatgatagtagatcagtgttaattggtagttaattatgatgcttgtggataaaagatcacatagagattgtcatttccagaattaagtatatctaagattaggactgcaatgtaagagaatatcaggggggagcttaagattattatcagattatcacttattgagtttatatttatggtcgagtatccaattggttgtccacatcctaatcaagaacaatgacgctatgaaaagaagaaacaaagtgctctcatgaaaatttatttttaaataaactaaaaatattaaaaagaaaaacttaaatatgtttttatccctaataaatatctgattttgtatttgctttccaataaatttttgttttacaataagtttttaataaaataattttattttttattcttgacatttatttttagccccttatattttagtaaattttgtatttgctccatgataaatattttctatttgttattaatacatactaaaacaaaatttattaatttattaagaaagaaatacaacattttttaatttatcaaggactaaaacaaaatatcaaaaataaaaaataaaaatattattttattagagactcaacgcaaaacaaaaatttattaggaagcaaatacaaaattgaatatttattagagatcaaaaacatatttaaatctaaaaaataaagttatcttcgtccaatttgaatattagaatggtaaatataggtattatatatttactggattaggtccacttacttttttttttaatctttttcctttttaataattttacactttttaatttgaatttattaatttcttgactatattctaatgaaattctatgattactttattttttattgcaatagcatgagtaaaatatgaaagggtctaattaccatttggtgtattctgcatgttgttttatgtgtatcaattcaaatttctccaatcaaatctagatacaatttagtagattagtggatatcaattagattttacttctaaatatatgaattagaccctattcccattcagtaacttgtgaagtttaattgcagta

SEQ ID NO: 2448 - DNA, 3980 bp, Glycine max
  Intron number 2 from transcript Glyma11g26750.1 (locus Gly ma11g26750) derived from phytozome v7.0 (chr-ID Gm11; pos 26139749 to 26143728 reverse strand)
gaaggtgagatcatttgcatattgcgattgattttttttttttgtcttgttacaagactgatttaattcttctttttattgcatgcattgacactaatatatattttttgttcaaataacatctgttccataatttttctttatggtggaaaggattgaaaactttgttcaaaggtttcagtttatataatttgatgaacattaactgctagcaagttggttctatgtatattctataaattttaaatgaacggattaacgaaagaccaaatcattttgcagaaaacattactttctgtaaacattaattttatacttcgcttttggggtttataattttgctccttcataagtgtgacctaaaagtaatattttacttgccacattgatgtgaattgaagtcaggaggcataaatgaactgattaatgaaagaccaaaccattttagagaaaacattactttgtgttggatgtagctacaaacattaattatataattctcttttgcggtttaagtttgctccttcataagtgtgatctaaaagtaatattttacgtgcttcattgatgtgaattaaatcagaaggcattaaaaaaggtaaactaaaattttggagtttttcttttaaattggcaacatgcatctcatgcatgcattacttttgggttaagcataaaaatcaatcagagtaatcaattgtatgctaactttccagaaaaaccaaccacttaatgatctctagttgtgttcacagtttcttttgttcatgtatcaatgaaagccgtgtgatttatcattcttgcaagagcttttaaagctcttgtgtttgtttggattactttctttgcttcaaatttcagccaaaacttttctcttagcattttaggactagagctctagcaccgtctttggatgaatttggatgagtctattcatagatgtgtataagtttaaagagggagagataaattctaatgatgaaacttaaattttattaaaatgaattgaattggctacaagtacagtgaactcctatatatatatatatatatatatatatgtctagacccattagttagaaacctaactaggcaaatcactaaactgccatgccatctcagcataatagagtctgacaccttacaactattaaagatacaagatactattacatttacaacttgtactccgacaagatgtaatgtaattcaattgattaagattaggaattaataaactggaatgtgaatcctattctgatttctggattggtaatagaaattagaataaaatgacattgaaagcaatttgtactttggtgtgtgagaatgggtacaatttagtgtaggatctacttgatgtaaatgaaataattgctcttaattaggttaggaaaataaaataaaagcttaactatttttcttccatgtatatattcaatatataatttgaatgcacattttttatagcaatattcaagtttctagaatggtacttgctacttagtatcatcctataaatttagaagggcttattaggaaagaaaatatctattcaatattttttggaggactgagttcttattttttagaataggaatgctaaacacactcacaccgcatacactttacaaagtctaattttggaggtcctttattgtggtactgtgctgccgcagttcatgcaccttctttactgttattgttttaattgttgtatatctttttgagcttattttgtttttaaaattatttaaacacgattaaaataaataaaattctgaaaaataataaatgattttttaatcttgtattgattgcaaattttgtaagattgtgataaaagaataaagatagaaaattggaaaaaaaaatacttcttttcaaatttggtgataaaatagaaacataaaatgtgtaaagaaaactttgttcacttttaacattattgataattaataatttctgttgtttaaaatatttaaatgtaatatttgtgttcatatacgataaaaaaataataaaagtctagaaaaaaaactttcttttcagatttggtgaaaagttgaacaagtaatctcattttagattatgtgataaagatgtaacaatataaaaaaaattaagttttcttcaatttgatttcttttaccttgacgtaaaattacaaatttgtaaattaaaaaaatggtatagatatatcatatatgtttggtctctaaaccatgaccttttatggaataaattcatattcatttttgtttgttttttttgtccatgaaaatatttgaattattcatttgttgttccaattctggtattgggcaacctatcatattattcatgctccaagcctaatagtactgagcatgaagtgtattgggaaaaatccaagtcctactcctacattgactagagatagggccaaaatagaatgtacaagtgggggggcaactcttacatgaaataacttttgtggttgagtattgagttagagcctatacccaaaattgtattgtttaggggtttattagaccacccatagatgtctagtcctgtaaacttcatgcttaagatgtctagtccctgatatgaggtgtgtgtgttggagattccacatcgattagtgatgatgccaaagtggtaaatataagtgggggcacaactcacctcataagccggtttgttgagttgagttaggcccaaacccaaatttgaagatagtattagaatctatctaagattaattatttgccattggaatatttacaactttgtagggttgctgaaattataaactttttccatattctaaaatgcaatagtagatcaatttacttgagtataattgtttgccattgaaatatttccaactttctagggttgttgaaattataaaatttctgtgtattctaaaatgactatagatcaatttactcgagtattctgaattttataataggtaaccttttttttttgatcagtaaagataaatatatatataaatctgagtaccagaggtacaaaggttacaaatttaggaaagaccatacatttggttccaattatcagacttaatgtagtcttgataggaaccaatatctggatacaaagatgagtgtaatttctactgttagtctatgttgctaacctcagctaataaacaaaccctgttctaagattactagaccaatgattataattagttgcaaaatccttctccaaacttctaagccatgtccagagtaggaaagctgcatcatccatcactttgttgccatttattctcttacagtgacagtatttttggcaaactttaaattcaatagtgttcgtaatcaataggcttactggtaactgtatttcatccgtggcattacattattgttggttgccatgtctgtatattataaattaagctgtgaagataaagtgataaacttgctggaaatattttattttgaagggagaatcccattggctgttaccacttcttgtttacttattttggaattaggtaaataaaaattgcactaagttgagttaaagagatgatatatagagaaagttttgaagttttctattcatatattgtcttattttaaacaacatatgtaattgaaagtgttggatatttgtttcttattttaaattttaatatgccccatattggccatattttcttaatctgtttgggatacttacttggaactaatggcctggaaagatgtttggacacttctgttattttatttatttgtctcttaaacgtgcaataatgtgtctatttttcaagactcccttgaagtttgaattattttcagtgtatgagtgttggtgctacctgtgtttctggggatcgcaaaatctctctttgaattacttgttttttttttttttttatattatgccagaagctttataagtctgaaccttggaaaaatgtatatctaatgaggatcctttgatctatttgccag

SEQ ID NO: 2449 - DNA, 1790 bp, Glycine max
  Intron number 7 from transcript Glyma08g02640.1 (locus Gly ma08g02640) derived from phytozome v7.0 (chr-ID Gm08; pos 1813675 to 1815464 reverse strand)
tatatttttatatttgttgtgtacaggtaatgcagttagttgtgttccttcctacaagttgtagttctcattttttgctttaatattaatgtaggcaaatctagagcagtaaatctctgctctttgtttcacattcttcttcgacacctctctattctttgaatatatacagacatgtcaattcatctgctgaggtcatattattttttaatatgcttgtttgttactaacatttttatgctggtgttaaaatgcatgaatgtaaatccagcggtaggatatacatgtacttgatacaactcacatgaatttgctagcatgcagcaattcagctgttttagtcaggataattcttgtgaattgacagcttgtaggaattggtatttcatcacaaaagtgatgggatttctatttcattttactaaaacatagatgtaaataaaaaggagaaatctacccagcacgttcagctctaaaaagctttcaggccaatttgagttatttaggacccaaaatatagcacatgctgacttgtttgtcaacccaaaagtttattttgttcaaattgggccaattggccaagacaagattatttaacttaaaaaatcataatttttttttttgtattttctaatcaattactccctccttcccaaaataagtgtcttcctaagttgttttatacaaatcaagaaaagctaataaatagatgaaagaaaagagtaataatttgacaaaactaaccttatcattaatttcgttgaaaaattaaagtgacacttattaagggtattagtggaaaaaaattaatattacatcgaaaagttaacataacacctattttgagacaatttttttttctaatgcgacacttattttgggacagagggaatataacataccaaacataaaagggaatggagtctttttttcattccatccacaccaaacacatgaaaatgaatattccattcccaatcccattccttcaaaattattctatctaaccaaatatgagactatttttcattttttcagtgaacatgataatactaattagaacatcaaaatttactgggctgagcatttttttttcctgtagataaattacttttgtgcttttttcaatgtgggtgaatgagaaatgtaaatattggaaacctcttaatcgccatatttgtgtggaattccttttcaacaattttttaataaattcctcgcaattatggaacattccttctctccattggatagtacctcttccagtacttgcttcaagtttgtgatttagcattttttctttcaaatctgcagcttatagtgaggcttcatcaccatattgttaaagatgtctagatgatgtttgtttgaattttgagctgtcaagaatcaacaccccaaaagcttaagctattagaaggtccaggaattctttttatcaatattttttaaaattcccttttatgtcaagggctggacaagccacaggctcaaccaattaaataaaaatagaggagtaggagaagcagggaatttatttttgatagctttgtcagggaggcccatatcatgctcaactaactctccaaaatgcttaagctatttggtaaatgcctaagtttatttaatgtctttgaaaagaaaattgcacatggttagctcaatcaaatttattttattctcaagctttcagatgattgactttcatttacaatgcatcattgcatgcttgctgattaagggaaaaaattgcagacctaagcccccaggactcaacccttctatctgat

SEQ ID NO: 2450 - DNA, 4573 bp, Glycine max
  Intron number 2 from transcript Glyma05g05020.1 (locus Gly ma05g05020) derived from phytozome v7.0 (chr-ID Gm05; pos 4270961 to 4275533 reverse strand)
ctttggggttggaatctttcattcgggcatagaaggtttgtttctgtgatccttgtatcgtattgtattgtacttcctccactgtcaagttttaattttgagttcagcttgtgatgagagaattaaattttgcaagttgttttgggattgcaaaatgatgttatggcgcgacattttgattattgaacagtggtagagaatagaaaaactgaactggtagttgaataggagctgattataatccgcagtgtgaatcaagttgctgtgtgtattgatcaaccaagaagaaagacatgtgaatgcattacttgacagtaggttgtcctctcattcatcggtttaggtttcttgtattagtttttgatcggtaacagctttagtttttaacttagccgaatggtccatgtagcccacctcacatagtaggattaagctttgttgttcttgttgctgcttgtagtgatatgcctttagaaaatgctgcatgatggttaaaataggagacattcattataatggttggtatatgggattctgctttgaatattatttggctagtaggaacttcccattcatgataacacttcatatcaaacatgactgaagtacataaccaatatgcaagtgcattaaattgggatggtaaagttagtacaaaattgttgttgcatatgactctagatttcctgaagggtgggactttactcttttttttttgcatctggtaatgtgggaattaagatatggttttctattattttaaacttcaagtgtaattatttgggcctttattatggattaatatacctattggatctaaggtttgacatttcattcctaaaaactcttaaatatatttggattactatagtaggaaatagtttgtttggcactttggctccttgtttttaatgattgagttactattttgcctttccctttacagtgtctcctttttctgctctaccttttctcttttctatctttttttgccttctcttttttttcccatgatgctcttgagaaaaactcccatttatgcttcgtgatatgttagattttgggataaattatgttcttaatgcagtttaatgctctgattttatgattcaaagggtaactcagtagtacattttgacaatcaaacgtagcattctgttgagcttgagcattgatgtgtcattttgggtatataccattgcatcatggtaaaggctttaaacacgtgcatacatgcatatgtgattacaagttcttcctcatctaatgaaatctattgtcttgccaaaagatctatatatgttttgtcattgaagaactatggtttctccattcatggttaatgaattagttctatctcgagagtcgagtgacattgagattttaaaatgcaataatgcttcattatttttgttttttgtgatcatgcttctagaagttctagttaaggttgtgatgcttatacctggtgattaagtaattgttcggaaatcgagggaataaataccggagagatttataccaatgagatgtgaacaatgatataagtgaacctaacagttcaccttaacccaaaattttaaagttcaagtttatggatctttcctttactcatatggtgttcaaccttttcattcctacacgatatgagacttcatctcatacttatacttcaataggaagtcatttttatccactagtgtttttcatggtggtcattagagcccacatgctctagatacttattccaccactccatccataggacacgtcgcctagacccattaccagaaagactttcgatacaaagaatccccaggccaaggatctactaccgccatcttactcatccgagccgatcactaagtcaaatcaggctttgataccaattgttggaaaattaagggggtaaatatcggaaagatttacaccaatgggccatgaacaaccatataagtgaatctaacaccatactttaatccaaaaccttacagtttaggtttatggatctttccttcacttatatggtgttcaatcttccaattcctacatgggactttacttcacacttgtacttcaacaataactcctttctcactctagtcggatacaaatcttttagatatatacactgctgagattgttttaagaaagataatggttattttaggcatatctttatatggtctcttgtgagttgttttaattattgtcagtgtgacccttcatcccacctctatgttgtcttaagctaatcaatgatatggcaaccttgtgtgcttgctacatttgggtcataacccatgcaatatctttcatctttgattccttcactttgagcctttaattatcaatttaaataaactaaagtttttaattacatggaaactttcatttctattgctcttgtctgagattctagaatttttaccgttgcactatattgcgttgctgctggtaggggtgggcattgattgaatttttaagaatctaatccatatccaatccatatctacttaaatggattggatcttaaatctatattcatattttttttaaaacaatttggattcaagatccaatccatttaagtggatatggatttggtcatatccaatttatatccacttaaatgttataaggattttttttttacaaattttagtaattaaacgctaaaaagtgaaaacttagcacttgttcatttaagagttattttcaaccgatcttggtcaagactattttcaatcgatcttggtttcagcctatctcaactagggcaatttgggctgacatcggcccagacatttttagaccaacttcaaccaggaattttttttgactgacgtcggtcaatgcatttttggtagacgtcagtcaaggatgtttttgattgatcttagtagggttattttatggtcgaggtcgactaaggtttttagtcaatgtcggtcagtaatattttttggccgacatcgagtaggggttttcgatcagcggttatcgtgattggtttttttgtcaacgttagggtttttttgctagcatcggtacgatttttttggccgatgacgaacatcgatattttttggccaacatcagccgatactatactttggtcaacgttggctaggtttttttgttgacgctagttgaaactatttttttgttggtgtcagctaggttttgtttgccaacattgaccatgactatttcttttggccagtgctgactaacgatattttttgttgacatcaactaggattttttttatcggcgttaattgggggaatattttggccaacgttagcgagttttttttaccaatgttagtcgatgatgtttttcggttgatgtcggccaaaaaattccaagccaacgtcggcaaaaaaaagtcgtctgatgttgaccaaaaaaatcatgaccgatatcggttgaaaaacctacctgacgtcgaccaaaaaataatcttgacagacatcacaaaagaaaaccctaactgatgttaaccaaaaaataatctcgaccaatgttggctgaaaaaacccttattgacgttaaccaaaaaatagtttcaaccgatgatggtttaaaaacatcatcagttgatgttgtccaaaataactcttggcaagatcgaccaaaaaataattcctaccaaagttagccaaaaaaatctagcaatcatcatcccaaaaattgtattggatttgaaaatccaaacaaatattcaatccatatccaattaattggattggatttaaaatccaaaaaattggatttggatataaaccaaaccatttaaatggatataaagtggattagattgaattggatatggattgattttatatatttggattattttgcacagccctagctactagtatgcatcttgtgctatcaagtcctggatggttggcttatatttgtgagttctgaataacaatagctccgacaaactagttttagggtttttatttaacttagtatttgttattcatcaatttttttattcatttgagtgttttgctgcagccataaaccattttgttactacatttttgtagtggctcattttgttattccaaaataattttagtttttatctttttcttcctaagcaatacgctcccagtaaaagaagcaacttacttggataatactgtttgaaattcactgcactgcttttgattctatatatttatcatcaaaatttaccatatttggatggtgattatttgttttgttagtttattaaagtgaaatgttgtaaaagaaaatcccacatgcccatattgagcttcagtagtaataaattagagtataaccaaaggatgcgtcgaatattctgggggctatcataaattatgcttagcaggtccaacttgggggcttatttaatgtttgtgttcaagtcattagttgagttcctcttcaccaaatccaattcaacatttgctctgacatttgtttttgacagaaatctcatttctggtttaaaagttttggatattgttactaattgcaacatcatgaactgactttagcttattgttttcatgaacagtgc

SEQ ID NO: 2451 - DNA, 2853 bp, Glycine max
  Intron number 2 from transcript Glyma05g22250.1 (locus Gly ma05g22250) derived from phytozome v7.0 (chr-ID Gm05; pos 27318518 to 27321370)
taatcaagattcttaagcctgtcaagaaaaagaaggtgacattttgtttttgcattgttgttcttttcgacctttgggacctggaggctgaataaagccaggcagggaaggttctttagaactgttctcttaaaatttgcatcatggacagtaatttacattacactcaaatttctcacacactcctcactattttcttgtgaactattgaataacagatggaccattctggcacaatctccctaacacagttgtgcaataattattttgaaaacagaataaaataaataaataaacttaaaattcatcataagacatattataatcattttattaacataaatatattgaagaattttatcaggcataaaaacttctatcaataaataggagttcacagaaaaaaaatatatggacatataacatgattagtaagaatgatttcataattcatgatataattttattacatagctctggtattatcatattagactatacttgatgaaaaaaatctttgaaagttatactttgaaataagacgatgggcctcaaagttcaaactagatgactttttgttgaagaaagatgtgtagtgtagttttgtttccccttaaaatattggaggtaagcttgaaacatatgtataaacttctctttttgaaacaataacaacagcaaagccctatcttgctaggtgaggttggctacatggataacatgacactatttgactcagttaaaaaccaatgttttagcaatgttatttaccatgaggtccttcttgaccactttctccaatgttcttcttggcctccctctccgcttcacttgactaaaacccatactatttattgttctcactagtgtgtctcagggtcttctttgtacatgtctaaatcacctaatcgattttctgttatctttttgtcgattggttgtacaccaatctctccgcatatacaatcatttcttattttgtatttttggccacacattcatcttaactttctcatttatgctatttcaacctttttctcttgctatctctttaaattcactaccatagagtgtggtaacaaataatccctgatgcctttctccattttagccatcccgcatttatcctatgtgtggcatcctcattaatttccacttcattttgtagtattgatcccggatatttaaacttgaaaaaatgtggtatgacattttttcccatttttacttccattccatgtcacattcttcttgtctcttgctaaaattacattgcatatactttgctctactcctacttaagtagaaaccctttgtttcccaagtctgtctccaaagttcaagttgcaagttaactactttccttggctcctcaatcaaaattatatcatttgctaaaaacatacaataagggatacacttttgtatgtcttcagtaagcatatctaattagactaaacaaggacttaaggttttgggggggtctacactgagagaaggacatagtgtagttgttggtgcactgcagcaacctgattctgcaaaatctattttggaaattggaattggtagccaaaccttaattctaaccagcgatgtgaatcatttagggcattaacaaatgcaactttggttccaatcagtgttgtcaaatggcggccatggcggaaaggcgtggcggatttttgaaaaaatgccaccgaatagcggtggcatggcgggttgcgaatggcggcgccatggcggtcatgacggttatggcggcatggcggaaaatagcggatttttaggttttattttcgcggtaggagttgggttgacccgacccaaccctacccgctattttgttcaaaagcgcagccctaccacgatggacagcacagaacgcagcccctcccacgcgacccagccacgaccccgcacccagccgcaaccccgcagcgacgaccccgtgttccccccgcacgacccagcaacgacaactcgacgagcaccagcgcaccatgcacacggcgaacggcgacggcgacggcgacggcaacggtgctacagtctgcaaaggacagcaacgtggtcctgtttttgttttcctttttttgctgttgttgttctgtttttttttctttctatttgacaccccctttttttctgttcagccctttttttatgatatttttctgtttgacaccccttttattttttgttctgctttttttttttctattcagcccttttttatgatatttttctgttttacacccctttttctgtttttatgcttttatccttttgttattttgaactcttgaatgagtttatttggtgttggtatttggttattatgagaactcatgaaacttttttagtttatttgaatgcgatccattgtttttttttattttttatttatatttattttttatctattgttttgttaatatttatatgtatatataattatatatatatatatatatatatattttttttttttgtccgccatgacgtccgccattttccgctacaccatccgccatatttttatggtggatttttggctttccgccatgaaccgccatccgccattaacaacactggttccaatttttttagtaggaactacaaagagctcctcatatttttggactttgtgatatatcttttagtttttagaaaaactcttgcaattagactaagtggttgaagtcttgtgttaatttgattttgtttttggttatatggtgtttcttgtactactgcattcagttcttgtgagatttttgtcttaccttctgagatcttcaacatcattttgcagattaaaagagagataaaaatacttcagaacctttg

SEQ ID NO: 2452 - DNA, 1904 bp, Glycine max
  Intron number 3 from transcript Glyma13g22030.1 (locus Gly ma13g22030) derived from phytozome v7.0 (chr-ID Gm13; pos 25592016 to 25593919 reverse strand)
cctcatttggtaacttctatttatttaaagatgtactaaaatatatatatggaaaaacgaccaaaaaagagagtattttttttttcaaattcacaaatgggataaaattttaatgagtatccgaaagaaataaatcataagataacttattatttctaaattaaaagtcataaattgttttatgattttttttcattgaagtagtaaaaaattataggattttattttttttgaacaagactttaaagttataagagttttttttttttcacacgactttaaaattttattggatttttttttccattgaagtcgtaaattactttatgatttcaatttttttttgtacgtaaggcatttttgtttaaatcataaataattttttattttaattatttaataaattaatatatattttattcttttagttttatttaatattccatatattttaataattttatttaatattttcatatttttttatattattttatttaatatattttctatattttttattaatgttaagaattattttttttttataaattaaaaaataatacaaaatatttaaatttgagcaaaacttgtgtgaatattactcagatataaataatttctaacgtatatttgtaaaccgtagattaatagctgtaaagccgattgaatggataattttttttttttgacaaacggttgaatgaataatttaagctgttcggagtctgaatgttgattaaaaaaaattgaatttgtcaaacaatttactaatgaaaaaaaacggttacaagttgtgcgaaaaaaaataaaaaaaatcttattactacaaagtcgtgttttaaaaaaaaattaaagttataattttttttactgtgttaaaagttataagttatccttaaggacttatccctctaaaggtattaatttaaattttattcccatttgataaatttgaaaaaaaatacccctcttgatcgtttgctgaaatttttacacaaacatacaataaaaaaattaatatatacacaaacatatgcttttactattcacaatctaaattcaggagaattcgaatttgcacattgatctttaaattttttttataaaatcaagttgagaatttgagtcccccaacttgaactcttaactttttttttgaattttttttaaaagataataaaatagtaaaataaaagaaattaattcaaaataataaaattaaagaacataaataagaacaaattaattctaagtagtattcacaacatgtttaagtattttaaatttgtaatttatttaagtacttaaatggtaattaaaaattatatgataatttattctgattattttcatgtcaaggaatttaacgaaacaaaaattgaagcttaagaaaatccaaaacatctttataattgtagtaggaaaataaaaaaaaaattgattttaaccatttaaataaaagttcagttgcgttaattttacaagttatttaagtaacattgtgacaataaaataactgtatgatatcttaaataaatataaatattaatttacattaaattataaattttttatattctctaattttattattttgaattaattttctttatttatattattttaatatcttttaaaaaaacattaaaaaaacacagttgagaattcggattgaaagaaccccaatatacaatttgattttgcaaattttgttaagaatcacagtgtaactttggatctccaaagttgaatttacactatgaataataaaagtatatgtttgtgtaaataataagaagatatatacgcttgcatatatattaatttcttttttatgttttaattaattaattaattaattaaactttttgcaccactcttttggggtatgtatataggga

SEQ ID NO: 2453 - DNA, 1424 bp, Glycine max
  Intron number 1 from transcript Glyma17g37280.1 (locus Gly ma17g37280) derived from phytozome v7.0 (chr-ID Gm17; pos 41084065 to 41085488 reverse strand)
caaaagactccaaaaaactggttagtaacaaaacttcttcttttgctttttgcaccttcctagtttgaagtttctcttctttccaactttgttttcctgagatgtcttcattttttttgtccctttatgtctttaatccctgtggattgcaaaactttcgagtcccttgccagcaaattattagattgtctgagaaaaatgtgcttcagccattattttaatttataaaaaaagtaatatttttttatatagtgaaatgttagtaggggagatcgaatctgtgagcttttcaccttttcttcttccataactattcaattcattttatatcttccaaacaaaattcttagatcgatatggtgtgcaacagttctgcaagtataaacagagacttgtgggtttttacttttgaggtgtagttggctagttgttttgcctttgcattttcacaatcccagttcacaagccacaactttgtctggcattgattattgatttaaatatgctttaaacctgggttgctataactttattcgtttttgatcctcatacaacttttttaattagcttattttttttaataatttttaaagtttaaatatatttttttatatttattttatttttcattcttgatgtattttagataaaaaaaaattgattgtttaaaactttttttattgttcaaaagaactatctaacacactttaagaattaaaaataaaacaaacatattttagaaagaataaaaaaaattaaggacaaaaatgaaaaagctttaaattacaagaccaaaaatgtattctagcttctttttttaaataagcatttagtagaaatttggtatggatctggttatattaagcgagtaatgattaatattatcagattgtatgtatatgtaatgtgatgtgatattataatgaatttttttttatcatcctgtattataattttataattgatgcatgtggactctcgtgatgtctaaatagattatttgtagtagtatagttataattttggtctgaaaaacctctttgcatagttgtgccatccaactttatgctacctactttctcatcttctaatcatattaaatagagaattatactatttgttttatacttaaaaaaagggccgagacacagaaatgtgagaattttttttattcttaagaatcaaagataggtaccgtagctcaactaattaaattagatccgttggtagaatgtgagattggatgtactagaactttgctgtatgaacaatatctctattaatatttacaaattatatatggtgttatcttgttatcaccccgtttccttatttattttaaacaagacgactttcttgaaagaaaatgacattacatttgattactagattgtggtggattttactgcttcctggtgtggtcc

SEQ ID NO: 2454 - DNA, 1963 bp, Glycine max
  Intron number 4 from transcript Glyma03g16140.1 (locus Gly ma03g16140) derived from phytozome v7.0 (chr-ID Gm03; pos 20493108 to 20495070)
gcatttggatttcgttagtaacccacaagcctgtatgttatcgatctatgtcattaacctttgcttttgtgttctaatatggtaaatccttcctgtttccaattagaattaaattatgatatgaaacataagtttagtttgatagtaaaaaggtgaaagaagggaggaataagttgcatcttttttctaacaaaaattaacaaataaataactaatatttattgataaaaaaattaaattatgatatatgattagtgtcaatatattttttttagcaaattttgtaattacagagagaaagtttttttcttaatttaatttcttttgaacccaaaaataattagttaataatggcatatttgacacacaagttttttgaatttaattgatatagattgacattgacaatgtaaaaatcttttacacttttaactaatcacaaaatttcatatcttaaaaaagttaaagtcttattttaactacttaaaagttatacgtatatactataaattgtgataggttaacaatataaaaaataaattttacatttaacgtgtataataattaaacttttttcattaccaaaaatgcgtgtgaaatgcaccttgaaaagaaaacaatatgttgagaaactctataatacgagaaattttcacactctttaaattagagtttttaatttatactgtgaggaaataatttaatgaaggaagcttatttaataatgtttataagtataaaagataatattttctttaaatgtgttcattaccttatgataaataattcagagtgtgtaatttgcaacactgattaactgaaaagttaatatacaataatatatatttaacatgttgacagttaaaaaaaagggttgaaatcgaatgattcatctgttgatttgaacatatttcattttcttatccacatgcaagtatcaacttcagagaatttccttattttatataaaaaaaactgcaaaagtctgaaaaataaaataaaaggagaagatatttaagaacgattggctgcatttatttaccatacccaaaataaactgttttgtaaaaatcaggttaaatggtgtggggtatttggctacaggggacggggaccatgacatataatggttgctctggcctatggtcgataacaattaacaagacatatttaagaagcttggtggcttccctcagtaaattctagtgtggtcatgcttgctgtaaacattaatattaccacgtgggattcttgcttatatgaaaatgagaaattctttactttattgactgtatactctctcaatatactaatttttaacccatgaacttcgtgatcaataatgaaaatgtgttaaaaaaaacttaaaatataactttggtttctcatttgatttttttttcctttgattatttaaatttgaaaagttctcttagaatgtattattaaatcaagttagtcttcttttatctaactgtctcactagttaagttgatgacacatgacaattaactaaaataaacatcatttgtaaaaaaagtgacggaagaattttggtcttacataatattttaagataccaaaaggaaaattttttaaatttaagagatcaagctaaaacaaacaattttagaaaaagaatcaaaataatattttaactaaaacagagtgttaacattgttcttgctatcatttcagtgtgtgttgagacacacgttcgagactcaaaaatttctctttaataaaaacacaaactactaaaattgtaacttttacttagatgagaatcaagtattcctgatgtaaaaccaaataaaaacccaattatgcttttcaactaacttttgttgatttaataatttgagaaatcggcgtgaagcataattgctaagcaaagttccaatttgaaagcatgtattaacctttttattccacacacaggttttgtcacgtcaaaagtagc

SEQ ID NO: 2455 - DNA, 500 bp, Glycine max
  Intron number 4 from transcript Glyma02g48200.1 (locus Gly ma02g48200) derived from phytozome v7.0 (chr-ID Gm02; pos 51630048 to 51630547 reverse strand)
gtgaaagataaggtttgaccttgctgaatcttttatattatgtcttaggctcaaccgttagagtaccagctttgtgacattacttgatgtccaatctaggtgtggtttcatttctattaggcttaattggatttcagtagttggtacatcatattttactgatgaaatttgaatatgataattttaatcattgaaaattatcctataaaggcaatgtgatttatacatatttattctgaatacagctttaaaaatatcaattatttctctttccatttattttatcttcttatttaggtgatagtagttatggtaaattgtagctttgtgtcacggaaacacagtgaacaccatgagctatcacatgtaatatcattttttaaatgacttggatatcatttgattgattatatttcttctattcttcagaatatcttacaatgctgaatataggtttgacctgaatttgtagtgtatattctatgttaatggctttccag

SEQ ID NO: 2456 - DNA, 3239 bp, Glycine max
  Intron number 6 from transcript Glyma20g23010.1 (locus Gly ma20g23010) derived from phytozome v7.0 (chr-ID Gm20; pos 32941307 to 32944545)
tccagacttacactaaggtttggacccttctctgtatgtgtttattagaacatggagtagggattagagttgtttagatgcctaagtggctaggtttgtttgcgttagttttcttgaaattttgaaagttgacacacacacacacactgtatttttgtgtaaactctccaatgaattggctctatgttgcttgcaaatgaccctaatattcttccttaggttaaattgcttcattctatgtccaaaagccttatcaaacatggaaaatagttaatgtcagtctttgtgataattttaccacctgtggaatggtagagtgagaaagaagaaatataaaaggatcaatcaagaacagaaaatattaggtaaagagcgtgtaaatcattattattttaacttctaagaaccatgttttagatatcttgataagtgacaacaatgaatttaagtttgatgaagtttttggctgtacttcaagcaagtttcttgccattgtcgtatagaatgattcctagtgggatttatggattcttgacattttttctttcttctactctgcactcagcatatcaccacagaaatttatattattttcatatgatgtgatatattacaatgtgatacaaaacatgaagcactaacctttacttatactaatattaccaatactagatcataattctaggttatcaaggcaaaaaatcataaaaggtaagaaagtatggaaaccaaggaaaaagggaaactaatcctaggaaattatgtctaagatataaatatattattgaatattatatatgttaatgcaagaaaacattttactctgtattttaaattcaatcattttgcgcgcttgcatttttggtacaagagaagttttatctatagcagtggtgcttcttagccttcgccaagtatcatttggtactgtgaatccataggtaatttgaacaaaggtagaatatacagcatattggtgataaggacatgttagtcatctttgcatcgtggctgaggttttataataataaattattagcccttagcccagttaaggaaatttctagggtgctgaatggttaatactttttcttcaatttggcatgctcattaaaagacataaattgtctatgtaagtcttctatctatataatatttgagctgcttgtttttgtattggttggttggacttggagtaatccatgtttggtataacaacaagttttatgttggctgccgagggcataacactaccctcctccgtaacctgggcttggaactggctatgaataacataagcagagttggagtaaatcgtcaagggagatcttaggctaagtaatattcttgaaactttggttattaaccatgccaaatgtgtgatccatgtagccgacttcacctagtgggataagactttgttgtttttgttggttggacttagagtaaaatactcaattatttaatttagtgataattacttttcttagttattgtatttttcattactatataacaattattagggtcaacttgatcttgttccagatgaatagcgattttacttatgtttctgaaacaatttttctgtgtaataaaatcggaggatagggaaactattattctatttaaatacctacaagttattaattgttgttattttttcaaataaactaacggatcgtgtattattattcttcccacatacacataaatgaaaatgactatctcaaaacaattgctagttattctgtattttttttattgctttaaaatatagaaaaaaaggactatgcagcttgaagtaccgaagttcttataatatggttgttacatgtaatattggattatagtttgttaatagattgtcaagtgtaccaattttatcacaagtagtaaagattaaaatggaagtctgagtgtcgagtccatagggattttgtttgtacttgcgttggtaaatacccaatttgtaagcaatagaagaagtagaagagaaaataaatgataaatgtgaaaattgagagtaaaggggcaaaagagaaagataattagaaaattaaacaatagcttttaaatataaaagatgaattcagaataagataatgttgggtcctagcatgcctaattacccttgatacaatattaatgattttctctattgaatcaatgctctcccaattttcacccgcatctactagtatgctcaacccggatccctcacgttgaagagcctaatttatgtattctctctcccaaatccctttgcaaagatagaataataaacaacattaagtatgaagatgcatgcaggggcacaataaagtcactttatccctagaaatgcagtgttgagatgtcctttcccaattcttttagacattaccacttcccaatgaataacccctaaagcagatgcatggatgaccaaaccacacaataacgatgataagcaggaaagaacaatggaaattgagattgcattaatacataagaggaacaattacattataagggagcgttggctgttaagccccaactgagggggtttagcctctcatagtcatgagagaccttacacttcagaggctaatagaagaaagtgatagatgacaagtaacaaacaaaaacaagggaaatgaataagaaagagggtttcccctaagggagaggcttaggctttggatttatgtactggagggctctgagactcggtgtgtgttatccttcagcttcctactccttttataggcttaaggtagcttacttttcacgctaacttcgtaggtgagcacacctctgcgcgctatgtgcgcactgggcttctcttcgtgggccttctcgcgctgagctggacctgcgcgctgagcgagtgcacacactgagcgagacctgcccgctaagcgagtgttgtgtgttgggcctacagtgcgcgctgagcgagctatcttcttatctctctttttcttcacaatttttcatcaaattccctctaaaatacttcattctccttcttttgacttttgctaattaaaaattgcaaagatgttaattttttcattaaaaataataataaaaaaaaattacacctactcattaatccaaattggctatcaaattggcttatattttgcagttatcacagttcaatactttacttctttgatattattatattgatttcctttttcttaaattgtgcagcatataggtgattttacttatccaaggcttgcaga

SEQ ID NO: 2457 - DNA, 1396 bp, Glycine max
  Intron number 3 from transcript Glyma08g15940.1 (locus Gly ma08g15940) derived from phytozome v7.0 (chr-ID Gm08; pos 11626476 to 11627871)
aacaagggaggacaggtatatttcgaagttgtgtggaattaactctgaaaaaaagtttttttggggtttggtggtagtgctgttgattacagtgggagagagcttggtgattgagggtagagtttgttagaatgtatgttcggtttggtgtatagtgagggtttttcagttaggttcaatctgaatgaaactagagtgttcatgtggttgtgtgaaattagaatgctatagtgagggtggagagtggattaattgaaggggcacttcacaagtgcaaaaggaaaacaactctatgcatattggataaatgcggggggcgctagacattggcagagcattacaaaaaatcaagctgctaagctcagcaaagtcctcatgcttctgtgcaacgagatttgaaattgctgccatgattgcggctttgttatgatccttgatattgtggaaaattaaggttgatgtgccagcaattgccaaattgcgattgtgatgcagttattgagaccttgaaatatatctgtgtagttgccaagctactttcttgtcatttcctttctcaacaaggagtttaggatcacaacaacagaatccaattcatgacgtcaaatatttctgtatcccaagctcatggctaatttcaaacaattccccactgttgaaagaatcaactttacattcatggaatctgagatagttttgagtcttgcctaattcttttcgcctcatcattaggattgacctatgttggtgtgaagtaccattccccttcattaaaatattgctctttgctatgaacttatgatgtagtagtagaattactgctatcctagtgtcctttggtatggtggatttttgctataactttttattcctttctagaaatatatatttttagttgaattcaattttaaataaaactagagtggattatatgatgagtggttacattgatatgttaaaaagatgttatggtagattttggtttatgattatatagattttgactttgaagcttgtcatggatgagatcatgagatataggggtttgtaatgaaagagcctatttcataagatcatattgattgaattagttgattttcaatcagaacgaagaccattgagaacccaaactgcagataaaatagtttttgaaggagaaaataattgtctgatgaccaattcagagtttaggggagagtgagacaaagaagtactttggagaaagttgttaagagggagcccaaggcattgtgtaattcatgtagccgaccttacctagtgggataaggcttttgttgttgttattttgaccaattcagaaaaataatttagttatgacccaatatttcttatgtgcttgactttgcttctgtaatgtatgcatccagctcttcat

SEQ ID NO: 2458 - DNA, 1750 bp, Glycine max
  Intron number 6 from transcript Glyma02g43540.1 (locus Gly ma02g43540) derived from phytozome v7.0 (chr-ID Gm02; pos 48300889 to 48302638)
ggggatatatttcattcagcaaatatagtgtcaaggtgagttgtttgttgaaattgctttagaacacttattactcatctcttgcattttgatgttttttttatcatggcttcttaaaaaataaaccaatcaatgtttttgttcctacctattgtcagttacattatggttggtataactcatagagccatgctatgggtcaatgatggtattttttttaatttagtattttatttggtaatctgtgacttcacaatattataataatgattgttgctttgattctaaagttgggatgaaaggtttttattttattttattgaatattgatacggtttggatgtaaatggattttaacatatatttatacacagggttgtgattaacttgaatagtttatgttcttcatcatcactgtcactgttcccccaatcactgatttaacttgaaaagtcaatgttcttcattatcccttgtctcttatttagtaaacccttttttggtcattattgagttcgtacactatcatatatttgtggaaggataataacaattttacatcattatgtaataggtttattgaatatgtaagaagtactgtaggaggctacttggagtctgtgcttccagttccttttctttctgatttctctttttgcctattaatttgacactggcctatgttttttgtaggcacctctttgtaattaggatactttcttgctcttaacttcctgatctaaacaacaaaagaagtaagccatgccaactaagtttttgactaaagccttttaaaaccttcctgacttcacgaatccccttgtcatgtctatgttggtcaaacgatactagttttctccctttccaacatagatatctaacatctgcctcaatttatttccctcccatttcaactgatttagctcaaagttcaatttgaatggggatacaattataatacaaccttttcctgccattggtagttctacatttttttttgcgcaggcattgggattggattgttttgttgcctgtgctgagtccgggttgctgctcttgtacctattcttattcacatttgtcaagctcgaaacagatgttcagttggaagcaactaattttttgcttctcacaaaacggtgcttttgaatgtctgcatggctgttcaattgtataaaaagaagatatacctctagttttttctgacctgaaaataatctagtgtgttaagatgcttaattagctgaatagtttctcgatacataagtcaagactctgtgcaaaatcccttgaagatcagcacaccaacatccctactatgagttgtctgcctgtctagatacgagtgttaatggaacagttaaaacaatggatttgctatttcctgaatgaaattataattatgttatatttattattcttatgtataatggtcttggtaccatcttgataatgatcaaattttaggtcttgatctgttggtactatgtcataacagttacatatggatcatgttggtactaaattcctgttcatatatgttcacattttattctagagaatagagatagattagtggaaataataatactaggtactatgacatgacagacaagtttttatttagaagttgctatcctttttcttgatattattgttgttttaatatgtagaagttagacagaataaattttctgaattcatggatttaacatgtatattgcactttgcagcatagagtttgaccgcg

SEQ ID NO: 2459 - DNA, 795 bp, Glycine max
  Intron number 28 from transcript Glyma10g37900.1 (locus Gl yma10g37900) derived from phytozome v7.0 (chr-ID Gm10; pos 45801970 to 45802764)
ccaagaagacagtttctgaacgcttagaagaagaggtatgcaagttacattcagaagaatagcttccttgttttttatcctatcataaatttccacttagagttttgcttttgacctgtcttaatatgtgtgcttttttgaatttatttttgcttaagcatattttatatataaaaaaagggagcttaagcatgtatcttgttatctagttcaattttataattattttaaatatttttaaatgggttatcttttagttgaaatattgtatagaccttataatttgtatgacttacaattttaagtctttatggaactctaccattcttgaatattttggatttatcgattctgttattgaaaactcatttttgtagaatcttccattattatcttgaatgcaagaaggacaaatccaagttctcttcttgttctagtgtgtgtgtgtgtttttcttaaatgctttgtaagacaccttatgtccagtattttccttcatttatctctaacaaaatttattttatcaaaaaaaaattatttataatttgattgaagagtgatagataaactttggctttagctttattgagcagaagatctgttcacttctgtttttattgtaagaatatctagtgaccttggtgagggttataatcgtttttctttttccatatctccaaatcccgaaaacattctcttacagttctgatttgtcacaaagtatatattgaagattccagctatcttctgttcttatagtactttgttggccttgacttgttcatcaggtacgag

SEQ ID NO: 2460 - DNA, 1975 bp, Glycine max
  Intron number 2 from transcript Glyma13g43580.1 (locus Gly ma13g43580) derived from phytozome v7.0 (chr-ID Gm13; pos 43213572 to 43215546 reverse strand)
tattcctcctggtttagtgcacgcgcatcacacgagtacttaaccatgctttaattaatctgtttacttctcttcataatagcgcgcctccattatttaattttattcctttcgactgtgtgcttgacaactcagacctacgtagctttgatccttaaccttgtagtaatatgttatatgtagttgtagtttccctcccagtcctagatgccattgtagacaaaggttattccgaattaataggggcaattacaacaagttgctactcgcattttgtccaaatcagaaactacaggctacgtcccttccatgttgctactccaattagtccaacggcttccagaaggagttgtagcttaagtgtgatgaaaataaccaattcaaaccgagattgttgatccgcttcagaatcgttgaatatgagaaggtacagggcactcaaaagtcggttgtaagctctgtgatatgagaataacatccaccgatggcttcgattactttccctctaataagccaaccctcactcttcaattacaacactcaaactcccaaacggcgtcgttaatgagaaggtgttatgtttgtgtttgtgagtggcatgccatgaagcactgccactgccactgggcctttcaaggtggttaaatacaaacgcaaggagaaatcaagagatttcttaagcagtcttgactaacatgtagcttctaacttgtgacagggcctcacctgaccatcaccaacaatgcacactggtttgatttttttttttaagtctatgtctgcattgatgaattgatgtctctagtagaaactaaaacggctttaaaaattggttttgaacctaaaactagtttgaaagtggttcacgtgaacttctggttttgccggataaatgtgttttggtcaggttttttaaaaccaatccattttactggttttggtttgatttttttttcaaagttccaaaccatccccagccatagaaaattttgaagaatcaactcaagctgatagtatgttttttctcttatatactaaacatgtaccagagggcgaggcctggtgcagcggtaaagttgtgccttggtgacttgttggtcatgagttcgaatccggaaacagcctctttgcatatgcaagggtaaggttgcgtacaatatccctcccccataccttcgcatagcgaagagcctctgggcaatggggtacgaagtatactaaacatgtaccaatagtttaactgacctcaacagaaaagtaactaactaattaactattttacttatttccattcagaatttctacaatttagtttttcacaacatttttttctctgtctctctatcactccctccatcttatcccacacttctcttttcttatccttttccttgtaaaaattgacagaaaattgtaagtggaaataacattactctcagtgatttggattgtgggaaaccaaacaaaaagaaatagttcaagaccaagctgttgcgcaagaaaattatgcaaatggtcttttcctgtttctgtgaagtgtcaacaacagcacccacatgcgaatgaatctctgttgttaacatgtttgtgtacaatggcaagagtgatgtgcaaatttcaggagcaggataggggataaatttggcaaattttgccaacagaaaggctagcttcgatgtgtatgacaaacagaggatgaggaaatgagggatgagacttgagagtgtgataagttagcaactgatacaagtgcaaagggaaattttaaaatgccaaatgtgcatttgaatgacttgtggggatgaacttgaatgataaagaatcactgagggaacctttgcgtgggaataatgtgatattattacagaaaagatcttctaggaatgaaaatggtgatttactctttttaaagccctgcacactttttttcccctctttttcatttcagcttgtttaccatgaatgtagaaagcag

SEQ ID NO: 2461 - DNA, 5922 bp, Glycine max
  Intron number 1 from transcript Glyma13g20210.3 (locus Gly ma13g20210) derived from phytozome v7.0 (chr-ID Gm13; pos 23633620 to 23639541 reverse strand)
gaaagatcacaactccaccgtcaccgatttccaaggcacgtttatctcgccgattccatgttatgttatgttatgttttgttgcaattcttacacgcatgatcaccgatggatgattgaacaactgtttatgtgttgatttcatttagctctgcaaaaccaccacaatcccctcactttatcggttctgatcttctcgttgattgtttctgacgtatcatcgccctctccatggcgcgtttgtgattttaccttttttttttcagagaagggaatattatctcttttttttgtgtgtgtgatgccttttcgttgtttatcacgaactctctgatttccagattgtttgtttggtgcgggattttttatttcccctgggaaattatgctgtttatgagtttggttttcgattttgttctgtagttgcggcacagaatattaattgtatggaagaaactgtgcaaattaccgctgaatcacgctcttcgtgttcataataaaaaccgcatgcattttttttataaataaatactaattattgaaacaggggaaataaaaaataaagatctatgcatcggtcaaatgtggtttaatggatgttggtttttataacctgtatcccccttctgcgtggtgtaccctattctcctttattgtaaaatcatttcaattgggatccctaataaggtcttagatttagttttgtttctcattttcctcccctttgttctgtggtgatagattgcatggtgtcatctttgtatgttttcctgggaagaacatttggttatttgaagtattataattataacaagtctatttaatgtattacgattatttatttttatgcttgatggatagacatcgtagaatgctttcttgcttcatatctttttgtggctggagtgaaaaaacaatgaattattgtcaaacttcttattgttaatactataaaatatacataattttattagtatatatgcttcctatcctaaaaacttgttcagatctcttcgctgacgttgtaaaaaaagggtaaaccttttcctgatcctagtttttaactttttatcaacttctgttgtctttatgtgtggtaaaaggggtttggggagggtagtatgtgtacactgtttcaccagcacaagcgaagaggccatgttcgcaggatttgaacttaccaggtcacaaggcagcaaccttactttactgttgtgcctaggttcaccctcttgtcactgtatgtggtatatggggatatttggctttgtaattaaactagtgttgaattctaattgttatcacgcattatggttttgaatattggttgctcttgcatatattgttggtcctggttttgtttagattttcttagaatctattaggtttagatggttttttattatgcaggtttcttggtgctgctggtgtattatacatgcttacatctgcatgtgctggtgagatgtgcttgcgttggaaattctccttcattctctctattccccacttttctttagcaatttacccttcacggatcttttcaagcattttttggtatatgatctcttatgcctttgggttcatattatagtgatattatcattattggtggtgagaactggttttgtttgccttcgcatttgtactgtacaggttatggaagtgaatgaattccttcatttggtttcttcaattatgttgtctgaatcacagatgacgtatcaggaattttgagtcttgggttaatggggtgactatagaaatgatgactttgtcatgagcatttatgtcaggatttattaacatgatatgccgctgttatggattggtatatgccaactttcatataggaagaagaaagaatgtgacaccaaaaatcctgttaattggaagaattgcataggctttattcaactagaacgtggcctttagatcaagctcgtccatctactgggactgggtgcctttttggtatgaaatgtcctagcagttatgctgaggatgttgttgcaataactctgtcacattccaatgtttggtgaagcaaaatgttggtgttgagtgttactggcaatctagggaatgatgtggcacttaccatattttattgttatagttctaaatgggctctggggtgctgagataagattcttgtaaaccttgatactatttgccccagtgacttgtaaatgcctagtcaaattcgtctcattcttagttttgaatttgacattatgtttcctgttgtggtgatcttacttcgtggggctgtataatgagtgtaacagtgcagtaacagtattcatataaagaattcactgtaaattggtatgcactatggacactgcaatgttggaccaatagtgtatatgattgatgaagactactgttcaatgttcatttgccttgaattgatattaactgtctttaatgctggtgatgattgttattctgccgaaggttggtttttgcaatagtacacctactcattactgggagtcgtgtagtgctggatgatgctttatttggatatgaacctgtaggtttgctgacagagaagctgtttgattaccacaaattggttatcttctcccatggtcctaaattggatactagtgccatgagtatcgatagcatagccagaatgcaggactttctcccttttgcattagctagtttgagagctggaaaaaatcttcttagtttgaacttattcttcctaattttaaattgccgtcccttgttggggacaatggaccttcttaagacaggcttcgttcactttttatacaattatacacaactctcctgtctctggtttgtgaagagagtttattgcaattggatattgggatgtgctttgattgttgatattccggtaaaaggcaattttttttatatggaaagtcattgcattaactttgaactttttcttttaaatattcttattcctatttaatgcaaagccaataagccacgtgattatagtttcaaatatgaacagattcaggaatacgcttgataaaaaggcaatattatttacggtgctatttaatttaacaccgaaaacctatgttttgaaagcataagtattgttatattcagctaattgtttgtcttgatattcgttttttttttctgtaagggtattatttagtatttggattatagtgaaatctgaaactaaacctgaagcttaatgtttcctcataattgaaaaccaaagtgaaatctgtatttttttctgacaactactggttctaattatttaatatattttatatttggattctatcagtgccaacgccagtttttagcagatgttgttggctttaacactctagtttgttaaagaattgcttcataacttttttggaaaaaattctgcacatatagcgacgacgtctttttaattgtgtacactttagacattgccaatatctgaagacatgtaagatatggattgtcaggggcatgccctttgcacagtgctgatttgattctatataagttaattaatgtttttaatattcttgactggttttaatctgttccctttttttcttaaatgaaacggtaactcattgaaagtatgcctcttccttcttattttggctttaaattattagagctaggataatatggatttctattttctttactatttatatttgcctggtctcaaccattgggaatggttctttctgctctcccatattctcactaattatgttacaattttgtgattaggagattaaaagataatgattttggaaaaaatggtgctggttcttaaactatttctgatatataaaaaacacatcatttccttgtagtaaaaactgcagtctagttttgacatttgtctctctttttttccccagactcttgtgctctttataagataaacagggtgaactttttttttttttttttttaacaatgctcgtgtcctttaaattttctgtaagatatacatcgcttttattaaacatttcatttttgttgtttatccaaagtttgcttcaagatgccttttcgattttcgtttttccatttcccccctttataaaaccatatagtcattgtagttcaaatactctgcttttttagttaatacactgtatttacataaattatttgtgtttagttggtcttgtcttgactactgatacttattagaaggcaaatataggagtctctcacttttgtgcctgattgtgcacatagttgattatctttttcaagtgcaggaaaagaatagaaatgctaacatttgctgagtgatcctttgtaaacattgccaggtaagtcttttgcttgagttatcctacttccaatcgctcctctttttaagtcatatctgaactcttgctgctacgcatgataagctagagtgaggaaccatcatccatctaatttaaatgccagctgtcattttttctcccttgtgtatgtacactacttcctttttccctcatctatatttttcttgtgtcaatgaagagaggcatcctatgagtttggtttcaagtgattggacttattggggctcatggtatttgttacggctaaggagtatatgagtggcaactgtgtagtattttacaggctagtttctgccattttatggggaattcccaagccttgatgatctgaagcatatatttcctcctccccttcagaaataattgccagtggcgattctcctcatttggccaaattgtattgtggctggtagtcatgcttctctttttttgcatgcctgttcatggtgttctaattcacctgggctgtggccttcatctatcatgcaattttggtggtaattggaacactaacatagatagtatagctcattctgtgagtattgtcctcttggctgattaaacacataatcttgatatccattgagctcctatatcagttagttacttcttatttaccccttctatatttcttttggtattcttggcagctggacatggagtttcaagctaggtggtcttctgtaggcctagatccttttgccctgtaaaggattgaatggaaaatgatgtaaactgatgaataatatatcaatagtctaagaaatttttctattgactagacatgtggaagtgccagtggtgcttgtatatgctgtaagtggaagaggaaggtcaggatagatttaattgtaggactactttatttctaatactagtaagattgtaaatttatacaaaatgttaagttgtggtttatagagtatatgctcccttgtcttgctagactatctgaattatccttaggtatcaactccatgctacatttaatttacaattatgatagtaattaccttttttcagaaaaaaaggttacattgttgacttgtgacttcttagttctaactctagttcatttcaaatgtatttgtgaatacatatctgttgttttctctctcacttctcccttgcaaatatctcccaatgactggtaaatagttcattcttaagtcttgactatatattgccattaagtcatagttctgcatgccatgcgggattgtcaccattaagtgtttaaattgaattcagcatccaggcaactctttagactactaaccagtttcctttcaaataagtgtttttactggattttgttaaataatatgtatggtttatattgacaatacaatgcagggctctccagattcagtgtttttcaaatagaataaattagataaatcctactaattatttattttgttatttcacatgctgcagtcatggatgaattttgtctcgtacgtaagttgtagttttgaagtggtgtagcttgattgttttgaattaactttgcattttgttactgaattactctgatgctcttgtatcttgcaggttgagttatttgctggtctaacttaaccatactg

SEQ ID NO: 2462 - DNA, 5622 bp, Glycine max
  Intron number 19 from transcript Glyma01g09430.1 (locus Gl yma01g09430) derived from phytozome v7.0 (chr-ID Gm01; pos 11519450 to 11525071)
cggccccttagactaggattatatactttttgggggtgggtgtatctagtacaaacagttaggtttactcttttgttttttttttttgtatgggtagacctattgtataggaatttgatgaatgtatacatgtggctgaagccaccacattggatacctttgctctggatgacactatgtattttgcaaaactcccatattttggaaagctttagataatgaatgtacttgtgtttaatcttgttatttgaaaagaaagtgttaataaactttatttgaaagagaattcatcgaccgcattttattttattattttacatgtgacgacctaaaatgatggctggtatacttttatttttgaaattgcaacatattttagaggttatgcgtgatcagaaagaaatggctccgaatagagttgtgaactggccattcaagactctatagtgatgattttccttctgaacttaattactgtgaaaaagtgaaagaaacgaaagagaaaaagaaaaaaaaaaatcccatggtttttgttatttaaatcattactattaaaccagtcattatttagggacgccacaccatgtcaatgaaaaaccacagtgaggcgcttaggagtacataacaagacatgccacacaatgggatgtcaggtcactctcactaaataaaatcatatggtgaccagttaaggtcactgtgttttgcgagaatgctccaatcatatgggattactataggcttaaatgagttcttgatttaatcccatttctctccccctttggcatcaacaaaaagccaaagtgcgtatcaaaatttaagtatgcaaaataactaaacattcaaacaacatttatgaaaaaccatcaaccaaatcatgaagcaagaagcaagaaccatgaaaaccatgaagcaacaaccatgaatagattaattataaactccgcatagtcaaataacatacttaatattggtccaaacataccatgcaaataaggaaatagtaaattgttcaaataccataataatatagagatttattttgataagtcactaacatctattagtcctaattctcttctaatgttatagaaggtatctttacttagtggttttgtaaagatgtctgcaagttgatttttagtatctacaaactctaaaacaacatcaccttttgacacatgatctctaataaaatgatgcctaatttctatatgcttggttctagattgaagaactggatttttagatatgtttatagcatttgtgttgtcacattttatgggaatgtgatctaatattattccatagtcagatagttgttgcttcatccacaaaatttgtgcacaacaactaccggcagaaatgtattctgcttctgctgtggataatgccacactattttgtttcttgctattccaagaaacaagtgcaaaccctatgaattgacatgtatcactagtacttttcctatctgtttttgatccagcaaaatctgaatctgagtatcctactagattgcataaagaattcttagggtacaataatcctaaactaactgttcctaatagatatcttatgattctttttattgccattaaatgtgaaaactttggatctgattgaaatcttgcacacatgcatacactaaacataatatctggcctacttgcagataagtaaagtagagatccaatcatacctctatattgctttggatcaacaggttgaccggattcatctttgtcaagataacaacttgtattcataggagtagccaagtgttttgagttttccattccaaatctcttaatgagttctttgcaatactttgcttgattgacaaagatcccatcatttgtttgtttgatttgtagtccaagaaagtaatttaactcacccatcatggacatttcaaactcactttgcatatcaataaaaaactccttgcacaaagattcattagtagatccaaaaattatatcatcaacataaatttgtaccaacaagatatcattatccttcttttttatgaataaggtggtatctaccttccctttattaaaattcttttctaataggaatttacttaatcttttgtaccaagtcctaggtgcttgttttaagccataaagtgccttctttaatctatagacatggtctagtttttgtgagtcttcaaacccaggaggttgttccacatatacctcctcctgaattagaccatttaagaaagcactcttgacatccatttgatataatttaaaattcataacggatgcatatgctaataacattctaatggcttctaatctagctacaggtgcaaaagtttcttcatagtctataccctcttcttggttatatccttttgctacaagtctagctttatttctaattactataccattttcatccaatttatttctaaatacccacttagttcctatgattggataatctgaaggtttttctactaattcccatacatcatttctttcaaattgatttaattcttcttgcatagctactatccaatggtcatctataatagcttctttaaagtttttaggttctattaatgaaacaaatgccatattattgcataaatctttaagagagtgtctagttgttaccccttttgagatatcaccgatgatgttgtcaagaggatgatttcttgaagttttccattctttgggaagatcattgtttttttgtgttgtgtcatcttgatcattcttgtcttcatcatctctctttcttttcagatttctttcttcattttgagtatcttccaaagtatctgcaatatcatcaacaaactcctttctcgaggaagtgatattagtttcatcaaaagtaacatgtattgattcctcaattgtcatggttcttttgttgtatattctaaatgctttactatgtaaggaatacccaaggaagataccttcatctgccttggcatcaaactttcctaggctttctttaccattgtttagaacaaaacatttacatccaaaaacatgtaaatgtgcaatgtttggttttctattattgaaaagttcatatggggttttcttaagaatgggtctgattaaggctctgttcataatataacatgcagtgttaaccgcttctgcccaaaagtattttggaagaggtgtgtcatttaaaagagttctagcaatttcttctagggctctatttttcctttctactactccattttgttggggtgtcctaggtgcagaaaaatagtgttctatgccatattcatcacaaaatatttcaaaatcattgttttcaaactcacctccatgatcacttctgatggagataattttgagattctttttgttttgaataactttggcaagtcttctaaatgcatgaaatgcatcatttttgagtaagaaataaagtccaagtatacctagaataatcatcaacaattactaatgcatagtaacttccaccaaaactcataaccctagatggtccaaacaaatccatgtgtaacaattgcaatggttgagtggtggaaacaatatttttagatttaaaagatacttttgtttgtttacctttttggcatgcatcacataacttatctttttcaaattttaatttaggcaaaccaataactagatcttttgaaattagtctatttagatgatccatgttaatatgagcaattcttttatgccataaccatggatcacaatctttacttaaaaagcatctatcattttcagatttttgttttagatcaatcatgtaaacattattttctctaaaacctatatgttcaatatctttatcatgctcatgcttaataacacatttttcagaatcaaaagatactttatatcctcaatcacataattgactaacacttaataaactatgcttcaaaccttctacaagcaacacattttcaataggagtagaagaactcgtacctattttaccgactccaataatttttcccttgttgttgtctccgtatgtaacatgtccacttttcttaagggaaatagttgtgaatttggatacatcacccatcatgtgcttggaacatccatcgtctatgtaccatttcttccttacaaaatcttctttgttattctcgtcatattttgtcatgagacacaagttgacttggtcttcatcataatcttggaataacttgttcctgaaaatacttttgaaagacaaagaatctaaagaggccattaatcttgaagtggttaaactttctacaagaaacctgctctgataccacttgttggatcaagtggcctcagaataattaagaaaggggggttgaattaattattcctaaacctttactaattaaaaatttaatcttctaaggcttttacttatgttgttaagagaataaggagtagaagagaaacttaacataaagtaaaagcagaaattaaatgcacagcgaaaattaaaagagtagggaagaaggaaacaaacacacaagagtttttatactggttcggcaacaacccgtgcctacatccagtccccaagtgacctgcggtccttgagatttctttcaaccttgtaaaaatacttttacaagcaaagatccacaagggatgtaccctcctttgttctctttgaaccaagtggatgtaccctccactacaactaatccacaagagatgtaccctctcttgttctcagtcaaactcaagtagatgtaccctctacttgtaccacaaaggatgtaccctccaatgtgttaagacaaagatctcaggctgttaaacctttgatactttgtgaatggggatacaaaagaattctcaggtggttagtcctttgaacacttttgtataagggaatgggaagaatcaaaagaattctcagactgtgtcgttttgaattctttgacaagggagaagggagacacaaaagaattcaggcggttagtcctttgttcttttggaaaagggagaagagagacacaaaaagaattcaggcagttagtccttggcgaattctttttggcaaagggagaagagaatgaaaagatgaataacacaagttttcaaggtttagaaaaccaaaaaactttagaaagcttttggtacaaagaagaagaagaagttcaaagagattcaaggcatgtaaaggattgtatgaaacaagtgttcaagattgaatgaatgaatgaaaatgcaaaacaaagccttgcttttatagactcttcatgtctggtcaagaagacaatttagaagagttataacttttagaaaaacttaaaaccaatttgaaaaagtcaaaaaccttttgaagagttacatcttttgatttatttagaaacaatcactggtaatcgattaccaaatcagtgtaattgattacacaaggcttttatgtgaaaggatgtgactcttcacatttgaatttgaatttcaacattcaaaaggcactggtaatcgattaccaaaacattgtaatcgattacaactttttgaaattaattggaacgttttaaattcaatttaaaaactttttcaaaacaattttgctactggtaatcgattacaacaatctggtaattgattaccagagagtaaaaactctttggtaaac

SEQ ID NO: 2463 - DNA, 1657 bp, Glycine max
  Intron number 2 from transcript Glyma09g03170.1 (locus Gly ma09g03170) derived from phytozome v7.0 (chr-ID Gm09; pos 2234280 to 2235936)
aaatccctacatacaagaaggctgtaaatttgtaggtatgacccctattttacctactagtacaaccatccttcacaataatttagttaattaaatttaattttgattaatcatttagttaaaatttgtatatctgttgttttatatataaaaaaaataaaagctcacataattgataggaaaaaaaaaagagagatgagtgattaatataattaataatataatgtgataacaacatagatagaaaaaaaaaacaataaatgcccagaataaaaaaaacaataaatatcataactcaaacaatacacacatgaaaaaaatattaataaattattttattttcttatcagtcaattattgattactaatttttttataccaacacgttattctctctctaaattttatgtgaaaaaattaaaagagagttgtcttccatcggcacattttaatgtgcatgcatgccaagttctatttgataaatgagaaaaatcttatatttacaatagattttaaataataaaaacaatatattaaagaatgtacatgttcttagctaatctcttaagtgcatacatgcatcttacaaagtcacttacaacatctgtattgcaactacttataaacaaaaaagatttatgaacatcttaacttatttaatattcagggagagataagaataaaatagatagaaatataaatatactaactttttatagataaaatatactacttaattaattaattacaatattctttctctaaatattaatttattagttgaaaagtaattaagtggagagagagaaataaataataatgttgaaagaacatataaattattgatgaatttaatatggttaattaaactaactaattttcttaatacactcctaagattcaagagggtttcgtacatttagcagcagtggatttctcgctcaaaggacaacaacgaggactatgtatgaaaaatgggtgatttgaatattcttagaagtgatgacaacaagaacatgactacacaaaagaaaatttgtttttgtaaaacatacataaaaaattaattaaatatcaaaacatacatattttttcattatttaccaaaacatatatgtttgttatttatggtataaattcggattttggagattcaaatttacactatttttttttcaaaattttgtagaaatccattgaggattcagatcatcccaatttgaattatcaatgtgaaatttttattttaagaaaaattaaatttttaatagatttaaaaataatataaataaataaaaataataaaattagaaaatataaagaatattatgttataaatttttagttatcatgtagatacttaaataaattataaacttaaagcacttgaacttttgaatttttctggagttcaatttttattttgttggcttttttatgtgtattaattaaaaaatgaaaaaattaattaataatcttaaaaaaaagcagaaattatttaaaaaaaataaattgataaaaacataccatgaataaataattgttatatctcaattatcacttttgtactacgtaaataactgttacacataatttatttgaacttgattttggcatttcagctacgggggattccgagcttcgagacaaaaggaaa

SEQ ID NO: 2464 - DNA, 2919 bp, Glycine max
  Intron number 2 from transcript Glyma09g06250.2 (locus Gly ma09g06250) derived from phytozome v7.0 (chr-ID Gm09; pos 5011272 to 5014190)
ctcttgaagagatcaagaacgagacagttgatctggtatatgcatacacttcttcccttccaacccttttgttttctctctttttattttttgtgtgtggatggagtgttgaagtgctgttcaatgaaagaattaatcatagacaaattaaagtttctttctttttttggtttactttgatgggtaggtagcatggtagcatagcatcatgactgtttgattttggttggcttcaaagttttgtgttttcaactaacaaaagctttgagattagttttcttataattaactttcatttgttgaatctgttcatgcatgtttggatttcaaatgccaaaagtcagaaaacatttttactttcaaaacaacaaattctctcttcttcattttgtatattagaattcacaaaaatatttttctaacttttatccaaacataaaacagttctaattgtgtatttctttagaattttgtcttatagtttctaataatgacacaaagttttaacttagaatcttatacaaattatatatctaatatctttcaccgttagaatctcatacaaattatgtaaacttttaccattaagttaattttaatgagttttatttagaattgatttgaataacaagtttaaaaaaatcatattttttcaacatatctgatgtaattttcccccacctaacggttcattgttgagaaaattaggggaaaaattaaaagtcaattagaggacagttctggggaaggtgacatgcaaggagagagtttttgaatattagaatccttaccttaaaagaaactatacttaattaccacatacactgtataaaatttattggtcaaaagccaaattaaaacatgcatgaaaataagggagagttacatattcctttctttaatttttttttttctctttcaaaatttattcactttatggtcgacaaaacgtgttaattctcccaagtgacaccataattgcggatccaaacatgtgagatacagataagacatagtagttcaaaacgtctaaaaataaaaaattcaccccatttattaagctttttgtgttcatattagcatttttttcaagtgtgtatccatccatccatccatccatccatcatgtgtgtgtctctctctgtctgcgccttgtttggtgggaaggaattttaagtacttttccgtggtactttggcccttttaaaaaatattgtgtggatcatggccattgggattaaccgttttcatagtaagtctcacattcaacggtcctgacactgtggggtccacgcttgtttggatccatgaatgggtcgtgtcgtgatttgaccgttttgcccttcacttttcccaacttctcaattgtgcactatttaaatataataaataaagaaagtgtgtgttattaattaaaatgtgaccaaacgggacccaagttgtcgaagctgtggaagaagtgaaagctgttataacgcgccaatcacatggagagattgctggctgtccactctgacacttattattattattattattattattattattattattattattattattattattattatagtttaattaatagttttgagttttgatttactggcgtgttaaatatccagatttgttttttataataattattaaatatgagtagtattgtgttatgcaaaaaatagatgtgatttataaaaaaatgattaaaaactaaaatgtggctttttttttatatcatgataaattttgaatgaattttttagttacgattttttaactagcatctttaggaattttgtttattagaatttctattattgtttggctgaacaagttttccagaagtggaattttattttagtatttattttcaacgaataggattaggattcttggttagtagtcaaaggaagttggttcatactcagagcactgtgcccctgttgaggcatgtgcagtatttggcatgatttggctataattgggcatacagtagcgtgaaaaaatgaatttgtagataacttttttaaagataaaataagacaaaagtagctgatagtagcctaaacatcatacaaaatgtaacaaaaatagtataatataattatcttatcgtacggtaatttatgttaaacgttttcatgaaaattttatggaagaggttaatttgaagatttaaaattggtaattcttagaaaatcggctgagagttgaaatgggtttgtgctagttgctttactatgctataaaaatatataaattaaaatttcaattttgaattgcactttaaacattaaaattgaaattaagaaattgaattttatttttgaccattatttctattgcaaaaaaatgcaaaatatttttattttttttttattttttttgtctccgtagtgtagataatgtatgtcaaatcacatttaatttttctttatcaaaatattattgaagtagtcctactctcctgcaccatcaccgtcatagatatctcttcatgtcttatcattatgattgctatatgattgtacttgtgtgcatgtgtgtggttatcaagttttggaaacatatgattaaaatccaactcaaccaaaattcacacgtctcaaccgcaacatgggtgattcctctggcacaaatattctgaaatattaaatccaattgattcataataatctgcacatcaaaacagttactataagcattaaatgtggacaaaagatctttaagttatgtacaacaacaataataatcctgtaccaaagaaaggaaatgaagaaaaacttgtattctattgcaattgcattaatcaaaacactttgcaagcaaaagcatagttacataataagaagaatgtgttaaggaatgcagcttttctaacattactgtgtttataggaacgtattccaattg

SEQ ID NO: 2465 - DNA, 1873 bp, Glycine max
  Intron number 6 from transcript Glyma05g07740.1 (locus Gly ma05g07740) derived from phytozome v7.0 (chr-ID Gm05; pos 7732224 to 7734096 reverse strand)
ctcaatcaaggattcacattctgaggcactgtgtatggcttcctattaccattagtatttagttatttcctcgttgtccattttatactttctgatacaaattcatcaagaggagtgctagcgacactctctctgacactctctttatgatattctctatgattggttgaaatttattgaaaatcaccaattttagtaggttttgcttctcatttaatataaattaggagagagaaacattaatttagaaacaaaacctactaaaattaatgattttcaataaattctaaccaatcacagagagagagagtatccaaaagagtgttagagagagtgtcgctagcactcctcaattcaccaaatataagttggattgtaaggaagaagggtttgtagggggctgtttggtttgaaaaaatgttttgtttttattttctgttttcactttatttcctttttttagaagtttgtataggaaatagtaaaaaaaattatttttctatttttgtttttctttctcctttataaacttcagaaaacaggaaacaaagtgaaacaaaatgttttctcaaaccaaaaacccccttaagttttaccccttttaattatcaattggtttgtagaaatcagattgttgttcttcctttttctggataaaatcacaggaccacattagtttcagattcatgtgttgctggacttggatcaagattcctttttgttcccttccctcatttgttaattgcatttaatattgattttaatatatttatgattctctgagattcaataggtatttgtgtagattgttatgtatatgctacaattgctttcagcactataaagaaaagtaatttaggagaaaattataacaagtgtataatattttcattagttgttttaaggttttcatcttttttttttctttctagattccaattatggtccccctttaattcctgattctcgatattggtccccttattttttttctgcaattttagtctccatattttagaaaatctgcaatttttgtacattccttaatttttcatacatttatttcttctttttttttgcattttaatttccatatcacaatactgtcacatcattaatcaacccttaaaaacactcaactaatgcaaaattaaggattgaaccaaaattgcgaatgttctaaatctggggattaaaattgcaggaaataaagggggaccaaagtcaccgatcggcaattaaaggggaccagaattgcaattaagtccttttttccctatttggatgtttgtttttcttttagggaaatcttttctaaagggcaaatcaatctaatccaaataattacatgcaccaattttctataggatgggaatgcagtttgcattaatgctcttttaatttatattttcttcttttactatacaccttactgtcttactataaccttcctttctttctggtagttgtgatttcccttttataattgggaaatgggccaggtatttaccttcttttgtagtatgggctttttggttgagtttttagagttgctagctggattatgttgttcaagagtttcacattcatctttttgtttcttattgttctttttcttgacctttcatccttttcctccgaaattacgcttgtgtaatcctcagtcaggctttgtccatttttttttttggtaaagattatatgagctatttaatttgttgtattatttttttgttatccagaaaatatattaatctaatataaaatttaatataaaatctttttcattttatgtttttgttcaattacaatctaattaactaggcttccatgcaatgatatctcagttcatgtaattgtactgcctgtgtag

SEQ ID NO: 2466 - DNA, 8626 bp, Glycine max
  Intron number 8 from transcript Glyma08g43050.1 (locus Gly ma08g43050) derived from phytozome v7.0 (chr-ID Gm08; pos 42925154 to 42933779 reverse strand)
aagcatctggttactgtatgtattaaaaggactgaatttttttattgtatagttggcttgcttttactcatattgtcaaaacattaaacattacaatttgtgatttttggatacaggtaggacttcaagcagaatattcctatgctaggagtttggctcgttttagtgcatctttgggacctattgcttggaaaattgcttcccacaggattcaacatgcactgccaactggatgtaaatttggtcgtggttgggttggagagtatgaaccactcccaaccccaatattaatggttaataatcgtgtccaaaaagaaactagtttggttatgaagttgcattccactactgaattaccaaagggtaaccaaaattgtaagaatgtggaatccagcatcctacatcctgtaaatggacagaagcttgagggaaatcatccttcaatacctgacttagaaggaaaacctttctttggttctgctgcagtaaggttcagtgctcctgtcaacatccttaatcaggtgcagaacgcccaatccaggaaattaggcaagtctgagaataagaaacaattggagttgaattctttaacctcaagtaatcagaataataatgatctggttgcgaagtttacaagtaatgctcctgcagtagagtccaagcccagagagatggggccaaggaacatttttaaacatccacatactaatggagttgttagtggagagtttcctaatggaaaagtcacgaatacaagtttgattagacaggtgactggttcatcacctgaaagtacatcacatcaatctagcagagctgctcctgctgttgtccatgggcaggagcagggtcttagtgacccagttcagttgatgagaatgtttgcagaaagggctcaaaagcaacacacttcttccaatcattctcttgttgatactccgccagtgacactatcaggtccatctggacagagaaatgactcgggcaatgcttcagcagcagctgcccatgcatggatgtctgttggggcaggagggtttaaacaaggacccaacaattctagttcacccaaaaatcatatatctgcagattctttgtacaactcaacaagagaattgcatcagcatatttcaagaattcggggggagtttccctctggtggaatgcctttccaaccatttcaagcagttgctcctcaacctattcacacaggcgctgtttcacagtttcccaaccggcctatggttttccctcagttagcatctgctgaccaatctagatttcaaatgcagcccccttggggaggtcttagtcctcatagccagtcaaggcagaaacaggaaacccttccacctgacttgaatattgattttgaatcaccagggtcacctgttaaacaatctcctggtgtccttgttgactcacagcaaccagacctagctttgcaactatgatgaggtattgttgtcatggtatggatatttccacttgaattggactggtcatgaaatttggagctcctgtaatcgaatgttgaattttgatccttgaaggtgtgcataataaatgtgaaaatgccaaagtctacccggattggaatttagcacaaggtagtcctgagtcgaaatgacagtgctggagacttcggtggatttaacaaaaataacttcaggacttaccatagtttcctgatgaggattaccgaatccatggaccatgtctgttaacctagggttgaagttgtagaaaaagtcggcaagttgattgattatattggtagctggtaaactgcaaaatattttgttgatgccttgtatgtatattgtttacaaatttgattaaatttggttgcctagatatttcattccattgacgactacttgtgtatctggattggtggtagggcatcacttcttaatcatgctattctatttgaaacactagccaatcatgaggatatttttttttttttggtaactacatgaggatttacatgtagaaatggaaagagaaatatgcacatttctcttttttccctttttcccgtaggataggcttagacacactgaagcaattataaatcacatgaaaccataggataggctttaaggcatttggtggcagttaccaacaaatttggacactctttggacgtacaaaattggttctgctttgcagctttctgatgtatttagatctttttcatttgtgtttcttccgatccgtcaaaagcatgccatcactgtaagtcaattggatcctgaagattcagggcagtaacaaaagctgtttgagaatgacgaaaccatgaaagtttatatctccaaggtggtgaagaatttgcttgttgatttcctttgtttgctgcttgccctctggctgattgttataagccacatttacaaaacagtttggctcattgaacttgttggaatgcaaataatggtcaacaatggagcaattgaacttgtaagacaaaatcggttgccaactaaacatgtcacactggcgtggttggatgaagcgtagaattgaggcaactgtttagaaacttggtgatccaaattgacagggtgagggctttgaaattatcaatgctacattaaaaaagttctaacgttatgtcatggcattctcttggatttgtagttcgatagcacatgatgctatcttctatatatactctatttaccgacacaaacacattcattgaattttacttgtgaaatttaaacattagaatgatgtagtagatattagatgatgagaaagaggaaacacaggaatagttttctgttcaataatggtgaaacatatttttttaccaccgaatttggagagatcgtgttttattgtggaagactcagttgtgtatttggaattataagagtataattcagattaaaaaaaaatcgttagtggaggagaaaaagttagggagtcaaaggtagaatgtaattactaaaaactaataggaagagtatataattaatcaaagatttgagtataaaaaacttaatataatttttttttgaaaatttgaacattgttctttttccgttgtacgggcaacattgcttttcttcttcaaatgggttcttcctcttcatttttaattttttttagtcccaaattagagtttagggtttgtgttgtaacttcaaatttctgcaattaattggtttttttttgcccatatcatcttatttaggattttgtattgagggatatttgggtttagggtgaaattggtgtaattttttaagggatccaaggtcgattttgaagttccaatcatgaaatcacatggttttagttcgaggaagtagagggaacccatcgagggctcgagtcaaaaggattttcatgaaattctgaaagattcaggactcatttcagtgactgcaaagagtatgttgttttgcgtattactataacaactgactactttggaaggagattctagggttgtcataactatataataagggaaattttttctttatattttccatattcgaaaccttatgttggatgttttggttgtgatgaatttatttcattattttgttttcatgttagaaagggtagaagaacaatggttgtagttttttttttttttttattgacataacaaagaaactttgcatgacacatatttgattattatgaggcataggagaagaattgtgatcctccataacagtttaacttttagtaggtaatggctgaagatggttgtcattgggtgtgctgccatgttagggataattgtgattcttgtgtttatgttgttcaatttactaatgacatacaaaagtacttgaagtaggatgtgagtcttcatttacaatgtaatttggcaatattttatcctaattaaagtgagtttggctggatttacaatgtattggtttacaatttgacaatgttttgatttacaattccattcttctagtgttagtattgacaatactatttagcatatttttgtaatcttaatggaccaaactaaaacaattttgtattcatattcatataattactgaatatgaaaaacaacacaatcaaatatcccaaagtaaacaaataacaaatcacaacacaatcaaatacttcaaaaatccattttgtattatgctgtcaaagaacaaagcaccacttccaaaacaaaatatcaaaagataaccctaaaaacccttcctttattacaccattaagcaaacacaaacaattccaaaccttgaataaaaaaacttagcaatcatcactagtgaccacaaaatctcattttgcactacacacccaataaacccagcagccaaaacaaaaatagaaaaaaaaaaaaacaccacaaaaagacgtatctttattgataacatcaatctaagtctcctcatacaaatccttaattttcccccacttttttctcatgttaggatatctttcaaaacgatgttgttttgattgttacttcagcatcccactcaatgagtaccaaacatgtcacacaattttgttttaaaatgaaatgtatcataattaaacaattatgaaacataaatgaacaaaaaataacattaagtctaattattattaggtacacccctgctcacacgagcctcagctttgcaagttcagcgcccaggttcgggacccgaggctccggtaagattccaaagctgcgcccctcgaaaaccccactgaaagagatacgaaaaggggcaagagagagaaaacaaaacacagcgcatttgtagagagagaaagaaggaaccgattctagagagagaaagagcggaggacgcacacacgcgcgatggttcagatcgcgaggaggaagaagggacggccgtcgaaggcggatctggctcgtcgctccggcgagtctcaatccgatccccggcggagcctccggcgccggagcgtgaggtacaacatcatcgattacgacggagattaccttgacgacgacgacgaggacgagaggaggcgcgagaagaagaagctcaagctcatggcgaagttgaaccaggacggcggagaagaagaagaagaggaagagcgggaagaagaagaaaacgaaactgcaccgcaccacactcgtgccgagtcgcgtgaggagcacgcgccggtagaagaatacgacgacgacgaaaaagaacaagaggaagagaacgaaaacgaacaagaggaagagaacgaagaagacgaagaaagtgtggtaatgcattagtgtctctctgtgtgtaaggttttaaattgtggccaaaattatagtcactgagattcttctttggtgtaataaaacttctctcttttctctctctctagatttctctgtctgtctgtgtcgggatctagagagagattaactaacaagtcaactgtcaaaaactaacatacacagaatctgatctctctctctctctctctctctctctctctctctctatatatatatatatatatatatatatatatatatatatctgtctctgtctgtcctgtttgtgtctctatcacactctctattatatatgactgaagtatttggcctttggaaacaattaattgtgtgtgcgtgcgtgtgtttgtttctaatgatgacaggtaaagggcagaaaagtggaatcgaaagggctccactctgtttctgcttcaggttcgtgtgattttaattggggtactttgttttgaggtttagggtgtgatatttttttagttttttttatattatatatggatatggataatttgaaaaggaaaaagtgatgactgctgaaagggtactagtggttgtgtttctgcatggtcctttgtgtgttttcatcaatttgtcttttttgtttttaactgttaggagctccagtgattcttcaatctggaattccgttgcctgataagaggactctggaattgatccttgacaagcttcagaagtacgtgtttccgttttccttttttcaatgtttctttgggtttggagtttaactgtttatggtgatgagcaagagggtgaatgtttttgtgtgctattttgttttctgacttgggactattgtgggggtgtggatgatggcaggaaggacacttatggtgtgtttgcggaccctgttgatccagaagaggtgtgtcgatttttcttcctgtgagttggtaaatcttgcttttggaagacacccctgagttggaagttcaaattctgttttgacatgcagcttcctgattatcacgatgtgatcgagcatcccatggactttgccactgtaaggaagaacttggcaaatggatcttataccaccttagagcaatttgaggtatgcaaaatttgtttcagctggtcatgattggaggagtttttttttttttttttgagattttatttgttttgcaatttggtactgaatttggttgttgattgcgctcttctactgagatattacttgtatgtgtttgaacttgatatacttacgatgctctgacttgagagctgagactcaaatttaggcataacataacctgctttgcttttctgtgatggattcagcaaggatgactgttgtcaatgatgtatcgaactatcggcaaaaaaatgtggttgttagcaagagtcagcttcatgtagttagtactaagcatgaatgaagatatttggaatgactaatttcttgatttattcagcatattgtcatgtttcaacagttctttctgtagtattacttacaaatggtcattgcatcattttattaggcaactaactatgctgcatattttaatttcttattggttgatgcatcatcccatgtttattgtattattaaatgaagtctgtcaggattttgccaagtacatgctgaaaatggcacattctacgttgcaactataaaggatctacattaaccaagagcgtggaagaaaatcttttcatttgtgtttgattgtaacctgcttgattggcattgaattgtgatagtctaacactctaacttggtgttaaaattacagtttagctcttaggaatgtggaaccttaaaacattttattgcaaaaaatgttgtttgatttgatcatgcttaaaaaatgtctatttaatattgtcaatgacaccatcttcatctaattattgatttattcatctatgcctcccatttagatatcatttgtgaggagtctaaaaagcaactggtattttgcatatggtttctgtttcttcctgttcttcatgggtgttacccaggtgctaatgcctggaatgatatgatggattagatcttgggttggaaatcttgattttctgggtaaacagaggtagtatctctggcaatacctatggcaatattgatttttaattagatttactaaaaactctagttgaagatttccctgataaaagatggttcttgcttcacaaagtactataatttgtattggggtgaaattgattttttttataatttatttttctctctgactagtatggtttttctttgtattggggagatgctttttaaacaattgcagttattatgatgaatgatattcaagaaatgtgagaatgaacttgctactctgctattttttgtgcatctccaggacctattgcttggaatattgtttcctttctatcatcttaactgttcattagtcttcttgagtaaaaattggatgaccagatttgatgataattactctgacctgtgaatgaaattgttgaatgcagagtgatgtatttttaatttgctcaaatgcaatgcaatacaatgcaccggagactatataccacaaacaggtataaagctcaatgcttccctgtgttaccctcccaacaattgtgaaatcaataattgttttatacttttattgtgcttactgtgtaacccctatatttttcacaggcgcgatcaatacaagaacttggacggaagaaatttgagaagttaaggattggctttgagcactctcagattgaactgaaatcagaacaaaaagcaggatccaattatttggttaagaagcagccaaagaagccattggcacgtgcctcacaagaacctgttggctctgatttctcctcaggggcaactcttgctactattgcagatgtacagccaacttcccatctgatgcaaggtggtagatgtgagaggtctggcaatcttgatggtattttggaggcaaatgctttctggattgatgcaaatcaagagaaagctgaagatgttttgttaggtatgtcagtaatgagatcatgctattatctttctcccgttacatttgccctcattattcctatacatactgttaaaggaggatacttatgtcaaaatctagttgttccattttttattgtgttgctatattgtttcagggaaaggtcttctctctaagtggggaaggaagtcctttgcgcttgatgaaagtcgtcgtgcatcttacaatatgtccaaccaaccaattgttaaaccagattcaatatttatgacctttgagagaggaatgaagcatctggttactgtatgtatcaaaaggaatgaatttttttcttgtatagttggcttgcttttactcacattgtcaacataaaacattacaatttgtaatttttggatacaggttggacttc

SEQ ID NO: 2467 - DNA, 1967 bp, Glycine max
  Intron number 5 from transcript Glyma08g41750.1 (locus Gly ma08g41750) derived from phytozome v7.0 (chr-ID Gm08; pos 41689627 to 41691593 reverse strand)
agcgaagctcttcattgtcaacttttgcactgggggtaagaataatctagatgttttttccctattgtttgtattttctcttcctttgaaatcatgccattactattgtggtatctgaaatgaaccatatacaaggggttgagtagtttctagttcaaatgcaatttccagagcatgtgatagtaaatgctgtgtttagaaattatatatatattttttatgtgcatcagatcatttcaagtgaattttgtatgtacaagtattagagttcgtggcagcaagaaattttgcttttggttgagtttctaggttacagaattagtaaagtgaaaagcagacaagttaccgacttctgtttatgccaaaaaaaagaactagacttgatgaatctaaaatacagcttgattgtgaaagtaaaagaaaaatctgtgtagccgataaagaaggatctcttaagattaatggtagattgtctattaaatctctgcaattcacaactacaattctgatttgagataaagtatgtatatggtcttgaagttaggttactttgtattattctatatgacaagcagccttgtagataattagcatcaccttgatcaccattttttttcatggaaatttaaactgttgtgtctagcattttgattagtagtaactgatgagtggagtttcaaatattgtaaaatgacatgttgggattgggagaaaaaaacaaaagcatcacataacgagaaaataaacaagttgtatttaagcactgaccaaggaattagaacatgcaaaactataaaataatgcatattgcatcattgaagcaacaattaagcacactttgtttatcaagtttcccaaaatttatagaaccgtggcaggaatgctgtatttgattgctaaagttttttgtggatttggacttgctatgatagatataccctctccaactcttcctgtgatggggtttgggacttgcatatatatgaaattaggcaaaaatcttgttaatttggacaaacataacatgaaatttggagtcctcttcttacattttctatttgacattcaatgaacattgtcaaagaatgtcttttaagcatattaaactgatactgatggtatctccaataaatacctataggaggaggaataggttggcagcaaggaatcaatgggacattattcaatgtaactgcacaaaactaactatagttatttacgtaacaaactagaggggaggttgttataaaaagggagggagggaaaccatgagagaagagttttgggaactcattggcggggcagaggttcatgtctctcaattgcctggaaggttactatcttgagaattgtaccctgttgggtctctattctgtatcacattgatattattagatgcaatttctgcaatatcatttatattgattgctaattctgcggtctttactctctttacgttatttgtcttttgcatctcttaaatcacatcacatggttttagatggttgggatcttgtggagcttattaatttgttgagcttgttcttttataagacgccttcgagtttttcttttttaattgttatggtgactagatttaagagttttgtcaaatcctcaaagacttatccttctattaatatacagtgctgtcttttccataatctgttttgtgattgaaacaatgtcctagccacattttgacgtaatagctcttaagattttcttgatgtttgtattctgctagcatttcctttttcaggaattcattttatttcttttttacttgtaatgattcaaatcaactttgggaattgttatcatcttcattgtccttatacattcaacaaccattttctgatctgctttctgcatcactttgttttatcagttgaagtctttatttcttgtgtttgatatttattgtgacaggtttctgttggttacttcattgctgatctagggac

SEQ ID NO: 2468 - DNA, 2801 bp, Glycine max
  Intron number 1 from transcript Glyma14g05910.1 (locus Gly ma14g05910) derived from phytozome v7.0 (chr-ID Gm14; pos 4283727 to 4286527 reverse strand)
tttgggggttcttatcatctatttcattattcttggtacgtaagttcatctcaccttcaattccttctttgtagttaagttaagtttacttgcaactcaatttttacttatttggtaggattaatttttgtatataaatttagactgtccgaaaatgtttttcttttacgccattaccctacagttagtaagagggggggagataaaaacaagaaaaatataaagatgacaattgaaatgatataatagggtgagaaataaaaaaatggtaatgaagtgtttgaaattttgtagtgttaaaatgtcattacttttttttagtgttttttttatgacacttgttcgtatttttgttatttttgttgactttattcttgataagtgaatatcggcaaaaataacaaaaaaggtcacttttacattttatttatcaaataggggctgttttgcaattatttacctgggggtctatttttttattacaaagcgcccccaggaaggcgcttccatggagcaagcgacacgtggcacagtgcggcgcacgaggcagcagcagggtagcgtccctgacgcgggcacgtctggtagcgtcctgccgctgggcgcgactggtagtgcccagcgcgtgggcgcgactggtagtgcccctgacgcggacacaaccaggcgcctatgtattttttaaatatattttaataaattaagctgattaacgattaaataatttaaaaaatatttttcatttaattaagttttctatggtataatatgaattttataactttataaaatatgaaatttccaggttatgatcttttgtttcttcaaaaaaaataaaaaagttatgatcttttggaactttatagcatataacagatgactcattgaattgataagtaaaacattgattcagtacgttggttgagtttaaacgtctcttaacattaaaaaaaaattagatttagacccactaaaaaaatatattttctcccagactcaacggaactgggaaggggggcatgtatttttttttaatttaaatgtttaattttgttaaaatacaatttttgttcctctattctcttatatttgtacttttagtcccattattttttaatggagatattttattttttacttttaaaaaatcaacaattttaatttttgtgatcaattttaaatgttgacataagtattctataaaccttaagtgataactatttatttattatgtacatgtcaaatatttttttaaattatttaatcgttaatcagcttaatttattaaaatatatttaaaaaatacataggcgtctgggtcgtgcccgcgtcaggggcactaccagtcgcgcccacgcgttgggcactaccagttgcgcccagcggcagggcgctagtaaataattgcaaaacagcccctatttggtaaataaaatgtaaaagtggcccttttttgtgtttttgcccgtgaatatccttggtttggtggggccacgttcggtttggttcagctaaccattattattatttttttttccttcggaaaccaataatttgtttgtaactataggaataggtttaacaaaaatatataatacacattatatacaataaataattattaaaatacccattataaattttagtaggattaatttggatttacgtcttttaatagtacattatgtgttctgtatgttggggtaaaaatataagaaatgctaatcacacactttctattttactcttttaaatatattctcatttattagaaataataaaatatgtgaatctcattcttcatctttattttatctttgtgtacaataatgacaatgagagtcctacatctatttaattcctaccacgaaatcgatcccagtagattcactctttatttaatacattttttttttggtaggcaatttaatacatccttactcatactttatagtttttttaaaagaattttagccaaaaataaaaaagtatgtaagaaaaaaaaaacttctgttagctatcttttttttggtagacaatagtaacaaactaacaatgaggatgggtctaagttttcatagattttacctgaaccacaccactaagctggcctaatgggttctcgctagccatactaaaataaacatttgagcaatggtcttggccataacaatcttccttcatagcaccgcctgtggcacaagtccacaaaaagtttaattaggaaggcgtcttgatcacctttaggtttcttaacccaagttacatcaccacccattattaatttgtgttagtttggtcaccaaaacaccttgaatgagattggagcaaaactttttcagttccacaaatcaattatgtgagttacaaggattatcatcacaaccaaggttttaatatgtgatggcagttttgttgcgatcttggaaattgtaagaaactgcatagttgatatggccgtacgcttcaaacaccttatcattacagccaaaatcagaaccatttcttagaatgttgatcacaattaacaactatgtgtggaaatgctaactgcattaacgatagtgatgttactaggaaattcagggagcagttggaggaatggtagcatcaaaattaattaggaaattcaaggaaaggttgatttcatgaactatatagatatttcgaaagtcataatgtttgtacctttaccagacaactttatggacttatattttctaactattccttgtctatgatatatataaatttgactgggttcattggctttgttttggaaggagacgtgctctgtggaa

SEQ ID NO: 2469 - DNA, 3102 bp, Glycine max
  Intron number 2 from transcript Glyma01g34660.2 (locus Gly ma01g34660) derived from phytozome v7.0 (chr-ID Gm01; pos 47090572 to 47093673 reverse strand)
ttacccgttgtgtccttggcctgtgagttttttttttttttttttctaaatgttgtctttgctgattttacttgggttctgtttggtagattggaataaatttggttgtcttttagattttaacaatttttgcgtggtgtcgtgtgattcctcgattctaacatgtatttttttttttgttaaatgaggaacattctgatgttgagaatcaatgttattgtcttatttagtgtccaacaattgcttgaacaaaattgcctttgaaggaggatacatgttggaaacaatatatatatatatatatatatatatatatatatatatatatatatatatatatatatatatatatatatatatatatatatatattactgtttttatcatcagcttgagagaaacaaatacatattatctgatccataagtaggttgtaaatgtcaatgtattggtaatgttttgagaagatggaatcatgttataaagatatttgtaacatccatttctctattacaacacaaaacaattccctccgtaagggtttggatggttggtttactgtttgtatcatcaacttgagggtcaggagcataggtttgttttgtttatttgtttcgtgcaaaggaattaagcgatactttcagactacatgaagatcagattcagaagccattgactggcttcatgaataacccttcttgtgtttgtatttgtcagctgatcaatcttctgatttattttgtatgctttggagtttggactacttgttggaattgctgttgcatgtaaaaccttaactgagtcaggctggcattctttcacaatgttagataagcagaacttttttgtgagaatttttgacagaataatttggcatgcttgttgactcgtggatgggtaaatggtccctaccacattatacatccaaaaattactgttatgacttaagtacaagagaagagaccaacccaaaagactaatccattaggtataagatgtgcaaaattatacggaatactggaattgtgtgttagactgttaggcaatactgcaataaaaagctaacatgagtgttggaaataggaatactttaggagataattcaagtagcctagatatttggtatagctaagatcaatgcaacttaggaagtagcagtattttaattgttctgttgtaaattgttattgcattaattgtctttgtaatactcttgaatataagtaagtccattctgttgggtggaaagtacatttaagcaaattcagaaaatatttcacaaagagaataacttattgtagtaaagatgagaatgctgctgtggatgagtgaacatactatacaaatggatgcattagacaagataatattaggagtgaaatgtgaatgcattagagagaaagtttgtatagaacctattgtagaaaaaatagttggatctagaggtaggtggtttggacttgtgtagagaagacctatagaagctttagtactgagagatggaaggtatccgtaccacttgagggtgagactgggatcaactgtaggcaagagctttaagaatgatatagaggtggtttgtcactttgtctacttatatgattcacaatgaacactatagcatcatttgattcatgtagccaatccaccttgtgtcgaaaagcttggttgttgtagcattacgcctatttattttaaatactaactggaggaagttgggaaaaaatgatctcttaattaataagtgtatctcaattttcttcatcttacatgcacagttgtttatggcacttccatctgcagttgttgtgtgtgaaatttcttctggttctttttgagtgctattgaccaatgtacaacagattgattttgacatgcttcttattttattagagtactgaatatctgcaacagactaacagtgtgtttgggctggagttttaaatgcacgtatcacataattttcatgttacaatgttatgttgatgcagaagctaaaaatcgtcgcatctgaaaatacacgtcaatttggctttagaatcgtttccaaacacacactaatagtttggattctataaatcttatttgttggatttgaatattcatttatgatggtgttttctttcttttcaacaaattataaatgtaaatgtgattttatagtacaaatccatagttactacactgccaggatatttgaaattcaatgtgactttcaatatgttggaaataaggtgttttgttagatgaattgatatggatttttcttttcatgcttaatcatggattctaattttaacttagttgcttcaaagggagctgcatttataaaaatgaaagcaattttgtatttttgtttaatcgtgtattgtgtactattatcatcctgtttttcaaacggaggaacaaaagaattgagttgcttaatctgtaagtttccttaaaccaaagaacaggtggatttctcatctttctgcagttcctatttattttgttcttgataatgaattcagcaatatgtgtgtttttttacaaaataacaaatagaaaataaaataaaaaggaaacagagaaagaagtgcataactgtggatggtggagaaccaatatcttatatttattcatgtgttggcttgcttctggccatgaaataaggtgttttgttagagtgaattatatggatttttctcttcatgcttaatcttggattctaattttaactgagttgcttcaaatacactgaatttcaaataaaggaacaaaaaaattgagttgcctacgtttatggtcatcattactgctcaatggattctctgtgactaataatgtaatttcttcataataatatttttgtgcacaaagatactcaggtttatataattcatttctatctgttagacctttgtttttagatacacataattttgtatgatttatttgatatgttatacttgaaagttttcagtacgatggctttttatcattatctgatgcattctctttcacacatcatggattttttccttgacaatttctgagtgatggtgatcaaatgctttttctacagtctgaaggatctgcaccaaaagtgcacaaaggaga

SEQ ID NO: 2470 - DNA, 1289 bp, Glycine max
  Intron number 10 from transcript Glyma06g14870.1 (locus Gl yma06g14870) derived from phytozome v7.0 (chr-ID Gm06; pos 11662019 to 11663307)
gtgtcatctgtgtgtcttcagtgtggaccctccaggtatgggtcttatttagtttccatctctattactcagcaatgggtgaaatattaatacaacatctattattgaaaatttaatatttaattattttatatttcgaagattgctgagaaccaagatccaagtggtttggaagagtccgttgatggatagttatttattgggagtatgtgatatataataacttgtattagtaattctgtgttagttttgtattagaaactgcacgatagcagttattcatagaaaataactgatggcagttatgtattaagattatatataatagtaggatgcgtaattaagattatatataatagtagggtgtgtaattttgcaagtgtgttgttatttgcagtttgtaggccgagaatactctctgtaggaaactttggtctctaggacatcaagtttattgctgtattatgtatggtttctgtgttcaggattgcattttatcggtttatcaattgctgttctctatcaaagatctatactaagaaaattgataatgaaaagtgcatggattagttattcatattgtttattccaaatcccaatcattaaatgatatgacaatgtaatagtttttatgaatagaaaattaatgacaaatttacttcgcaatttcaacatgcctgagatgatgcaatgtttaaatacaattgaaacttggggcaacctgaccctgtccccccaaactttcttctactaaaaacaagaatatatgaaagattatgaaatgttaacccagcaagtggaatattgataataaaacaatattacatacaaagtatatagaaggatgtctaggaaatttaaatgaaataaatgattatgactatgttatgggaagcaagagtttggaatgattttgctctagtttttattttatgagataacaaaaccatataatcgtgttgtaaatgatgccttttttctgctgctgagtattgttttcttcttgaatgagtcaacttttctttttttaatcaaaatggaagtgcttatgtctactgcttttgtgtttctattttttctttttccttattcctgacgtgtaacatttgcattttcaaagaatcttatttttatttttaccaatttctgtcattagtagtttcgcttaacttgataaagaaccatttgaagtagctgctttactttgatttagaagaaaacatggtaatggtatataaggctgttgttgtatttctgctgcttgttacatgcaggctgcaaggatattg

SEQ ID NO: 2471 - DNA, 1459 bp, Glycine max
  Intron number 3 from transcript Glyma06g12070.1 (locus Gly ma06g12070) derived from phytozome v7.0 (chr-ID Gm06; pos 9291384 to 9292842)
acggccttatagatctagggttgctgcacttagaggtatgaatgaatgttctgtcttcttctgtgaaatgttagaattataagttacggatggagttgtttttgtttgtgtgtgtgtatgtgggggagggggggacttgagcttgtggctggtgatgtgtgagtgttggtatttggcttgtttgatccttttgctgaacctgttgaggtagcgaaggtgatgtagattggctgatttgctccttttgggactttggctgttttgtttgctgattagatttagtctctctatgttttgccttgtgagtattaataataatttctattcagaaaatagctgagatgagctcaactccaaggagtactccacactgttgaggaacactgtagtatgtataatgtatgttttctttttcatccttgttttccctcaacaggggaagggaaggggtcttattttgttaaggaagtaagaaaatattaggtgcatcgttcacggatacttggaagtaaggaccaagtgtccgaaacaccccagcctgtttaccagctgagtgcatgtttgtgttttagttgagagagctcaaaagtatttttattctcaaagtaacattttctttcttctttattttgtgcattggaatttgcataatgcttttccaactttgatcgaaacatagcttgagttgtcttctgttgttttttccttcaatttatttgtttgttcttttggctttggtagcatgcttataacttgctagaatgaacattagttatgccatttgatgaccattctatgcatgtaaaccaacataatctcaacaaaattagatagcattcagaaaaaggctagaagctaattaattcattaaatgaagcaggtttattgtaaaacagtattctttaccactttctgcaataggcttgtgttgatttggcacgcctgagttccacaggcaaaatatttcctatgccgagtgttatcaattatattaaattattgataagatgtgttttgtggttttactccctttatagagaattactcatttcttctgtactattcacgttttgtctgctcacctaaaacaaataatttagtgggtatagagtagacaggctgcaggcagtaccagtttgtgtgatcaattgtcaaccaagttgaaaaattaaggggaatatatatttcattatgcacccccctttagttttatatttccatactccgccccccagtcttgtgcctcaagaaaatgcaggtgcagtttgatttaaatgtctaaattgagtccttctgatgaattttctactgcatacatgtgtgcatttgtggggctttattgttatttttttttgtatattttattctccatacaatcatttgcgatgagtttgaatcattgaccaactaaatgtcttgttatgtgtgttatgcagttatcttttccagaatcctgcag

SEQ ID NO: 2472 - DNA, 2631 bp, Glycine max
  Intron number 1 from transcript Glyma08g45920.1 (locus Gly ma08g45920) derived from phytozome v7.0 (chr-ID Gm08; pos 45173924 to 45176554)
gctccaagaactcactagtgagtagtactttcttactcttttctttttctttttttttttttttgaattggatgttgtttgtttatctctttagtaaattctactattcagattccctacaaagcttggtcctagtccagttcatacctcaaaaggacgtatgtgaggtaattaagtacctctaactgtaagcactctttgaacagccttaaggtctgttttgacctttatgagctctcgagatccaactcagctaaacttttggttgtaaaataatactattcagatgtatttagaaagttggtacttggttgaattggtaaggaacggactcatgtttcacaaaaatatggttttgatttcccttgccaatgtcagaaggttgttggtgagtaatacttctgtaagcacccattgaactttaggcctgtcttgtcttaacgagttcctgaggcctgactcacctaaactttcttttttatataaaaaaaatggcaagatcggtcgtggtagtgtctaattatggaaattacttttgacctccctgaatgtgcgttgtgtggtatcagtgtagttaagaattgtggcatggactaatttgactggaagaaattgaccatttaagggcaattttgcgattaattttaggatttgaggagtgcaattgtaatttccgttgattggggactaatatgattgatgttattatgtgattaaattatcgttctatgcatgccctttgtagttttttgtagtctttggttatgggtgttatagtattggatcagaggattttggatgtgggcttgagggatactttttgtttttactcttaagtgggtatggtattttaggtttcgcgaccccttctgttctgactctaatggttttgtttatgttggcttgttaggtttggtttctaagtttttttttttaaaaaaaattcaatgggctattgttggaggaaaaggaaatatggcatttgaaatgattaggaaggagaaaaattatggagtgtaaatattagagttgggtttgcgttttttatttctttcctttctctgcaatttcaagaagcagtttagagtttagacattgttacttgcatggttgacatgtgttccatttttgcaacccaatttggatttacatggaacggttgcatattatgaatgaggatgttgaagctgatttatttgcgtagtagtaagatgttatctttgccatctatgtggatgatgcaggatttatttttttggaattagatataggatatattaatttgaaattggaaagatatccacctgattttggttcctctatgtcgtagattggaataatgaaattttccccattagtggcctaaaataaggaaatcattgaatattaataatgccgttgaatttgtttattagagaatcagggatactgtgatcgttgggtatttgtttattcccgtaattgctgtcaagaccttaatattatatcagggtactatatctgataaaagttccatgaccccactttgtgttagtacaaagttgcatggctcccttgaattatcaacacttgcttctcaattctcatcattgttgcggtaaatgagggatttgtatggctttcccaaagcgagcaacaaaaacaagtattttttttttcatgattaaatgctgctaggcaatttgactgttgcctgattcctgactttattgtaaagatggggaatttgattctctgcagttgaaatttcaactgtacaaatcttcaccatccaaaatagtattttatatacatcaaattagaaaactaaaatgaagtttataaattttaaacagcaaaagatgggactgcatgaccctacacttatatcacaatatattttttatgcatcaaattataaaaccaaaatgaagtttataaattttaaacagcaaaagatgggactgaatgaccctacacttatattacagctgtagaggatcgtattccgtaaagatggaatgctatttttgcatattctttactctggactgtataaactgcttaataatgttatatttctgacacatttctgggatattttgcacattgtcagaactcagagcctatcttatgatattatatagatacatcacagcctcaaatttagcatattatgtttaactttggcatatatagaatcaaataggagttcacccaccaaatatataagtgtcatcgctcatcaccttaattctcaaaaatattcgtgtcatcacgttgcccctttgtcttattaagagtaaagagtgtagtgaaactcttatttagagactaatttgatgatatttttcataattgatgacacttcattattaacacactaaactgaagtaaaaaatcctgagtgccaaaatgatggtgcttgcatttttgaggacagaagcgggttttttactgcctggactagttaggtctgctggtccttttggggtcaatcaaaaacatatggaaaagatatacttttaaaacctgcattgttatttttgctatgtcatgattatcatcccgctacatgcctttaagaacttcaattcttattattttggaatggagagtttgattcttgcttaaattaacctgcagctcaaa

SEQ ID NO: 2473 - DNA, 6298 bp, Glycine max
  Intron number 8 from transcript Glyma11g29640.1 (locus Gly ma11g29640) derived from phytozome v7.0 (chr-ID Gm11; pos 30387494 to 30393791 reverse strand)
gctgctgatatctttaacaaaattctagagtcgtatgcctgggatatgccaacttcttgtttggacaaaaaattcaaaatcttagatgtgtggaaatgtgctaaaaattgaattttggaattaagctttttatgattatagattattagaatgtgtataaaaataactgttacaaacagttattgcaggcaggacagttagtataagctaactacttttctttcactaacagaattctgttagttagttgtaagttagtttaacagaattctgttagttagttgttagttagtttgtgattagctttaaggtttagaggtttagaggtttataaatacctcttttgtaactgtattagatctaacttttctgaatcattaagatcagttttctattctctgttttgttcttttccctgttcttaaattctgatattttttttagaaaaaaatgagaaatggcaatccatactcaataaattgaatagaaaactgaatttaaaatcataatgcccttcatttcagcctatgttactattgtaaagaacactatggtgtggcaatgaataatatcacaaaaaacaggacaaatacttcaattgatatttctatagtggaatttgtcaaccctactatcttgaagacctttgtgcaatcatctgacagaaactccttgtcaagcatcatccggacaccaacttcacaaaaatgcagatggaattgagaagtatgagaggaactctgaggtactgagttgcataaatgaggcctataagctagcgcctttgaacgacttagtccttccacccgagaaatcttggaagccccatcctctaggtgcaagaaagcaatcctcgtttaatatcgctagcgcatttgcaagaagaaacccctaaagtaacatccacagacccatttccctgatcgaaacccactggcgacaatatgttgagccagtcatcaagtcccataaactgcaaaggttcgtggttaatccaattgttccacctcaatttctcacagaggatgataggatcatggattgcgttaacctcgaatacgaagcccgggaagtgcaggaccaaacattgcttgtttggcttcagtcaacactctcgaagtctgtcctttctcgcatgctaggtttgaatcaatcctatcaggtatgggagaagattcacgagcattttagtcttcacaccaagtctagggcatgtcaattgcgaatggcaatgcgtgctgtctcactcgaagggaaaacgatggacgagtaccttcacaaaatcataaactatgtcgacgagctcgccggtgttgaagttctggtttgccatgaggagcatgttgatgctattcttgaaggtttaccttcggattatgcaccagtggtttctgtgattgaaagcaaaaaacgtatgccatctattgcaaagattgaggctttcctttatggccatgaaactcgcctggttcgatacaatcgtgacacccaaatgcttgtatctctgcctgttaattacactcaaggctactcatatggaagtttgtccaaagctaatgattccagtagttttagaggaagttatggcagaggtaatggtggtcacaatgtgtcgtttgattgaggtggtggttgcaatggttctggaagaggccacggtggtggcagatttgctaacttccagtgtcaaatttgtctcaagtatggtcacactgctaatgtgtgccactttcgttctgatatgaattttcaacctcatgagtcactcacctttgttgatccaactacactccaaccaattccttattcgattgcctcgggtaggacctcaaacacttgggttaatcctaactctaaaccagttgctcagtcctctagccagcctagtgtgatgcttaccaatttgacacctcagagtaatggtcaagctaactcaacatgaatttcagattttggagctagtttccatgtaactggtgaatcacagcatatcaaactgctgtcacattttgatggacctaaccaaatctttataggaaatggtgaaggtttgagcatttccaacacaggttcttcatcatttttgtctcctaatgactctcatattactttcaaacttaataagcttgttaaaagtctgtgttttattgttttgcttcattgaggagacagctgtgttgtgtcagtgtaaacagctgtttccctctcttttgtactctatatatatatgttatttgaaagcaataaagaaaagaagttagtgagtgacattttcctcacaaattcaaacttcaactaagctattacatgttccttccattttgaaaaatttgctaagtgtcagtcagtttgctaaagataatgttgttttctttgaatttcatcctcacttatgctttgtcaaatcacaggggaccaataaagtgctccttcagggtgctgatggtctctattcttttaataacatcaaactctaggatcacagacctcagctgttatcaacaacatcttctactgctaataaagagtctactgtaacatctagttctggtttttcttctcctagcactattaacctttggcatgctaggttaggacaccctaatagtcatgtactaaagcttgttcttgatcagtgtaacatttcatcatctaattaagtgatttcaaatttttgtacctcttgttgtgtgagaaagtctcataggctatcttctcatgcttccacttcagtttattctcctttagaacttgtctttacagatttatggtggccttctcatttaacctcctactctggtttcaaatattatgtatcatttattgataccttttcatgatatacttggatatttcctattaaaaccaaagctgaaactgtgtgtgttttccaaactttcaagttatcagttgaacttcaacttaacactaaaataaaaaatgttcaatctgattggcgtggtgaatacatatccttctctgctttattagcttcctatggcatttcacaaaggttaatttgcccacacactcatcatcaaaatggtgtagttgaaaggaagcataggcatatagttgatctaggactcacattacttcatcatgcaactctatctctacagttttgggattatgcttttgtcattgcagtctatttgattaataggttacccactgcatcactcaactttgctattccatttgtcactctttttaacaaagcttgattttcactttcttaaaacatttggctgtgcatgctttcctctgttgaaaccctatcatactcaaagtggatttcaggtctcaagagtgtgttttcttggggtagtcctcttcacataaagactataaatgtctgtcttcaactggtagaaattatatttctaagaatgttttgtttaatgagttgaggttttcatatttagatctgttttcctcttcctctagttcaacacagaatattacttcctatttcagcctcaatcctgacctatctcctcctgtttcagcctctacaccttcactttcccaaataccctcctccaattccctttctgctccctctgttcctcctgctttcgctgttactgccttaactcagacctcatccgaatccacctccactcatcctcaatcatccaatacagtatcatctagtgaatctgtaccaactgcaccctctcccactcatcctcaatcatcaaatactatgtctcatagtgaatctgtgtccgcatcaactctaattcccgttaacactcatcctatgcaaactaggtctaaatctggaataacaatcctaggctgcacccttcattatttcttactcattctaaacctaaaagtgtaaagcaggccctggaaagttcataatggtttgcagctatgcaggaggagtataatgctctaatgagaaacaaaacttgggatttagttccattaccagctggtagacaagctattggatgcaagtgggtctttagaataaaagaaaatgttgatggttcaatcaataggtacaaagctagactagttgctaagggatttcatcaagttcatggctttaactttcatgaaacattttctcgtgtggtaaaaccagttacaattttagtagttctaactcttgctctctcacaaggctgggacttatttcagcttgatgtcaacaatgcatttctaaatggattacttgaggagactgtctatatgactcaacctgcaggttttgaagttggaggaaaatccttggtttgtaaacttaacaaggctctctatgggttaaagcaagctccaaggcagtggtttgacaggttaagatcaacactaatacagattgggtttgtaggaagcaagtatgatccctctttgttcatttatagacatcaacaacacattgtctacattctagtttatgcagatgatatcatcatcacaggaagttctaactctctcattcaacagttaacttcgaaattgaatacagcctttgctctcaaacaactgggtcacctggactatttcttggggctggagattaactatctccctaacaggtctattttgatgtctcaaagcaagtatgtcagagatctacttcataaaactcaaatggttgaggcacactctatctctactcctatggttacaaactgcaaattgtccaaacatggagctgatctatttcatgattccactctctataggtcagtagtgggtgccctgcagtatgctaaccttactagacctgagattagtgatgctgttaataaggtttgtcagtatatggctaatccattggattctcattgggctgtggtcaaaaggatattaagatatctcaagggtactatatttcatggtttattccttcaacctgcttctgtttcaaaacctatggcactctatgctttctgattttctgattgggcatcagatattgatgacagacgttccacatcaggaacaactatctttcttggctcaaacttgatatcctggtggtccagggagcagaaagtcacagcaaggtccagcactgaagctgaatatcgaagcttggcccaaacatctattgaattaacctggatttgaacccttctaacagaattacatgtttcttttcaaactcctatgatttactgtgataatcaaagtgtagtgtccatagctcacaattctgtgttccatagtagaacaaagcatatggaaattgatgtcttttttgtaagagaacaagttttggtcaaacaactctcagttgtgcatcttcctgccttagatcaatggacagatgtcttaatcaagccactttcctcaacaagatttgaagaactgagggacaaactcaatgtgaagcatttttctttagaaaaaccttccccttgagtttgcgggggtattagaatgaatgtataaaaacaactgttacaaacagttattgcaggcaggacagttagtataagctaactacttttctttcactaacagaattctgttagttagttgttagttagtttaacataattctgttagttagttgttagttagtttgtgattagcttcaaggtctagaggtttataaatacctcttttgtaactgtcttagatctaacttttctgaatcaataacataagttttctattctctgttttgttcttttccctgttcttaaattctgatatagatattccagctgccttttctttttggtaattctgtgcttttgtataggttaatgtttatcttcagccaggtctttacttgtaaacttatggactactaggaaggcagggtctgaattgcttgatgcctatggtacctaggctatagaagtcccaaagcttgaatgctgtccacgatatgacctcttattatatcactgtctgtgaagcacactttattactattttttctatttccatgatcttaattttccattatagtacaaataaagaagaaactgtgatgcacataaatgtgctaactgatcttttggtccttgaatcttagttgctttttttttgtgtggctttctaactgttctttattcttctttctttatctgcttttataaagcatgttatgctgtactctacgatctaacttattaacttgtagtttataaattaagccgtacccgtctctatatatttcccaattgagttatgaagtgatttttgacttgtttgtttcctgaattaaactcattcatagttttctttttgcatgtcttatacttttgttcccctgctttttctaccattgatattgtttcatcatttggcagtccag

SEQ ID NO: 2474 - DNA, 1900 bp, Glycine max
  Intron number 12 from transcript Glyma15g33980.1 (locus Gl yma15g33980) derived from phytozome v7.0 (chr-ID Gm15; pos 37997990 to 37999889)
agaaggtatgcacacttgcatgtaaaaacgtgaaactatctggagagtaaaataatctttacatgaaaatgaagtattctctatacgtgactcttagaatcatgaaggtctagaattatgtttagttgcaacttggtgaccagttatattagaagtgttggttcaagccacataatgtatgtcaatgcacgcttgatcatgaataactagcttgtgcatttttattattcctccttcccctcttaatatgttgggaggaggtggaaattaaaagatatgttcttttgaggcattgttttgtcttttttgtcccagtaggtttgccaactttgaagactcaacttctggaagaaagtagttaggtggcttttaaacagattgtatgatgatgtttaataaatccacctagtgttaattggaatttattacataccaatactgcattaagggatccactcttaagtatcccgatatagaatattatttccagtgccatgggatatgattgattagttaatgattcgaaatttaatgttagttcattagagctatagaaactcatacccagaattcccagtaatgaaaaaacagaacttcccgcagtgtacaaaataaactttgtagctgaatacaaacgattttttccacccacatagataaaagtagataaacgggaattaattctaattcccacatgatgaaaaaaagtaaaatgtcttgagaagaaaatgttcctatttgaccactatacattgctaacatcaggaaatagaataatttggattctcgagtaaccggctgagccgctaacgtagtgataaatcccgtcaataaaatgggtcctagagagagtcaatctattccgaagctcctccagtaaaagaaaaaaaaatgatccatttataattttctgtcaattggattagtggatcatccagtttatgacaagcttttatcttaaaattgttatgcattatcctgttttttatcttgatgttttggttgagagattattgctgttgtgactagtgaccctatttgattgaactagaaatatcgtccaagtgaatgatgattgcaaaaacccttgttgttattgtatattgttgtcttgatgtctcagcacggtatttattataactgacaagcttatcaccttttgcgtttattttatttcattcataagtaactagagttgataaaataggaatgtgttagccaattggcaataggcacaactttgttgaaacttttagcatgcatggattaacaaatcaaatatattaattctaggttgttacctggaagtaatttgctactttaggagataccataaaatggccgtgcttaaaagaattcaatggtatcgtttgatccatgtagatgatctaacctaacaagataagttgttttttttattttttttttatttatcacaattggatctaagactcactattaaatttaatcgatgattaattattgttagtagtaaggtcaacggaattgagattctatctaaaagacaaaattatattcatgtatttataaaataaatagtaataattaaagtaatttgacattggtgtgtatgatagagactgaagcccggttacaaaattgtaaaatcatgcaatactgtgcagaaaatcgcaatcttaataaccctggtcagcagggatctcgttgagactttgctcgttaggaaaaagtgtttcttattttaactagcctgtccctgttgcctgaacaagaaagtgatagtggagtgctcttcaatgtgttacactgcattaaagctgttgctgatgatggaaaattatcattattcattagatgcttgctcttgttttctataattgttagtttctatttgtgaagggcttgaaaggatctggtg

SEQ ID NO: 2475 - DNA, 903 bp, Glycine max
  Intron number 5 from transcript Glyma13g31690.1 (locus Gly ma13g31690) derived from phytozome v7.0 (chr-ID Gm13; pos 34078797 to 34079699 reverse strand)
acccttcccttcacattgatctcaagggaattttggtagtcttccataattttaatagctaataatacctagctactaaacagtttgtttgtttcatattttgttaaaaataatcttagaatcgaggttgaaagatgatttcaaacgaagaattgagttttaaccaattgattgtgcttgagaaaggtgttataaagaacaaaacttaatgcagaattataaatcttattaatattgtttaattataaaattggagctttaatttgctaactcgcataaagctgctttattatagatgtaggttatcaaatcaaaattctaattatgattggtagtatattggagaatatatactactaaaaacacttacgtactatacttaaattctgtttgtttaaaaataagttaagaggaattgattgttaatttagatggtatatatgatagaaccacttttaagatatatagatatacattttttaatttcacattcaaaataaattcttaaaaatgaaatttaagaattaaaatttttgtttctttcagaattaacgtgacttttgcatctaccgaagaggcggtaaataaaaatcaaagtatataaagaaccttgctttattaccaagaatatttccattgtagttcagcatatctatacacgttagtttcacgatgacctattacgcaaagtcacatcatgttctatgagcatctttacagagataattatgtattaattttttcatcaataattacgtacatacgtttcatagtttcatctctggtagttagtggattgaatccttctcattaatttaatgctagtagaatgaaaataacacatgttatccttaatatatttatttttaagttttttgcagctgggcaaccctgaaacatctg

SEQ ID NO: 2476 - DNA, 3583 bp, Glycine max
  Intron number 14 from transcript Glyma11g04260.1 (locus Gl yma11g04260) derived from phytozome v7.0 (chr-ID Gm11; pos 2867694 to 2871276)
agaccatagcactagaaactgcagctgctgtgcaggtattatttgacttcacatctctgctatttgggaacatgttaattgtcaaagactcaaagctggaattgtatattaactatgataccaggagtcagtatattaattaagaaggttaagagtgtgagcctttgttaaagacatgagcattcttctccaatcaaatgaaccagaacttggaaaaaccaaaaactttgtaatgaatgccacaaaacttttgcttcctttttttccaaagccttaaaaaacttcacctcaagaaactattcgaaagtaggacataactaaacctcaccggaaccccaaataaaattttcataaggtgttgccttgttctacaagaataagtgctctatagattctgaacttgaagagtacatcatgaaattgacgagttctctggtgcacccgattactcaaatgatggtggacctataaattttactggttatagcaagttattaccagtaagcatttttaaaaaaaaaatagtaaagatacacttaattaggttcttaatcgatataagttaaaaccttgaatcttaatcttcttcattgtcaaacacacacaacccagattttaatctttttcagaaagctttatcttcaaataatttttaatcaaaatagatccttttctctacacaggcatgacttttccctgaatcttctccttcttcagtgtcaaaccacgcaacctgcaccgtccttgtttggcttcttccgtggatgccattctatcagcaccaaatcaaaacatccaaccccataggaaccatatacagagaatcgaaaccacatcataaacaacataggcaccgatacccacaacaaaccaaagcccaaaacctgtaaccagagcatgaaataattaatgcagataaaaaaagaagaaaaagaaaagaggagagtggaagaaggaaaagaagagaagaaaagagaaggaaaaggcaaaaacgaaaaaagcaaaaaaaaataccttattcaactgggttaattatgtttttggttcttgaactttttcggatttccacttttagtccctaaacttaatattgattggtcttggtcccgtatcttttgttccgttagtgtttttagtccctaccattgaatgatgacatgacataaatttattaatattttttcaggcggttacttttttgatggttaaaaattgccaggaaattgatttaaaatgtttaaaatggattaaacaaattctgacagtttaaacctcgagaaaattgcttttgccttatatcccgtcgcttgttttatcaaagcaaccaaaaccttcacagttcattaatgaccaatttcttttgttttgttctaaatcttctctaaaataatattttgagctgttcaatagtgatttaaaaatctagtttttggaagtatttcagtttaattagcgagattatatcctcactttcattatttgtggccaataaaatggaccttggacgattagtccccagactgcaaaagtctatcactgttctttcttcttctttaaagtttcattatatatctaattgcgtcagttccgtggaaacatttaattgcgtcagtttcattaggctaaattccttcttcaaccactgtgaatccgcttctatggttgaaacatcatcatcattgaagcaagcatccacttccgtggccagctatggcaccaccactacaaatccataacctctcattaaccaccacttgagctgtttgaaaggttcattgataccactctccacacatccaagcattcctcttcaccatggcatctcgccactgccggaggtgaaacattgcagatctagggttttttgccctagaaacaagggagacgatgtcgttttggtggaggcgcagatcaaatccacgatctccatagatcaacctgcacataatcaacgaagtctacaccgtgggctgcgttgccctcgctgccgacaagctcgacgagactctctgctctctctcgaagtgctttctcaataagtcctcctcagctctcgaaaatccaactcatgtagtttcattgtgttctcgtgaatgttgaagggcaaattgtttgaagttgttttgtttttctatgtgattgatgttttgaacatgattttgtttttctctatcactaattctggaaagttttgtgtgatgggagaaggtgaggggaaagaaacaattcatgcctttcaaaaacccatccaaacattttctggtggctttcaaccgccaaaaaatgaacccattaaattatttgaaaagtataacacgtggcattctcagtggtggccacatcattgtttaatgggacaacaaacggcaggaactacaaaacattaatggagcaaaagatcaaggaccaagaccagtcaattttaagtttaggtactaaaagtgaaaacttgagaaagtccaaggaccaaaaacatagttaacccttttcaacctccactgagggctgctgtgcgctgccgccggcgatttctggtggtggtgctccccgtactcttattttttcctttcttctcctctccttcttttcccccctcttctttttcttgcttacctcttctctttgccactgtgtggctatgtcataacataagtggtttccggtggccctgctcccgtttctttctttctttttcccaccttgcaccaccacccaccatcttctctctctttcaccttcttgtacatgcagccacaggcagcctctggcattgcacacttgttagaaagtcttgcatcgcctgccaattggtttaaagcagaaatcttgcaacactcccttctcccagctgcttcagcagctgcccaagacaaactaacaccattttaattttagggttaggtttacacattttgttaatctgcaaatccgtagtgttcatgaagataataaaagttaatatgcaaaaaaaattaatcaaaaggtggaaaatgataattcatgttactaataatgaatcataaccgtttaatatttaatcaattaatctaatggttataattcacttgtccagcataaaccacctgggacagtttcccatattagtcactgtccatggaatcaggatatagagtaaggtgatgctcacaaatttgtatcagatcagttgtctataccgttagagggacccctggatttaccaattggttatataaaaagaatatctggtgattgggggagcgaggtaggaattgaaacaagagtttacaaggaaacaaatagataaatctaaagtccaaactcccttatctggaatggtagtagcctgagatgaacattggaaccttactagcttccctatatttaaagtctctatgtacgctcttattgcactgtctatgcttatcttttcatttatctttttctcctgcatttttcttttttttttgttatatttctctttgttttcttaatatattttcttatgctaaaaacatggaatttatttttgactcgctagagtgttctgctgattagtcttgtgtaaaaggatgttctcattagcttgtatcattgttcctag

SEQ ID NO: 2477 - DNA, 1405 bp, Glycine max
  Intron number 12 from transcript Glyma08g42150.1 (locus Gl yma08g42150) derived from phytozome v7.0 (chr-ID Gm08; pos 42096026 to 42097430)
agacacaaacaagacgtcgggtctgtatctattttctctttctcttttcctttacattctctgcatttgttgtttttcaactgtcaaattcttctctcacaatacataggtatcggatgtagttacataaatatttggtttgtttttatgtgatcatatcatttattttatattctttgtttaaataatttatcatcacatgttaaatggcatttttatactctatgccaatatgccaagtaatatcctattttccccctatatcgaagaatgatttattggctaatactaatctatccctaagacagaaacaacatcaacaacaacaattaagccttttcgcacgtgctggtgttgcctgcataaatcaaacgatgccataatgttttgaaagatatactgaaacaaaaagctatagcaagaataatcctgtaactacaaatatgaagtgccaaataaattattcatataacaactgattatctccaaatagaagaatagctttatcattgaagtggtgacaatattttaaaaaataaatgattcatataacaactgattatctccaaattgaccaaaataagatttaaatgaaatcaattcatgacaatttgtttttatcaaaataaaaaatgaaaatcatgtaagtgaattagaaatggaaagggtatttgcttacctctgaatttgtgaagggatagaatcattttcatggtttcactttggtgttcagcacatgaactttttaagggtattagtgtttgattttgatatgcaaagggactgcctgcttttttacactaattattagttatgagagtttttttttttctttttctccttttgtattgtctttgttgaggatctttatcctcaaaaattttgtacttttgtctctctttctctattaaattttcctttatccaaacaaataaattaattaattaaagaaagaagaaaaattgccaggaactgtgggatctcacttccagttccaatattggtaaaagtatgaaaataatggagtctgaactcaagaatgattacatactttaatatggtttatttggttggatagggcgtggatggcctttattgaattagagagatatgtcatgtacgtatatagcagaactttagctctattgctcaggctgaaatggtttttaatgtatagctgtttattttgtgtactaatttttgtttttcttgttcttttgccttgctcttagaggtccaatagacatatatatatagagcctacttgtatttttgttccaggctaatgaaattgtttcattgattataagcaattctatttaaatactcacctggccagatgaacttgaattactttgaaagagacctttattgaagtacaaatgtcaatgacagggccgtagcc

SEQ ID NO: 2478 - DNA, 1763 bp, Glycine max
  Intron number 4 from transcript Glyma09g07980.1 (locus Gly ma09g07980) derived from phytozome v7.0 (chr-ID Gm09; pos 6985881 to 6987643)
ttcctgctcttttgggccaggtaaaatagtagatatattaagtttgtgttttctcgtaaaagatttcagcttttgtgattgaaacacataatttcaagagttgtgagatggttacaagttggtttctcttcaatcaactattttttatttgaacaaaaaagttctttgattaaacagattcaacattgaatacatgttataatccctttatatacatcaggagtgggtcaatttgagttgaaaagaaatcaaatgccaaaggatgttctttttgattcctttgtttaatctctgccaagtgccaatgacatctgtggaacttgcccattagaaattgacattaaactattattctcaattgccatgagttgattgcttgaggagtgttcattcttttttcattaaccatgtttagaaggatagattacttttattgttgaagtaatcatagaacatccatcggttgtgatgtagcccggtagacttgaatttttttcttttttaatgtttttgggactagtagattttgatttgatgcattgaacattctttgcacttatcaatgttaggaggcatttgttagaataaggagttattcaggttagagattttgtgagaaattaattgagtgattttctattattcaatgaatggtataacaattatggtgttggggatatttatagttagatctaacccaagagagtcaaaactaactaaaccaactcccaactaactgaaagtgatagagaggaaatacatgtgtccataagcaactgaaactaaagcagaatgttctcatgcccccctcccccaaagcccaagttgggtgagtcatgaatgacattaggaagcatatccacattgagcttgtctctgagctggataaatctggcaggagaaagaggcttggttaggaatccgcccaaagaaaagaccaaatgccatatgtttggtacgggcatgaaggacaggattatgagataaggagactgtgttttgattgtcacagaaaacaattggttaggattattgaaataatctatttttttcagctgtcccaaacacacccttacaggtttaagtttctgagagattttttgatgaacatacagagtggggttgtaaagatctttgaacctaattgtttttcctttttccatagttaattttcgaattttcatcctagtcttcatcttggtagaactttttattcttccgtttttatcatatgtagtggttatgagatttgtctttctttatggctttccacgatttctctagggggttctttgagctgatgcaattttgaatttcttgtagttctgtcttttctttttccttcgacataattgcaattcatcagggtagcaattgtttttggtaaaattacaaaaagcaggaatcttggaagagtgtaaaatgtttactcatgaatgaacaggaaatatattttccaataattctaatttcagggtcaattgtgctgggttgtgtcaaatctcaatgcattttcatattcttattacagtgctgcaaactattgagtaaatatctatatttattggtcactatatgctaggaatctacatctgctgcatttttactcaatttgaaaatcacttattttcatctactgttattctgtttgtttccagaatgtgaatacgaaaatctggagccaatttgaggtgtcatttagtttcattttcatcatatatgtactgcatttcttataatatcttcactgaatatttacaggc

SEQ ID NO: 2479 - DNA, 1188 bp, Glycine max
  Intron number 7 from transcript Glyma09g33510.1 (locus Gly ma09g33510) derived from phytozome v7.0 (chr-ID Gm09; pos 39963300 to 39964487 reverse strand)
atcaacttaaaactactgtattaccttcaaaactcttgttcaaatgcttctgcatttatttttggtggataaattaggactctgtttcatggattgatgtaattatttggttatttgcaggaacctgagccacaacaatttcgatggttatatcccctcatttccactgtcctccttgttaatatcaatgtaattatcccttctaatgtttgtttagctatgattctggatggcacactatgaattatagtacttctattatacttgttaatgttatcataaacaataagtggaagtattatgacacttaattacttaatagaattgtgagcaagcttcactgttacataggccaacaagaatttacctcaaatttgatttagacagatgctaaaaattgcatgattttataaacaagttccaaaccttcattctccttcttgaagcaatgaagaagcataactgtgcagtattacatggattgagtatcctatacacatatgggcataacctgattagagctaccatttatcctatgcacaactctatagcatcacgtcagtaacaagagttagaaaatatcaatgcattaagcattatctatgattttcatgtgcatcctaacccttatttgtctatgacaccttagtaggtgcagatatgtcttggtgtgcaatgtccgtgtgaataatacttggaaagatatatattgctcttgtttcttcctttcttcacttagattcaaatcataaaaaaatttcttactgttactagtgtcatcaagaaaactaccactgaaactttttcaaatgttgattgatttaactttaatgagcagagatctgagctacaataatcttatgggatcacttccagaatcaattgtctcactgccacatttaaaatcgttgtaagtatttatgtgttggcattctatttcatctataccaggaagccacttttaattatttcattttttaatatactttctacaaatttagcttgtattctattcatttataggtattttggctgcaacaaacgcatgagcgaaggaggtccagcaaatttgaacagttcactaatcaatactgagtatgatactctctttgaaacgaaacaacaaaagctttaaaaagtaaagcataatttgatttcttattaacattactatttcagctacggaag

SEQ ID NO: 2480 - DNA, 2841 bp, Glycine max
  Intron number 3 from transcript Glyma06g10240.1 (locus Gly ma06g10240) derived from phytozome v7.0 (chr-ID Gm06; pos 7733254 to 7736094)
atacctcaaaggtacatgtcttcattgtttttttcccttgtttcttccctaatgctgttactttttttttaaaacatttcgattaagcacatttatgaattgtatcttactatatggaataagttctttcttttgttgtcctttagctgtttttggattgtggcaaaccaattatggcaaaaacttaagttgttggactataacacatgcataaaattatttctttatcacaccttacacaagagcctatgggcttatgacatgaacaaaacacttgcccatttttatcctatactttttattgaaaaaaattcaagtcccacattggctagagataaggccaatatagagtatataagtgggaaataatctttaccctatgagttagcttttgggattgagtttggtccaaacccatattctaagatggtatcaaagtctatcctagatccattaaatgggtcacccatcatgtcatccacgcaccaagccctaaagtgctgggtgtgagaagtatattgagaaaaattcaagtcccacattgtctagagataagatcaatatatagtatataagtggggggaaaccctcaccctaggagctagcttttggagttgagttaggtccaaattcacattctaatatactcaaattcaatttttatttagaagaatataaggtcgacaaggatcaaactctacttagacaaagggactctggaactatgttataaccaattttcctgaagctgtaaaggcatctgaatgtgtttattacatctctaataagatatgcccaaagaacaaaagatatggaagcttggtgcccaaaatattttctttaactacaaaatggcttttggaattttcttcattctctatgcccaaagatgattacgagcaaattttgtctatggattcaaagggtttttacttgggtaggagctagacagataagctgaaattttagggccgctttggggtgatttttagttgtaagtttccaaaattttaaaaacaatcggtttttagttttagtctcaaaaaattttaaaaccagattttaaaaaccacacattaggtcttgaactgctgatgcataaaatatgtatgcacaagggcaaatgtaccctatgcagtagtaacagtggtctaaaagtccagatatcaaaccctagagaccagttgtatttccaaatagtaaaaattattaaactaaacagttgcagtaatttaagaagagattgaattatttgtgattttaattttaaaagaacgtgtaaaataagatgaacgagaaaactgaagtgatatttgaagcgactaggggttatgattcactaggactaattttcccccaaccctaatcctaggaaattcctacccaaagttaattaccaattctcaaatttacctaaagcctttgattcgggtcaatggacagttttgccttaaatcgatactccaatgatcatgaatatatcaaattaagacaaaggataaaataaagtcccagaatgactaatttaaagataaactaatctattggagattattcaaacagtttgatcatgcagtttggtataaaacattcactacctagtagatccaccaaatacacgtggatgatcaccactgtttattcgattaagttaagattgatcaagtgttaattaacaataacaataaggtagataattaattaacataaaacattgagaaatttcattaagaacaagggaaggagtataattggaaagttacatcataatcttcagactataagggagactagccgctcatggccaaagcaaaagtagaaagcctagaagaaattaacatagcataccggtaggaaaggaacgatgatcacgatttgtcctcacggtgatgcccacgcctcaaacgctcaaaaacctctcaaaaacgtaaactaattattgaattttgaatgtattcaagtacaaactccaacatcttatttatagactcctaaagataattattttatttagttacactatagatagatattttgaaatgacctctaaagataattactttaattaggcacactatagatagatattctaatatgatctctaaagataattactttaattaggtgtactatagataaatattttgattagatctccaaagattattactataattagactcctaaagatagtttccttaattaagcccactacgaccataatgatatccaccattatcgttattggaatcttgacgctaaagcttgagatattgtgaaatgacgagggccctcgtggttgaccatgaccattgtcggaagttgtgatgttttgggacgttgcaaactgatcacgaccctcttggagttgaccagagttgtggtcaatgtaccacggccgttatcaagtgagaacaacattagattttcatgaaattgtgtatttttcaactttttcgcttgattgagtggttgtatttctacaaggtaaaaactaatgttcaaacgtgagttctgccaagaaaatacatgaaataacacgaaaactcataaaatatcactcaaattatggtttatcaactgccattattttttctattttctgtatttttggttgcatacaaatttgagtataggctgattgccttttgatgatataatcatgctttttcctttaaagtgtcattctttttgctttgcaactagatcatatttttatatattctctttcctgtacctgcttacattgtaccaatgcatttcaaattttcaattcaataacgtcttgtattatcatctcttgcaggcggcatttagaactcttgctggaaagggatacca

SEQ ID NO: 2481 - DNA, 1378 bp, Glycine max
  Intron number 4 from transcript Glyma01g05770.1 (locus Gly ma01g05770) derived from phytozome v7.0 (chr-ID Gm01; pos 5508234 to 5509611)
cattttatacgtatttattgaaaaatttgttcgtataagtaaaattgtttatatatatatatatatatatatatatatatatatatatataattttggttttaaaccagttcgtatgttttgagatccaccacaagactataaatagcacaatttaggtgcaaattaaactatttgttttccttgcaaacacacctgtttgaaaaacactagccgatgtttcattttcatctttttctctttgtgaatggagaaatctttgaacctccaaaatataacaatttatgatttttttaatatagtttctcacatcttttggctttttttttgaaatatttatattctttaatttattttcacaaaatttaggtacaataaaataagcgttttgattgtttttcgattaaagttaaaatttatttcagagaaatacgaaaatatttaatattgacttttattacaccagttaataaagaaatttatttttttaaaagaaaaataaaagattttataattttataatagtgtagctaattttttagtatatggttttaacttgtttttttacatgttaattaattattgtggctcatgtacttgtgttaaatgcttaaaactacttaaattttcttcttatttaaataaataaaaattctgatggttttcaaccttattcacttcattgatataattcttgtatttattcttcacattttcacgttttctgtctcgtctttcacaattttaatatacatatgtgttttcctcacaagagagagaatttctcattaactatgcttcattgtcctagatgatgtcttcctcttagtgttgattttattaagtcaaatcttgtaatttttctttttcttcttctaccaaattctaattttacgaagatggatcataattttcactttgtacaacttgtcttcgcattataaagaaaaggataatttctaaaagcgaaagttatggtgcttctttaataccttttttcggatttcataatttcacacttgcattttactatacatattttacgtttgttgttcctttactttcaagagaaaaaatggagggaaaatagtgatacactaagttgtgtatttgccaagtgactagggtgtagtatgaatgtaaaagaaaatgtctccaatgattattaccttttataatatcataataccaattgaatttcctgaaaaaacttatgtttatagtttctaactataagaactgtaaaagattttggataaaaaataatataaataatagtgttaaaaaggtgacatgcaaagatctcataactttcttctatcaaataaaagcatttgactaattaatttgtactttacatgataagaaggtgagtttga

SEQ ID NO: 2482 - DNA, 942 bp, Glycine max
  Intron number 2 from transcript Glyma11g20620.2 (locus Gly ma11g20620) derived from phytozome v7.0 (chr-ID Gm11; pos 17415024 to 17415965 reverse strand)
acatctacgcttctatttccgattcccaatctcaggtaccacacgctctcggctttccctttctttttcatattattcctctttattcaagttatccgattgcatagatggattcacagatattcgatagaaaaattaaattagcattattattgactctttaatgaatgagtggactgtggtgtgtcctgcgggtttgggcctaattctgtgattttttttctccttataatttgtcgtgtcgggggagcaaagtatacatcaatgtaatgtaggtaaatgtgcttttaggagaaaactttatttttagtttgctacaattcaaccttttttcttttgtaaaatcatgtttatggtatgtcggtgtgcatttagggagctgaaacattcccttgagcatgcacttagtcactgaaaccaccacgctgcttccattttttttttatgtagttggttatactgccacacttcactgcatgggaaggattcaaaatgagagatggaattgttcaccatgttcatgtatgtctttgtgcatgatgtgaagtttgctggagaataattatatatgatgagatataagaagcagataaataagtttgtttttttaatgaagccgtgtatatgcatcagcattataccatagcatggtttgtttttctaaattgataaagcctcactcacttttacacacccttgcacaataatttgaacattcatgtgttttactatacttatttcttatacttgcaagaatttccatctaatttaaactccacatgcacgagttgcaatatacttggaatactgggcattcaatctatcatgtattgtcacccttgacttaaaaccttttattttgatttgacacttaaattctaacctttcggctttcatgctctattaggttaaagaacctatatttgggaagaagtcacgttc

SEQ ID NO: 2483 - DNA, 2012 bp, Glycine max
  Intron number 1 from transcript Glyma12g35830.1 (locus Gly ma12g35830) derived from phytozome v7.0 (chr-ID Gm12; pos 38959306 to 38961317 reverse strand)
cccgagaaagcggaggagaaagacgaaggcttggggtgggtttttccgtttgtggctcttggattattgaggtacatgagtgccacctccaacatcatccacgattgcgacgaggtcttcaattactgggagccccttcatttccttctctacaaaactggcttccagacatgggaatacaggttctgttctgtttttctctcttttttgttttttgttgttgttggggttcagtttggggaagatgggtcaagggagaagagaaaaagttttgatttttattatttggggtgtgtttgagtaaacagtttagttaaatgcttatcgaataagttattaactattatatgtttgcataaacttctgtataagcacttataagaaaagaaaataagtatgtaaaatgaattgagcttctttaataagctaaaatcaactcatgcaggtcagttatgggagaagttaaatgaaagaatatctgtaaaagttaaatgtttaagttgatatattaacttatgaaagaagttaaattcgttttaccttttttttcctcatataagtgcttatggagaggtttatcccagcaaagccaatgtataaattgtttctagaggaaatggagttaaactgttttcatttaagttttaaaaagtttttgtaagctatggcgggaaatttattgaaataagctgaaaacagtttatactttatagacatgtcataagttagtctggtaagctctcaaatatttacgtaagtgcttatttatgttgtaagataagcccaaattagttgtaaagaagttcttccaaatgcacctttaatagcttgtagatgagaggaaaaaagattattttgatgatgcctttattaggttcatagcttgcaagaaatgaattaaaactaagaagaaaaattcattagtttcagttcaggtcatggtattgacaaatgacaagtggtgcgtgcttggttgcagttcacagtttgctcttcggtcatatttgtaccttttatttcacgaaatagtgggtcgaccagcttcatggttgtttagtgaggacaaagtaaggttcctgctgtgcttactttttgaattgttacagattagatgaaaatgtttatgcttttcatgttactgttgtcttttcctgttgtaggtgagagtgttctatgctgtgagattctttctcggtcttctctctgttttaactgatactgttcttgtggtagctctttcaagaaagtatggaaaacgacttgctacgtatgcacttgctatgctgtgcttaaccagtggctgtttctttgctagcactagtaagtgatcctttggctttttattttttcaaaatgatttcttgccatcatcttgtcattatgcatacttacctttgaggaataataatgggtgaccaagtattatgtattccatgattctgtattccagtctaagacgtgggactcagttttgctaatgttctttatcaaacttttattatctctaggtttcttgccgagttcgttttctatgtatgcaatatctctggcatcaggtttatttcttctggataagcctgctgcggcaatttctgttgctgttattggtgtaatactcggctggccattctcaatcttggctttccttccagtgacactatattctctatctagaaaattcaaagaggcatttatttctgcggctgtcacatcgattattcttcttgtaagtcagaccatctaaattatgtttataccatctaatgttgtatataatatatagttttgcttgcatcctattatgttattaaatttcctgtgtcatatttcatattcatattctttacaatggaagcatttttaaatttttttacaggcattgtcaatagttacggacttttactactatggaaaatggacttcatctgtcttgaatcttttgatatacaacgtagctggaggtggtgaaagccatctgtatgggactgaagggcctctgtattatctgagga

SEQ ID NO: 2484 - DNA, 983 bp, Glycine max
  Intron number 1 from transcript Glyma11g05070.1 (locus Gly ma11g05070) derived from phytozome v7.0 (chr-ID Gm11; pos 3527669 to 3528651)
aactaaattttctgctatctatattcccaggttagttagtgtgcacgaatcaagtttacgcatcgacgattattttctctgttacttttatttactcggattttgttaatcgtgccctgtacgagttgaagagtaattactttttcttgtcattgtgtttgtttagtgaatgtaaaaatttgtgtgtgcttaatgaattttgaaaccgaaacattagcagcactgggtttttgatttgaggtgatgccaaaacccttattggtaaatgatgattctgtggtgttgttaatgttatgagttataattgattctccaactcaatttacatgtagatttaggtgtaagtaaattaggtgttatttggttgtgtgataggaatgggcctagagaggcccaaataggctagaagatttagatattattcttttatattgtttagttttattttatatttcctaaaaatattagattgtgtcacttgtatgattggtattctttgtaaaatcctatttaatagggtatgcactgtgtaaggaattattaatgaagaatatcattgagatgcatgggtcagccctctatcagtgtgactctttgttgtgtgtgtgtgtatattttcagtgccacgttgattttcaaggcttgatctaattgtattggcattgaaacaatatcactgcatcatttttctccttttgtagatgcttctgataacacatttggccagataaataacatcaaatagtggtttctgggctatctggagttgttttcttttcaaatgttggatgtctaagagatgattgaagttaattgggaattgaggttaatgtttggtgatctagattttgggtttgagctttttaaaaaaaattaagaataaaatgtgtttaaactcctcttgttatttttatttttacttttaatttttcattctcatgcttgtagataagtaaagtcagatttttcttggtgaacggaca

SEQ ID NO: 2485 - DNA, 3159 bp, Glycine max
  Intron number 3 from transcript Glyma02g13250.1 (locus Gly ma02g13250) derived from phytozome v7.0 (chr-ID Gm02; pos 11515460 to 11518618)
gccttttgtccaaggttgtgcccgcaattcatagatatcgggtttctcatttctttatcctgtttatgtgaagaatgatttgttctaagaataatttggaggaaagtgatatacttatagtttttgagcattaatctgttcttttctaatttaccttctcatggctttggtttcttctggtcttgccagttgactttgaaaattgaatagatgtttcaattttgagcttatataaagaagcttcttatataggctcaaaattgaccctttatagttcacagaattaggaggcatacatagtttactacaaatttcttcttcatcctcttttctttactttttcaaggtgtaggataggggcacagggttatataccaaagaccacataagtttgaattctcaaaaggatgctgtccataacttgtctttagtagaggaaaggattatgctgaaacttgaagggttatggtacttgacctgcaagattgtaatggtagatattcaatatttatacaacgagacagtttgatgggagtataatgatcattctttatgaacaaaataaaggagtctttcctgaatattctgtgtgtatagtgtataggtgagtgctgttgttttctgaatttactttacaccttaaattcttcatctaaagtgtataggagtgagattttttttcctgataaggattgactatgataacagctggtgctgataagcacatgatagctgacaaaccttactggcctccaaagggatccaggagattacttgcacctcaacttattgtttagtggtggcgagttgagttatggggtgtgccaactgccaagatgaatggatgtctgataactggattccaaatttcactgttgtggttccaagctgaaagcaggagggttatattaagattcaccagttagttggcttgaaaggccattggggttgagatataacatagcggtctgacgtgaagcaaatgtgtaaaattccagtggcatgtgcctccaattcttccaatttacttccatgtattgcaagttggttgtcaggtttgcttgaaggttgtagcattaataactacaataatccaataccgtgtaagcttcctaaagcggagaggataatctcatttagatgactcctggacattttagcttgttgcgtagttaacggatcatgtgtcaaatttgcaaatcatgttgattctaagaaaagcctcaatcagacaattcagtccagcctgaacatcagttgaatgaccttacactctgaaaccaattagatacatctttctgcatgtaggtataaagaccagcctgaaaagatacagaaaaattaatgtgaagtataagcttttctagtaagattaagttgagtagagacattaaaaagaaacagtttttttttttttttctgtatgctcagctttggcatgatatgaagagtgaaactgctgaaagagacaaactatcttagaaggccttattatctttatgttttagtaatgatttcttaatgacagttttattaatgccagctagattagttttaaagtaacagcaatatgttttgaaataactccagagcactgttcattgcacaatgaagattcatacagtatagcaagtatatagtgtgctatcaggttgctacgcaaaacacatcttgatctatatgtctatttcccatgattcagctgtattttatgaatgggtattaaataatgatgtctgcactctgtttggctatctacttttgtctcatttggttaatcccttaattaattatgtacattggtaattagtattctcacaatattgtagtattcccacaatttgtatttcccatgatacattgctttgtctcaaagagtccaagtatgattaattacagtagaaactagaatgtgattatcagacacggaaaatggatgtgttattaaattgaatttatgtctatatttctagttgattacctttaaaattagtcctattgttgtgaattttatgcttgctgtgtgctctaaattggctgaaatttattttgtggcctaatttctacttttctgccatctgcaatcccccttgaattgagatgcatgctgtcttctagccttcttggaatcatattccactttgaattaaaagtttccaagcattaatgaaattttagtcaaatacaaggcatcccttgatggtcataaagtacagaggtacaagggatagtggtgggaagagggagttctcaacatattagatagtatcccttcaagctgattatgtaatatgtatgtactgtgtcataaatgctttcagcatgcaagaaaattgtacttttattacaggttaaatagcaatataagatgcattacaatatcccaggggtgcacaacttgcttttcacgtatttatcccaacagttgcagcttgtaaatgaatacaggaaaaaggtgtggttcaactgggatgttgtaaaactttcttttttttttgtttcttaagctagatgattgggttgttctttatgctctacgtttcgtataattggcttttggttgaatgatcaatatactttgtatctgaagaattcaaataattctgcatagtaggatctgtaacattcaatattcctccgaattcatgtttatggcttcaccattatcttctgtgcatgtttctaggctgattctgttctgaggtccataccattcagcttgtgtgtgttgttgtcctttgctgcagttgctgcaatgcctaggtgttaattaagaaagcaaaactgtcattaagaaagtaactttgtcagtgttttcctggttgttagaggtgcattttcttcatttcaggcaccgttttgtaaaccctgcattgcatttttatccttctattaaatacatgttatgatggtggataaattgcttagcaggggaaaaagagatgattcaggatttcttgctttttatttaaatattgagttcaacaaatgcaatatgggagcctctgatataaatgttttgctttaatgtgtaaaaataattctccctttttatctctccatgtctgtcttttaatattccatgagattacttaatattcaatcataatcttctgctaatatgcttgttgcattagcaggtgcctattgtccctagtc

SEQ ID NO: 2486 - DNA, 6082 bp, Glycine max
  Intron number 6 from transcript Glyma15g30180.1 (locus Gly ma15g30180) derived from phytozome v7.0 (chr-ID Gm15; pos 33363821 to 33369902)
aaaactgggaggtaagtattgatttatgttcaattggtttcataattatagagaaatagtcaattttttgtatgttttaccatagctctcttaggaaactgcaaaaaaaaaattgtttctccaaaataagctaatctaaacacatattctttggattgaatatccttaatttttttcattcatatgaatcagttgcaagtatggtgtcagttgccgctacaatcatcctgacaggaatggtatgtataatatattgatattgactgttcatacattttcctgtttcctaaacaattatgtcactttatcattctttgatgcagcaattaatccacccattgctggattaggtgcctctattttgccatcctcggctgctaatctgaatattggacttcttaatccagctgtttctgcttatcaagcttttgaaccaaggctgtcaaatccaatggtaatgtggaagttgttactgtacttattctcatagaaaattgactgatgcaaattgcaaattaatagagtttctgagagtgagagaaatttagagagaatttagagagataaaaatggagtctaatgttaattcattgcacaaatgagaaagggttacaaattgagcttatataggctctcagtacagctgtacctaactgttaacagttagtacctacactaaccaacctaacagattcactaactgattccagttgaataactggttatttatatatatacctaatcccccctcaaactcaagggggaggatgatggtaccaggccaatctcttgttttattactcttgttgcagtacaattgcaccactagggattggagcctagcctccctaaccaaccacagtgattattccgccccctaattctaggcagtccaactctatttatagctgactgctaactaactaattgcctttaactgacttgaacggttacaaggctaactaactaactgcctttaactaacttgaacagttataaggctaactaccaacagttacaaagctaactacaaactgtaactgatcttagtcagctacctaatccaggttctggctgctgctctgacttccttttatacttgccacgtgtccttccttcatacacttgcgtaatcggtaacctaacaatactccccccaagagagccaccttgtcctcaaggtgaaatgcaggaaattgctgcttcataacatcaaccgattcccatgtagcttcaaagtcaggtaaatctttccattggatgagcacttcagctgtgcctgcagggtggtttctgacagccttgacagctagaggctctacccttagctctaactcaatagtcagcattggagtcaagggttggggtttcactgcatgagccacgactttctttaatagagacacatgaaagaccggatgaactttactctcgggtggtaagttgagctggtatggtactttaccaatgaccttagaaatctgatatggcccataaaatcgagggcttaatttctcattcaacttcttagccaaagatttcaaacgatatggttgtaatttcaggtaaacccaatcattcacagccaagttaacatgcttattggcatatgctcgcatctggtcctgagccttaagcagattagttcgtagttggtccaacaaagagtccctatcttgtgtcagcctgttgacctcctctactgctgaaggaacagttgtgcctttaagcaattgaggtgggtctctgccatagagagccctgaaaggagtgagcttagaggaactattataattagagttaaaccaaaattctgcccaacttaagcaggaaggccaatgctttggtttttctcctgtaacacaccttaagtatgtttccactcctctattgaccacctcagtctggttatctgtctgagggtgatatgcggaactaaatttcaatttagttccagcagatttgaataattccctccaaaattgactcagaaaaatcttatcccgatctgaaataatggtgtttggaaacccatgtaatttcacaacctccttgataaatagatcagctatatcctttgcagcgaaggggtgactaatggggataaaatgattgccgcttttgcctctcgatcgcgattgccgctttctgccactttacctctcgattgcagttttgctgttctgcatggtcacgattgctgcttccccgatcggtactcgacaagatccgcaccgctgccattagctccgccatttgcgccttcagctccgcttgcttgatgccttcctcttcaaacaatcgcttcaaacttgcgacgtcctcatgtgtgttgatcatgccttcgaaccctcattccagaaattccacacatgcatccatgtttcctcgcgttgaaaccatgaatagcttcacgtctcaggatcaaaattttgctctgataccagtgatggtaccagaccaatctcttgttttattactcttgcagtacaattgcaccactagggattggagcctagcctccctaaccaaccacagtgattattcctgcccctaattctaggcagtccaactctatttatagctgactgccaactaactaacttcctttaactgacttgaatggttacaaggctaactaactaactgcctttaactaacttgaacagttacaaggctaactactaacaattacaaagctaactactaactgtaactgatcttagtcagctacctaatccaggttctggctgctctggctgctgctctgacttcctcttatacttgccatgagtccttccttcatacacttgcgtaatcggtaacctaacagaggatttctacaagtgaaatctttcacattgagtttgcccctatgaaactcaaagtgattaggagaaagcggcttggtcagtacatctgcccattgttctagagcaggaatgtgatacacagctagttgcttggacagcacttgctcacgaacaaagtaaacatcaattttatatgcttagtctgagtgtggaagacaggattatgtgctatagcaacagcactttgattatcatagagcagaattggagcagaaaaagggacatccaattccttcaatagagcttgaacccaggtgagtttaggactgtgccaaacttctgtactcagcctcagtactagatcttgtagtgacttgttgcttgtgggaccaccaagatataagattgggactaaggaaaattgcattagcaagaagttaaccttctgtcacctacatcagaggtccaatcagcatcacacatggctgtaacagacaatggtttacccacaaaagctggtttcatatgaaaatcataagagatagttctcttaagatattggagagcaacccaatgagtgtccaaaggcttggacatgaattggcacaccttgttgacagcatagctaatttctggtcttgcaagagtagtatattgtaatgttccaacgactgatctatagagtgtaggatccggaaataggtcagaatcagattttgaaagtttacaggttgaagtcattggagatgatataggttggccttcagccatttttgtttgtggtgtagatcccttatgtacttgctttgagtcataggcacagtcttgtcaagtagatatttaatttcaatacctagaaaataatcaagctgggtacactggtgactgaaccatgtacactgtttcctcaagaatgccattgagaagggcattattaacatccaagtggaataaatcccagccattggttaaagcaagagtgattatgattttgattgtgataggtttaacaacagtggaaaaagtttcatgaaaatcaaagccatgtgtacttgaggaaaccccttagctaccaaccaaaccttgtatttattaattgtcccatctgcattttccttcacttgaaatatccacttgcaaccaactgctttcctgttagggggtaagggaacaagatcccaagtatgattatttatcaaagcattgtattcctgatgcatagcagacaaccaattaggatcagccattgcttgtttgacacctctaggctcacaatgagtcaaaaacaatgaagggtgaattcttgggttatgaaaaccagatttggatcttgtttgcatagggtgcacattaggaggtctagggggtgactgatgttcagaagaagaagaagaattattagactgagtaagaggatcagactgatggagaataggcgaatgcttagaagctgttattaaattggttagacataggatcagagacaacttatagttgttgctgagacagattttctgattcaacagattgttgattactatgatcagaaaatgcagaagagttaacaggagaagcaacagaactaggttcagaagcagtgtttgagggtggatcagagggtgggtcagtatagggagtgggaattgggtcagaaacagtgtttggaataggtgcattaggtggtgtttgaactaaagtggggaagatagggataaaactaaaataccgaggagcagaggacatgaaatttgaggactgaggaaatagttcagaatagggaaacctattctcattaaaaactacatcctttgaaatgaaaatgcaacctgagggggacaaacattgatagcctttgtgagaattagagtatcccaagaaaacacactcttgagatctgaagtctaatttgtgattttgataaggccgtaaaaatggaaagcaagcacacccaaaggtttttagaaaattataatcaggggattgtttatatgggacagtacaagggacatcaaagttcagggaggctgtaggcagcctgttgattaagtacacagcagtgttaaaagcaaagtcccaaaactttaaggaagagaagcatggtgaagcacagttaaggcctattcagttatgtgtctgtgtttcctctcaactacaccattttgatggtgagtatgagggcaaatgagcctatgtgtaataccatgaatggtaaaaaatgaagtaaagggtctggattcacccccccaatcagtttgaatactattaattttagtattaaactgaagctcaacaagggatttaaaattttgaaacacagtgaaagtttcagatttaagttttaagggatagatccaggtaaacctagaaaaagcatcaacaaatgaaacataatacaaatagtcatttgtagaaggaatatgtgatggtccccaaagatcactaaagattaattccaaaggtgtagagtaaacagtttcagacatagaagagggaagtctatgagacttccctacacaacaagctgaacaaaaatccagaattttattagatggatttatcttacaatgattcaagacaagtctcaatacatgagcattagggtggcctaacctagcatgccacaaagtactagaaattgactgatttgagacaccagaaactgttgctgtaaaggaaacaggaactctctatgaaggctaagaagcagaagactcttgaagcttgagattaggaaatgaatagagatcatcactaccaacaatgccttgaagtaagacttcattggttgcctgtgatttaactgtgcaaaagcgaggaaagaattcagagtaaactccattatctttggcaaatttacttacacttgatggatttttagtgattgagggagcatgtaacaagtaatgaagataaagaggaaaactaggattagtaggggacttaaaagaaggagaaccagaaccaagaatttttaaaccttcaccattaccaatataaatctgatctcatccatcaaagtgaccaagctgatgaatattttgtggttctccagtcacatggaatgaagctcccgagtcagggatccaggttgaattagcattgtccatgagttagctagcattgcattagaagtagcttgagtagaagcaggttgtttctgactcgtgtttgctggattaacccaagtattagacttagaattagcctgagactttgagctactatactgcacaggttgcagtgtagcaggatcatacaacaccagagat

SEQ ID NO: 2487 - DNA, 6782 bp, Glycine max
  Intron number 17 from transcript Glyma20g35020.1 (locus Gl yma20g35020) derived from phytozome v7.0 (chr-ID Gm20; pos 43316453 to 43323234 reverse strand)
aggttggaaccaacggttcttctaacgaaggtaatttgctcatcataggcatcagcataataaactagtatccagatattagtacttcccgggaaaactttcagatatatgctatactgccacttctagggcctcaagtttagtaatcatagtgttgaatgttgatactattatattatctaccaaatacacagctctcacattttctgaaggacaaacctgtgattcgagggctgaggtccagcccattatgttaaatctggccatactaaatgagtttggggacaaccctgcacaagcctcaacaatgttgaaatctaaaattaaacacactaaattctgagtgatagaaataatggccagatttgaatacgaacacagggttttcccttgacaaggagtttcctccttcaaaacacggaataacaaacaagcaccttaattcccttttacaagactgtaacacgacttatgtatcactataactattacatcataactataacagcctaatccaaaattaatataaaaatgattttgcctagtgttaaagagaaagaacagaggcatattgagactgaaactgtgtgtctgaatacagcatggtactcagtttatataggcttattgcacttattacaaataaatggaggatatttgatttcttctaactaaatcagtgattatgtgcctataaactatatttattacaatgaatgtagaatatcaatattgattctcaacattctccttcaagctggagcatataaatcatgtgccaagcttgttataaatataaccaagtctcggtccccttagagacttagtgaagatagctgccaactgatcactggagattaacaaatcttgttgtaatatctcccgattcaatcttttctcagataaaatggcaatccacctcaatatgtttggtcctctcatgaaagattggattggagacagtatgcaaagctgcttggttgtcacatattagcgtcatttgtgtgtcctcttacatttgatttggctacaacactttgcttcttacatttccaagatatcaagtttcctccaatcaatacacaatatcctaatgtgcgtctatcactgggtgaccctgcccagtctgcatctgaatagccaataatttgagaatgttccttatcttcataaatgagaccttttccaagagatctcttaatgtatttcaagattcgaatgactgcattcaaatgatcttggcagggagagtttagaaattgacttaccacgctcattacaaaggcaatatcaggacgagtgaccgtgaagtagtttagtgtcccaaccagtctcctatatcttccagggtctgagaatggttccccctgatttggtggcaatttgacactaggatccataggagtgtctattggcttggcatttgacaggcctgtttcttctaggatgtcaagggcatatttcctctgagagataaccacaacatccttggattgggcaactttgataccaagaaaatgtcgaagcttaccaaggtctttagtttggaattggtgacagaggcttgtttcaattttgtaatgtcgtattgatcactacctgttattacaatgtcacctacaataataagatcaatcctaacatctatcccaatttttttttttttcaggatcccaataaagtggcggtcaagctggtccaaattcaatgaaggtttctatggggtggagggccgaatcaaaagaaagttgcgtgggtcaaatgggagacaatctgtctaccaaaggaaaagggtggcttgggaataaaagaaatcaggatattcaacaaggcattgctagggaagtggagatggaacatgctgcagtagaactcagaattgtgggttggaatattggagtcgaagtatggtggatggcgagcattagctgaagccagacgagccaacaatgaatcaatatggtggcaggatctaatggaggtgacacacgaaaatcagttgaatagagtgctccaaaatgaaacaatatggaaggtcggatgtggggacaaaattagattttgggaggacaaatgggttggtgaaggggagacattaatgaggaaatatccaagactgtatcaaatatcctgtcaacaacaacagctcgtccatcaagtgggaaatcacagaaacagcatgggagtggaaatctcaatggagaaggcctttgtttgacaatgaagtggccgcaactattggctttttggaagacatatcacggttccccattcatcgacacctaacagattgctgggtatggaaatcggaacctaatggacactactctacaaggagtgcataccatttgatgcaacatgaagcagcaaaggcaaatactgatcctgcatttgaggagatatggaagctaaaaatcccagcaaaagcagccatttttgcctagaggctagtcaaggacagattgccaactaaaaataatttgagaaggagacaagtacagctaaatgacacattgtgccttttctgcagaaactatgaggaagaagcttcacatctgttctttagctgtacaaaaacacaacccgtatggtgggaatccctatcatggattaacacatcgggagcattttcagccaacccaaggcatcacttcttgcaacactcttttggcctactcggattgaaacagtacaatagatgaaaatgctggtgggttgcattaaccttcacaatttggcagcacagaaatcggactattttctcaaacgaaccatttaatggtagcaaaatgatggaggatgcaatgttcctggtctggtcatggttcagagaattggagaaaggatttacagagcattacaattactagtccagcaacctttcagcagctttctgtaactaggatagatgggtagctattgaccaaatgtaacaatgtatctagtctggaatctaacagtgggaccatcatcccacacagtcatactcctgtattcttagtacccctggcacttttctataatatatatgatacttttgctgataaaaaaaaaacctacaaggtgcgtggcggtagaagacagagtggtcgacttcattgtgaatcataccaaattgtcgtaccacagtacgaaaacggccaaaccaggctcgaggggtctatttaagtccatataaagacttccgaagccaacacatcatgttcgatggtcccccctgagcaacaaagcctgttggttgctccatataaacctttacctcaagatagccatgtaggaaagcattctttatgttaagctggaagagaggtcaatgatagatggaagccatagacaaaagaagacaaacttaagccattttggattctgaagagaaagtatctgtgtagtccttatccatacacctgagtgtaacttttttccaccaaatgtgccttgaaacgatcaatggttccattagggccaattttaagagtatacaaccactaacacccaacaacagattttcctggcgaaagagactagttcccaagtgccactactttgaagtgtgcacatgtcatcaatcattgcttgcctccagtccgagtaagataatgcttcacctagagaactagggatagacacagaagacaaagaggacaaacaaatataatgcaagggagagagcctatgatggctaaggttaacatagtgaggagatgggttttgggtagaacgaataccttttctcataacaatgggccaattaaggttgacaagtccaaatccgatataggagatgacataggggaagaatctgccatggcctctattatgtcatcatgagtcggtgtaagggctggttcttgaaagggttgtgcagccggtggctctttgggtggaacaactgattcattttgaggattaataggaaggggaaaatagcagtgttattaggagtaccaggggtgagaggacaccatatatcggcattagagtgagcagactcaaaataaggaacaaactcaaagaatgagacatcaacataaatgaaataccgttgaagagcagcagaaaaacaacgatatcctttttgcacgcgatggtagtccaagaaaatacatttgagagactttactgatagtttgccaactccaaggctcaaattataaacaaagcaagtagagccaaaaacttgaggaggaagtatgtgaagaggtgatatataggacaaagtagggaatttggtcatttagaatagaaaatgacatgcgattaatgaggtagcaggctgtgaaaacaacatcaccttaaaaacgtaagggaactttgccatggaggagaggagttcgggttgcttcaagaaggtgattattcttgcgctcaacaaccccatttgttgtggagtatgggcataagatgtttgatgaaggatgcctttggacgccataaactactgaaattgatgaggtattctctgacattatcactacgacaacaacagataggtataccaaactgggtttttatttcattataaattttttcaaagatggaaaacaattcaggattatttttcgttagccagagtcacgtgtaacgcgaaaaaccatctataaaagtgacaaaatacttaaaacctgttggggtaataactcgagatggaccccaaacatctaagtcaaccaaagcaaatgaggatgcagcccttttattgacacgactaggaaacgaactacgagtatgtatcccgaactgacatgagtcacaatgtagactagacagctgatggagattgggaaccattttctgaagtgtgggtagaccaggatgtcccaattgagcatgaattgttaatggagaaattatggaaaagcacacctgcggcgacccagagagataatataggccatgtgattcacatccgacgccaatcgtttgtcccgaaatccgttcctgcaatataatagaacttttagtaaatgtaacgacaagatcatgtgtttgagtaagatgatgtacagagagtaggttaaacgaacaattaggtaacaaaaggacagactcgacagtgtgtggtgccaatgccttggggttttcgttgagacccattggtagaggtaatagtcggtaaatagccatacgtagaaagagaacggttaccagaaatatgatcagtagcaccagagtcaagtacccaaggacccaaggaagatgaaggagagatgcaagcaatagatttactggtgtgtgtgatagaagcgcattaaaatcaaggagagctgcatgaactcgccctaggtaggccgacttgggcccgtgaaattgcagaagagctaggaaggtcatctagtctttgcacacgccgtatgaccgttgagcatcatttgtgccatgcctcactccaaagcgattcattggtgttgtgaggcctgaaatttggtttgagagagtggacctgataacactgcataactaacaatcgatctttcgcattgtgcatgttcagccttaggtatggattcagtagaagtagtgaatccacaaattgatgctggatgcccaagtagagtagttcgaaccatccaacttctcaatagaaagtgggaggttcgaaaaaattggagtgtctgccttaccatcaaaagccatggtgagagagaaacacgaacaacaacccctgcaaaaaaaaaaaaaaaagaacacaatatagagttttcgtcaaagtgctctgatgaaagcgaaaccccatggctagggtcaccttagggaggcgagatcacaactggaagtgcgtccggaaagggtcgcgcatgcgccgtcatgcaccgtggatagctgctgtttggctcgtcaaaggagcggtgcgtgagaactccgatggagacgtgagtgacagatttgaggaatcttcggctggaaatgttaccggtggcggctgctgcggtggttgctagaaaagttatcggaaaacgaatgaatagagtgcaccgatgaagaaggggcttaaggaggttgaaccggatgcaagtggttcgccgaaaaaaatgaaaattatagccagggataatgggtctatcgaggtgcctctattaggctctaggtaccctgtgtctgaatacagcacgggactgagtttatataggcttattgcacttgttacaaataaatggaggatatttgatttcctctagatcagtgattatgtatgtgcctataaactatatttattacaatgaatgtagaatatgaatactgattctcaacaccaagtaacttccttgtacataattaattaattattactgcctagatcagatttcctctcacactgcgtaatgatcttgtgtcgagtgtcaacttcagttgcctgcatcccaacattcagaaatgaaattgatttctctagaaccttaactgacctggatcctgacatttaggaatgacttttgtttcactagaaatgcaaattgtacattagagtttagagtaaattgaacatgtataactgtaattaaaaaatgccaatagtctatatcattcattgttttacttgtaactgatggctgatgccttggctaaagtgtattttactatactatatagcctgtgcttcagaacagctagatcttattgaatttttcatatacagtcgtttgttcagttttataattgcctttgtggttataagtatgatgaagttcacaaattcaattttatttgacatatatatacttaaactaatcaccatatgtccatgtcaccttcagttcatactttaaagaacttaatatctcaag

SEQ ID NO: 2488 - DNA, 4165 bp, Glycine max
  Intron number 3 from transcript Glyma03g22210.1 (locus Gly ma03g22210) derived from phytozome v7.0 (chr-ID Gm03; pos 28225272 to 28229436 reverse strand)
ggaaggcaattcagttggacagcaattcagttaaggtttttgtgaccaatctccttgtgattttgtagttccttttgtggtatgcgttggctaataatttagcttctaagattggtttgagtataggcgcagtgtgaccaatctccttaagattggtttaagatgtgggatttccttttgtcttttgaattgactgtgctgcacgtgggataggccagatcaggctttgaaagacctgagcctagcctacgatgactcacacctaaattgtaattaaagtcttacttgattataggaatagaagttatggagcagtaacgtgtaatcaagtatgatagtttaaaaaaaaaaattaattgtatccaaaaaataatattatatattggtacccaaaaaataatatatatatatatatatataggccggacctaaccttttaattaaataggccagttcagactagactttatgtaaatcaggtcgtaggcccctgtaggccggcctgacctattctcacccctagctgcacgtttagttgtctttggcttgggatagatgtatttgtgcttggtggtttgtcgcttgcgaaacttcatgatggccatagattcttgaaatatgaactgtgaaacctggattctcaaaaaatggcaaatattggtgccagactcatatttgacagcaatacacgtgtgatagtattttccatatttttgaacttttatagtttgatgcaattgggatatgactttgatactttgagtgtcttttcttctgtgtactgtccttaaagatatagtgaatggcagacaattatccttaaaggaaaatgacaaagtttggtgctggacgcatatttgatggaaatatgcacacgctagtattttccatttctttttttttcctgaacttttattgattggtgcatttgggacatgactttgatagtttgttcatttgaatgccttttcctttgtatttaaagctatagtatatgttagacaattgtatagagttcaggcttcttttgaatagatgtatttgtgcttggtgatccatggcttatagaacttcgtgatggccattgatgtgaactatgaagctcagaaactaagaaaatggcaaagattggtgccggatgcatgtttgataccaatatgtgcatgatagtgttttccttgtttttggttgaacttatattgatcgatgcatttgggatatgacattgattctatgaattccgtttcatctgtatccttaaagctatagtaaaaggtagacattatatagaggccagtcttcttgtgataggattagtggcacctttttattgactttagttggggaaaaatatgtaattttttgtaacatcttcacaggggaaatgatttattctgatagggcaagaaaaagaaagttatataactagggattttttatatgcttgcgatttttttgtgtgtgattatcatccattgatgtgattatgttttattgagaaattatcaatgtctttgtacaaatatattgtgcatttatataaaatatgtttatttgatttatagtaatgtatttaagctgtataatatcttgaatttttaagaatttcctgaatccatgttgcattgtacttcacttgttagttattgaccaagggggtctaactcagttggttgagcagggtgcgtgagttattgtaaactccttagtatctatcttcgtttcctacgggtaaaagaaaacttagttattaagtattggggcttcagtagttctttgcgaaaatattgacagcacaattttagtgttctgatatgtgttgcatttctaactgaggggatagactcataccatacaaatccttttatttcaaatcttttccatgctacccaaaatttaagcaatttccttgggtgtattggccttggcttttaaatcaattccagaattctactattccgcatttcctaatacttctcaaagtgaaacctgcatgtcttgtgatagttgcctattgcaataggatctgttccattatgaaaaacttttttgggaaatctgtagtgatcctttttcagtggttggattgtgtaaaacaattgctaggttttgtatctcaagggttacttatgtacttggtagaggtaaaatatcaatgaaattaggtgccattttaaatgacaactaatgtgttttacttaaattcttgtttattaataaatggaaaaacctccattagtcaatttcaacactaacccaaatttattaaaggttttagaagttggcctagtttttaaaccaagtaatttttctataataaaattcttggctagtctggtctttatctttctggtgttcttttcagtatttcaagaattattgtcagggtttggaatatgagtttgtaagggttgtgatatcctagatgtgaaatagtttgaggaaaataataagagaaagaaattggaaggataaaactagaagagaaattgttaatatttttatattaattaaaaaattaaattaactttttactatattatttttaatttgaaatttattattttttaatgctacaaatttttaatttgatttaaagccaaaaaaaaaaaaaaaattgacttccatcccccactttctcccttatttatgggaatgttttttttttctcccaacctttttcccttattgtaaaatgtgtcatgcttttcatgtgatatgtaagatgctctaaaccaattttttttattagtgatgcaatgagagtgagatgtgtttctaaactgtttaaataaagacttgaaagaaaagaattaatctgaattgttttaatagagagattacatatggtatttataaacttcacctcacctaatcaagcaaataaaagggaagaaataatattgtacaaatcaaatcacatcaattctgctttattttaagaaatgaaaatcaaactagttataggaacaaatcttcagcttaattacaagaataaattaaatttttaggatttcatttcaaggtcagaagcgaaggtagtgatggaacaggcctcgaaggatagtaccgctctaataccatgtttaaagaaagactggaaagaaaagatctgaattgtgtttttaacttgtatttaccgagagattgcatatagtatttatagactttatctcacctaatcaagtaaatagaagggaataaataattattatacaaatcaaatcaaattagatcatatcacataaaatctgcccattctaagaaataaaaacctgcctaattatacggataaatcttcagcctagatatagaaataaattaagttttcttgattacatttcagcataaactatatcaatcttgaatagtggtctggagtggacaccactaaaatttctgtagcaggatgactgctatcgtaaataccatatggtacaaggcaaataatttatcataaatgctgaaaaataaaaaataattcacaaaaagagtcatattcataattaataaacgcaataggcaataacaacaaaaattctattaagttcaagcttcttagtggatgatgccatgaggccatgattgagtaggactggtcaatgaaattaaaaaacaaggccaaatcagaacagtgcacaaaggtagcaaagaggctgagcacttaaatagatagaggtggaacaaaaaaaaggatgatcaactgctagaggaaggacatggacatttcttttacagttctactcgaaagacatatgttggaactgtcatcttttttggtggggaaatggtctacctagtattcaagtgtactgaatgtgtatcagtacctggtacagatgtgtttgataaaatggagtgtgtgtacacatgtgtgcatcattgtttttgggttaattcgggaagcagtttcttattaacttccatccagggatatttaccgtgtattggtttgtggtagagctgtatagtattctgtaaaaccatgttattggtggaagttgttggcagcttcactttatatctgatatatgttgcgtattgatcatttattgttttcattattaatccatgttctttgtgttgattgtcttgtttccagctgagttttctttttgtatacatttcaggcccactatatattggggctcgcattgcttcagag

SEQ ID NO: 2489 - DNA, 2189 bp, Glycine max
  Intron number 1 from transcript Glyma20g31490.2 (locus Gly ma20g31490) derived from phytozome v7.0 (chr-ID Gm20; pos 40124098 to 40126286 reverse strand)
agcctagtcgctggaagcacgttgacgaggctgaggtacgcgataatcgcatatgtcagcgctttgcattttagacgcaccgaatcaattcaatttttatgctattgaataattagtattcttatttctttccgacctaaaccctatgatttcgataggatttaatgctatgttctggatttattaattgatcttcacaaatgcagaggggaatcttcggaatctgagatggtagtagagaaggatgatatggaaacatgtcttagagttaaaaataaagaagaggatccatagaccataggaaactctgaaattgattgaatgatgtgatatgatatgcagataaaaagagcttatcatacatttatagcaagaaaagttacagaaaactaatagatgcagcagctgaaacagagaaccctacttattggcaatataaacactaatgtatcatccttactcttagactggttcagtaaccacaacatgatagtttcgaaaacaaagttgaagaacagttcgtgaagtattgtagtttcacttttgattgctttactactttcctagtgcttttgcgacatgtgtgttctaatacaagaccctgatgtatatggtatacttgaaatggtggaactaatgtctttgtcaattcccttctttcgaggggttctttaatgactatcctttttcgttgcattttggtttgctctctttctgccattcaaataaaatgtaattgacttttatttcgctactgctgataatctgttgtggaaaatctacaagcggtctaaataacatactaataacatcatagatcctattattgatgtccacattgtaactaggctgaaatacttgccttaaatttaatgagtactcggagggctgtgtgcgcttttcaatgttgttaatggcggaaagccaaaaatccactataaaaatatggcagatggcgtagcggcaaatgacggaagtcatggcggacaaaaaaaaaaaaaaaaaaaaatatatatatatatatatatatatatatatacatttatatacatataaatattaacaaaacaataaataaaaaattagaaaaacaatggattgcattcaaataaactaaaaagtttcatgagttcacacaataaccaacaccaaataaactcattcacgagttcaaaataacaaaaaggataaaagcttaatgcaaactgcaaagtaaaggttgaggctctaatcatcttctccaatcccaacataatcctcttcgttttaattagtagaagaggactgaacagaaaaaaaaaaaaaaaaacagaaccaaaaattaataaagagtgtcaaacagaaaaaaaaactgaaccaggtgcaaaaaaaaaactgaaccaaaaaaaacagaacctgatgccgccgcagtctgtagtcgttgccgctgccgtcaccgtcactgtcgccgtccgttgctcgcgtgcgtggtgcgtggtgccatcgttgacttcgggtgagacctcacgctggtgcgtggtgccgtcgtcgctggtgcttgctgggtgctgggtgctgggtgctgctcgtgctcgtgctcgtgctggagttcgcgtggtgctcgcgctggagtttgggagttcgtgtgctgcgtgctgctcatcccattttgatttgaaaaccgggtttagggttgggtcgggtcagcccaagacgacccaatctcattttgggaaaattttcagaaaaaaaaagtttcttccgccataaccgccaccaccgttaagcctatggcggccgccatttgaaacccgcaacgccaccgctatttggtggcattttttcaaaaatccgccacgtcataccgccatggcgctgccataaccgccacttgacaacactggcgctttcaggttgaaagaaattagatttgtaggtatcttatgttttatgggctatatttagcttgtaatctctgttttttgttcatttctttttgtgttgttaatagtgtttttttttttttgtaaatatactatggaatttttggaatatgttatttatcattagctgggaagtttggaattttgatgctttgttcatgttctatgaaattaaatgaaattctgtttaatatatgaaagtacttatgaaattctgtttaatataatgtagttgggcttctttgacagcttgctcgtagggttcgt

SEQ ID NO: 2490 - DNA, 1400 bp, Glycine max
  Intron number 1 from transcript Glyma16g24570.2 (locus Gly ma16g24570) derived from phytozome v7.0 (chr-ID Gm16; pos 28547978 to 28549377)
tcataggtttccttgatcattttggtcaacatcaggtaacacaattgttctctagttcattttgtgtggccaagtctcagaatttgattgagcaacaataaacctacaccaatttttatgacacttcttataattcattttgcttgacattttttttcttttcttcgtgtctcttttctaatgggataaactatgtttttcggttcctataattttggtgaaacttgattgtagtctccgaacttcaactttaatcaatttagtaagtgaactttataaaagcagtgatttttgttccttctcaaagtgaaaaccgtatgtgaggagggaggaaaataacttcttttaaaaagatcaggaaccaaattgttcaaagttagagcatagggagtttttactgaaaatacagagaataaaaaaatattttactctatattttgttgtattttttttttgtttgagtatgattgtgctttctttcttttttattttttttctttctttttctttaaccacattgaataatataggcatttattgttggatctgattggggagcagtcattggatggcatctgagtctgtttaggcctgaaagagtcaaaggatttgtttgtctgggttttccttactacccaagatctccaactgctaaaacggttgaaactatcaggaaattaattggagatgagagtcatgtttgccagttccaggttccttgtacttactgcttgtttaaatggattgacatttacatgcatttcaaaatgttttcatggcaaaacatagatatagtttttcctgtgtttttagtattgttctctagtcagaatcagagtttcactattaaagtatgttatgttgacctatcgaagtgaaactcattctattaacaccaaaagcacctaatcagttacatttaacttttgtccttgcctaaattggttttactaatatatatatgatgtggtttgtgtttatggggttgggtgtgctttcaacactaatctctaattagaattggagtattataataacctatgttatggtgacttttagagatgaaacttcaattttaatcagagattaaagtagtaatttttggacactccatatttctaaatacctcattaatattttttttttcttcttatcaaatcatatcacgtatcatacttataattttttctcttttatctttctctcactaggtgtaaagtagattgatgggtgttcaaaaatcatttttgtagagattaccactaaaagcacctaatcaactacatctaagatttgctcttgcctaattttgttttactaatgtgagtgatgatgtggtctgtgtttgtggggttgggtgtgcaggaacctggtagagcagagagggcttttgctagata

SEQ ID NO: 2491 - DNA, 1202 bp, Glycine max
  Intron number 2 from transcript Glyma07g36530.1 (locus Gly ma07g36530) derived from phytozome v7.0 (chr-ID Gm07; pos 41893994 to 41895195)
tcattccaaagcttcaaaataccgagtccaaagaagtaagtgatcaatttttgaagtttttttttacgattttgtttacttacttgcttaaagagtgcttgcgtaatttattattaaaaaaggacaagggtaaaaatatattgacttttttttactgaatttccctaattttttaaatgctaaatattttaaaaaaagaaatattctttattttatatttaatgtatttttttattccctaattattatcttttaaaattatttaacacgtatcaaaatcaatctttttataatcacatggaggagggttttattaatagttaattagtttaagtagtagataattacgtatattattctctcaaaagatttcagatttgatatttattcatgggaaaaaaaactaatggaataaacggtctctctctatatgtataacttacaccacttatctctctatatgtataacttacaccacttatttttttataaagagtaagttagaaagttaacaaaatttatagtcataatctaccaacttactttttataaaaatcaacttactttttataaaaattaagtaggtgtaaattaataaactcatatattgaggggagggagaaaaagaaggaatcaaagaataagtttttagagttattttttattcttattatttatttttttgaaatctaatgattagaattaataaacaaaatgagaaagtattttaatatgtcatgtatattggatatgaaagaatcagtgactaagtttagtaacataaagtttgtttcatcttgttaattttggagtcactaaattttagagacgggtgttttaaaaaaaatacacatataaattgtttgttcataaattttattttttcaaaaggaagatataatagaagataaacttttattgtaaatataaactttagggacactagataagcaaataaaaaatagaaagtatttaacaagaaagacaacatttataatataaattaaaagataaaaataatttagtatttactttaattttaatatcctccatttattaatcgatacttttaaaatattactcaaatttaatttttcataggaagtatcacattttttaagaaaagaaagtaccaaattatgtatatgtatatgtatatatgtgcaggtttttgctggccttctaggagcagcaagtggcgg

SEQ ID NO: 2492 - DNA, 2240 bp, Glycine max
  Intron number 2 from transcript Glyma02g39520.1 (locus Gly ma02g39520) derived from phytozome v7.0 (chr-ID Gm02; pos 44819789 to 44822028 reverse strand)
gttataggtggctagctccagaggtttgtccctattcattcacactcgttttatttagcaaaatacttgttgcaattgtgaaagtttgtgtcacaggattatgttccatagtcatatttagttctgtagtgtctttgccatgcatagtccgaaatattctccagctgaccagctttttctttataagaaaataaaaaagtgaagaataggatttcaatttggaatctatcatttttaaaagatagggtccctccttctcaatagtgacacctagtcctacacacctaatctaaatcctcctggcttttaggtaatataatggatgagaatgtgttctatgctttttagctgctgttccagaaaaatcttttgacatgtaatggtctgctttttctaaatatagggtgcaaaaatactaattcttctattctatgctcatggattttctatattcttcctcaatcaataattttttttttatatgcaccaactatattctcacttatttggttagaaatatatgatgttggcacaaattataagatcgaaatctctccaacatggaaatgaaaatgattgtctgcttgtgatgcttatttgaccaacttggtgtactccttcagtaattttagaactttaccaatttaccagcactgtagcacctggtattcaaacattggctcaagccattttctctaccccttcttaccctgaaaaagcagtttatgtcttgcagtcaactaatgaaatttcttaaaactttcattgtattcttcatgcgttcaaggaagaatgacagttgttattactgtctgccttgtaaagtttaatgtctgtaatctgttgattctcctaaataatgtttcagcaacagtaatgtataggaatagcatcaaattgtttctctctctgcccagcttctctgtttgtcctcatatacactagctagttcagtgacaaattccagtctaaagcgttttagctcttttgtcttttttgtctgttcttcatgtttcagtacaccttgaaaaaaagacatactagatgttcaactagagagcaatttagagtaacttttgtgtgctttattgtcccaaagaatgctatttagatccattgtatgcaaagcaatgctgaactaacttacatttaaaagaaactttatgtcacttgtcctggcatcattgtttgagcatgccgaacatgtcttaataattgtttccttgctttcactttgttgtgtttacctttatttaagcactcgtgtatatcattcggaaaataagtgtgcttgtgtaatgccaattataccagaattaattctgcgctggagcccacatgtcataaggctttaaatctttaacatgatctttgccccagcactcttgctatttgtcctactgataaaggtactcagaaagctctcacacctcgtgtgcaggcaggaaaaaacatacaaaagctatccactaaagccattcattcaaagagaaaaagtgataactgaatagaaaggcacgtcaaagtttttttttctcacgagtgattatttggttgttgtggataaacaatctggttgtcatgctttatatattatcaagtcttgcaagagaaaatctcgttacacatcacttacaaacacaccaattcacgtgtgtatgtgacaaacattcattttgcgtgacccaggccacccacacacacaaatgagtgagatgacaagctgccactataaatctataatagatgtgtagttgtgtactaatgtgtgcttatgatgtatctaggctccttttttttttgtccttttgagtgcatgatattctctttgaagaatgaaaactagtgagcgattatatgtggtagatttgaattttgcaaggatctattaattattgataattttccttgtaatatgatttgtttggatgagaggagagaaaatggagaggagatgaaatatggataataatgcattttcttttgttcagtgtaaaaagtttcacaaagtcaaccaatcaaaaatatgatttttaaaataattattgtaaaagtcaacaaactatgtttgcaataagatgataatgtaaaaattctttacattgttgatgcatatagtatttatttaattcaaatatgacatttttttagtacacattgttttcaatgcccccatgctgactggttttactctcattttttgttgggctgggaacagataattgcaggggatccagaga

SEQ ID NO: 2493 - DNA, 3290 bp, Glycine max
  Intron number 2 from transcript Glyma11g33030.1 (locus Gly ma11g33030) derived from phytozome v7.0 (chr-ID Gm11; pos 34751007 to 34754296 reverse strand)
tacctcgtgcttggactttctttttgcttgatcaggtcatctcactagctaattcttaacttgttcattttcttgctgtaatttcactttctgacttaaataaataaaataaaagacaaaaaattcatagctaattaattattactattttttttatcagcaaataaacagaattttattattgtaaagaataccagcagtgctcgatgaactgcaataacattttactcacagttctaatttcatttagttaaattaattaaaacccagaagtgttaaagaaaaactaaggtcatgtattaatactcttttatcaatttgcatgcactgaatgttgcattcatatgtgacccgtgctaattgctttttggtgcaaagccgtgcaaactgtttgctggtttatttttactatttttgttttatgttgtttcagttttgtctttgttccattattgaaatagtttaattaatttattaagtgtttgttatcgtaataaattcttctaataagttgattgaaagatgatataaaggaaaaaacttaaatttatgtggtttttgcgttttgtactattttttaactaaaattaaattttacctaaataattaattaaagccgacatttaataaacatattattaaagtgcaactctaattttgattggagtactctcaatatattgttttctcatcttagcactttctctttcaacctcaatattttcatattctgtttttacacttgttttttctttagtatttttttttatcgctccacccgttatgtttatcatttttttaatttctctttttctcctaaaagtatatacatccactgtggtgtttaaacatcattttgtttctcttttgaatatcctaacagttagctagctaacttgaacctattgtagttatatgctttttatacacgttcttgtgtaaattaatatagttgaaattgatttcaatacatattttgcttttgcttatattaacagttcaaaacagatttcatctaccttgaaaacaaatggaacatagtaaatttagtacaggagtttggacgatgatcgttatggtgaatttgataaatggtccttttcacacacttcgcacatatcttagctttactaaacacattataaatgctccaaaaaaatgatagtgaaatacaattacatggaacctgctatggcgccacacgacaatagcaaaagatgtgatggtggtcctagtggcttcatcaatggtgtcgcaacgattagcgcgatgccctgtggtgctattatgtgtcacactttcaaattttgtaaatagttttagcattgtacaaatagtgcatgtgcttggtttggtgatagaaaactatgattcatatataaaatcaagctaaaattaccacaaattatttaatttgttgtctcaaacaatcatggtgaattcaattaaccttgttattaaacatgtaataatttaggtggcacaaaacatagtggtgtgcaaaggtgacaaaatggacaatttggctagtttgatcattgatgtgggttgtgggttatgcatgctgaacaaaaagcgtttgaatcagttcagacttttaaagagatgtcagaacccagttcaaggggcttttgaaagtttttgcgactaaggctagatgaaagcatgttgggatcaagttaaaaagatttaatttaatttgaggttaaaatttaagattcaaattctatattttatcaccaaaatctggactgatccatttttcatccagtgttatatgtattatcatcaaaattttatattttacaaatatttaaagtatatggacttttatgattaccataaaaatattcataaataaaaatgattttcactctaaggaaaaacttttatgtggatgagattcacatttagagtgtgtttggatggagaattttatctaaggaaagtaatttatcagaaaatttaaatttctgtaatctaaaattcattctttggatgtttttttatgaaaattttaaatttttggaattttaaaacagaattttaaacaactaaaaatgtagaatttcaatttccttctaaaatgtgagaaattgaaattctcttcttgatagaagaatcttaatgttcgcatatttcctttataaccttcatcctctctttcacctgaaaaattcctgaaatctcgttctcaaacttacgactcttttctcacaccgatgatcatcttcttcaaggaatgttgtctgagctcgtggagtattgatcgagtttgggcgtagggagacacatagaactacacctgttagtcaagggaacaaccgtcactatccatcacgcgacggaggtgcttgccgacgtggaggatctggattatgccttatgtcgttgactggatgctgtggtcgggtgtggtaggatacatcgtcgtgtcccgattcccctgcaattcctatgtcgcatcagggttcttctctttggaagaacaccaatcatattttttcttttctttgtcttcattttctttcaccctcacaattttaattttttttatccaaacacaaaattttgaaaataaaagaatttcaattgaagtatttaaaattcatagaatttaaaatttctcataattttaaattttctcatccaaacacactcttaggaaaaaaattgttgaaaaagaagaataaaattcataaattgtcataaaattttggattaaagtgtagtattaaattctcttatgtagtttctcatgactcagataaaatttttccgatatttatcctctcaattgcaaaacattacctgacatgcatgataaaaaacaattgtcatgcagtaaaagaatactacaaattatatctttttaaaaacaaatctatataccttttttcttcttttaaaattgtattatttttatcaacatgtccatatttattgtggtcaagtggccatacaatgcatggtcaatatttgttaattttaaatctatatttgctactagaattaaatattagtttgcataaagatgtaagtttaatggtcatatattatatcgtcattcaatcataaattattatggatatgacttttaaaatagtcattataaaaattattaatcttatcatatataatagattatgattgaacgatggtgtatgtataatattagtatataactctttttctctatagatattattataatatatgtactgaaaaaattgtccaatatatttgcgttgataggtgctgacatacataattctagcggctggagcagt

SEQ ID NO: 2494 - DNA, 6060 bp, Glycine max
  Intron number 2 from transcript Glyma10g12190.2 (locus Gly ma10g12190) derived from phytozome v7.0 (chr-ID Gm10; pos 13068229 to 13074288)
ctcactgttcctgttacttgctatcatctcaggctgtaagttttttttttgaatggcattgtgtttggtgggttattttatagattatataatataatgatataaaacattttaatgtaattttgtgcaaaggtgtgaaacatttaggccgccatgaccgcaatccacatcgcagaatccgcaaattcattcgtaactgtgaaaatcttcacgcgaccgcaatttaaagccctggttctttgacttacttgggtgtgatagtttttgctgtagatgctgtgtctgtgtgtaaataataataatgttatggctacaaaaaaaaagtaaaatgaattgaacttatttggtaggcttaaatcaactctgttgcttcaacttttggagaagttagatgagagaacttttataaaagttaaagtgcatgagttgattttaagttttaactcacagataagctcaatttatttatttatttttcttttataagtgcttataggaaagtttgtcaggcctaagagttttactttcgaaggatttatctgaactgaaaaccaagcactttttgaagtttttggagaacttttgtatttacattttgatttatgttttttttttgttatctacatagatgtatgtacaggtctaatttgcttggggaataagggggtgaagtacttgtatgatatgatttgataatagtagtgcgattattctgacttgtgtgaatggaattggaattttgctctctttatttactgtttgagaggttttgattgagactgcattattctgataatttattccccctctccccctctttgtcatataagctcttgaatatttcattgtgacagagtaagtagatggaattcttttaactctctgtttggctacagtggtgtttattgtttagttatttggctttttaatttactagtctacatttgagtttgcaaaagattctttgaaatattcttcatacctatcttgtcattctggatattttattatacatctaagagatgttttcatataaacaacaaaacaaataaatgctaataaaggctcacaaaagttcataggaaagtcttttgtggcctctctttgtattctcacattagttgtgacccattgttcatatcttcaaatgcttgaaaatataggcaatatgaactctctttctctctcttctttttttttccctccagatccttccacagtatttctctaggcaccttattatatgccttttctatatggactaaaaccatgcttaattcattttggttactccaatatctatccattaatctttgtagtgagtatattgaaaccatggttgacctccttggcataatatcaaattgatttttggtaatatgatctcttgtcttaagctcctcccattcaccctcgcatagctttgtagaatggctcatgagcataatcccccaataatttgaggctttgaatgtcaaccttgttctcatagattgggattaaagtacatctcccctcatccaacatgatctcaggcctcacaagtcatagttgtatttaacaactttgtcaatcatcatatgtttttttcttggcccttccatatctcaatagatatattatccagtctgccttgccattatccatcctcttcaatgcttcttttaccttagatttccaagttctatgatggaagttatagttttgttcctcctctctagtgtttagactatcagagtacaatataatgttgtgtcctttaaatagctcgtgaaagtaactctttcaccttttcttgatatcttgtttgctgacagactttatctcctcatcatccttaatgagattcccttggttcaactctcctatctttctttacctttaggaacctgtagtagattcttataagaaagatttcacgatgaagtttttttttcttctttttggaaactattactttttacttctgaaaaagtactaaagcaactttgcttgagtcatttttttttttttttttaagttgcataagttttaattggagtaaatgctttgtcataatctaggccataggttgtaacccttggggcttgagctaacaatctagacttgaaactctctatgctgtcatctgactgtactgaactgttaaagtccattcgcaccccactcgtctcttcctgtcaggtagttgaacaatagccctagtatgattttctggaagagctctcaatcacaagctctctattttgatgtcccatagccttctgtataattttaggaatttccaccttatccacattagttgcaattgtgtcaaatactgataaatgatgaaagattcgcatacgtaacataattagaaatgggttgcggtgtgcatgttcttctcattcagaagtttataatggggagatccaaatctgtataaatctgaggatctgctgtctctacacaatacagaataattttcccccttgccatgccctctcactataactatgttgcctcctctcctctaaccaactggctccacatcagcaattttaactaatgtgttcagcccagttgtaaggcttaggcccaaaccctgtatcctatcataaagccattgtaaacctttttcaatacttagatattttagctgtttattatcaaatttctttcactcaccaaagagattgagaaagacacaaatatattgaatattgtattcctactgtaggctggcagtcaacatgaaattatttgttaatcttttcattatactgtttggatctggaggtttttattgaaactgcattcagttggatttttttatccttattaactgttagatacttcagacaaataagatggaattctttaaactctgtttggctttgaggtttattttttattttttggcattatagttttctaatttatgttcttgagccatttaacttgttaacctaactagttgtgtaagtgaaatatgttgctattagtttgttaaccttttttattggttttgtaaagtgaaatgaaggcatgatgccatgatccatgccacatgaccaggttactttcatgtttaaaagttttccaacttgtatatctaaatgttgaattattttgggggtgatatacatattggataggaaatgtcaagtgtcaacaacagtatttttgagtataatgagtttatgtgtgtacttgtttcatacattcatttagggcttattctttaaacgtgttttatgttattttgtcatattattccatttccatgattcaggtatgtgaaaagagagcatcttattgatgttactgaggtgtttagggtacttaatgccgagaagaaatatcggatagccaaacttgctttatacttaacagttctcattgttactatcttcaggtttgtcacacccttaaaatagaacatgcttatctactgtggtttagcttgaatggtcttactgcttacattgtatctatttcttttttctaattaaggccttccattaggattcttgctgcaggaagagtaatactctacagttccaagtttgaagaattagacattcggttgaatcctatagggttctaggaaaattttgtaatcctcctgaaacatgcaatctacactgttctttagtagattatctcattaggaaattaatcatttcagatgccatggttttagtcttatagagattcttagaatcctgtaattacaatttcttgacaagcccctccgatatttttttcctctctaactctaattcctttggtctccaatattgatttaaatgagtgaagttttgtcaagtgaccttgattcattgatattaagtttggaaattttaattgtttttgtgtcattcttacacataagcttacacatatgagaatgcttgggttccttgtctacatgcattatgtgacctaaataaatcttcaaagtattttgtcctccaaaatccaaatctgaaaaatatagaacataccaaatgtaattatgcaagttaaaaagatttgcttcttttaagaaaaaaaggattatgaatttcttgcatattaatagaatcttattcttttaaaataattatttgagatattattagttatttactttctgaaaaaatgacttctgcaattaggggtgtgcacaggttgggttgggtcgggtttggctaaacccgttaccgaacccgataaaaaattttcaggttggattgggttgggtttgtgaatttttttttttacatatccgacccaacccaacctaatcataaacaggttaggtcgggttgggttaatggggtctcaatatttaaaagaaaattattttgtaaaatttaaacctttttagagtaataatttgtttttttcctaaaactttgtaagtatataatgactaaatgcactcaaaagataccaaattgtgataatatttgactaaagaattaatgattccaatggtaatacaatattttaattctatatagaaataaagtattatattaacatgagaaaacataaaacaaaatcaaaacaaagataaaaacaacttattgccatttgagaacttctggggcataccctactgggaaactcctctctgagttgtttgggcccattgtacttcttttattgccgtttgacaactattcttgatctaaactggttggatccattaggtttgtcacaatgaatggaccactttttggtgatgatttccttttccaatagatgccataagcttgagtccaggccttgagattggagacatgacccaacaattgcacatagttgacagcttctaatccaccatggtgatactttgttgccccacagctcctccttgatgcccttggccagattgttgacttcagtcacttgcttcaaatcttgtctcggacagtcgaacctctcaagaagtaaccaagaagctaaactttggccaactcagccatttgtgccaccaacacttcaatattttaatataatcctccacaaacccttttgcctcaaggtggataatcactcatgcactgatcctaaaatacactcctcaaatcactgttagttgcttctaagaaattttgggagacttcttggcttcttttacaagaactgtgttaaaatctcacaacaactagagatatgacttatgtagtccttatagggctgagatggttctcaacttacaagctggttttgtgggattgagttagattttaagcccaagttctaagatggtatcagagcttatcctaaattctttattggacaacccgtatttgtctatgttctagatgtccattcctaggtgtgaggtgttgttattgagccacatgcatttattcatgctctagatgtctagtcatgggcatgagagggtgtgttgagatctcacattgactagaaatatggctagtccttataagttataaatcttagccaatcttcatcatataagccacttttccaactcctttctatctctccttcatgggtctccctgtgcgctacccctagggaccctccttttctgtagagcctcccttgatccatgggaaaaaagagatgagaaccttgaattctcctaattcctaaatgtattttggttataagcatgttgctaatatgtggaaaagcaagatagctttttataatttatcaaaacaataaatatttgtctgtgtgtttttattttactgggactattgtatcctcctatttcttaacttagggttttctgtgtctatccatcttgtatctttttgttataaaccatttcagtcagtattacgccaaagaaatttaaacatgttctcgcttgccttttttcctcctttttgttcttatggtttttcttaaattgtccttcccttgggaaaataaaatggacaatttcccttctggtatctgaaatattctacgattattcttgcaagcttcattcttcatggctaaatatttataactccctcaaggaacctgaaggtcaacttttctaccaactttctatttgcaggcttacattaaccgccgtctactatttaggcatcg

SEQ ID NO: 2495 - DNA, 6845 bp, Glycine max
  Intron number 7 from transcript Glyma11g29290.1 (locus Gly ma11g29290) derived from phytozome v7.0 (chr-ID Gm11; pos 29866229 to 29873073)
acacaattagaagttttgcgagccaacaataataggtattatttaaacctcgtacttgattaagtatggatattttcttgtaactcgtgcaattacaagttttgtaacatctcattttttaaaataaattaaaaaggctttttagtaaaaaaaataaagttttagaaaattgtgaggtttttataattaaataaataaagagaaataactgtattaaaataatgattttgaagaaaaatatatatttgatttattcatttgattagaaataaaatagagtttcttttataaaaataataaaaataaataaatagagtaaataataggctataagtatcctatctataaatagaggtatcttaggtcagtttttagactgacgatactctctacgccacctcttcctctcaataatttcgttttcccttctcctccttccaaaactctctttttcccgcatattatcaaacctgtcccagaaaaataacgatctcggactcattcaccgatggatcgtcgtgaaatttgagcatcaggttcggaactcatttctgaacattctcaccgttgggaattaagaaaaactctctgagctgagagaaatatcctttgtatcatagttttttcttttcctgcagaaacctaaaactgtctcaataaaaccactatcccagactcgttaatcgttggattgtcgtgaaattttgatatgtggttcgcgtttcacttttgcacatcttcaccgttgagatttgcaaaataacatctgtggagggagcaatactcatcgcacgtagacagtggaatggaggtttcagtctcttctccttctcgtttgggaaccctatcagagcagtcagaggaaaaactaaaggaatctcaagaaatcgctagagatgtcgctattgctgtcacaatacacacgtgagcccgcttagaggtaagggatgtgtttatcgcaattggggttagaatgaacatgtgtagggatccttagaggattaaattaggcttattttgggatgtttattaaattgcaatttttcctttatgattataaatacaatattgatgtcctgatgcagagtgctcttggtgttttcgttttttatacctatgattttgattaattgattttgatataattgtgtgaaataatttgaagggttttactctccatgttgtgataaaccttttgtataaattgttatattaagattatgaaatggtgattcaaattgtgagtatgtgataaattgaacatgtgatgaatggtgaaatacatgtatattgagatgtgtgtattgagttgtgagctatgaactgtacaatcatacaattgtaagaccctttaagggcgactagtttttgcgcgacgagtattgtgatgggatccattgtgcggacccgacgagtttaatcacaagcgcgacgagataaaattattttgaaaacaattgaagagtcgtgtgtattgcatagttcataggtaaagtgtatatgatttgaggtgtgataacgtgtaaaattgggattataccattgtgattgagatcgagcgtatgtgataaattgagtatgtattgacttgtaatatatatgtgcattgagatgttgtgtgcattgagttatgaactatcaattgtacaatcgcacgactataagatcctttaaaggcgacgagttaatgttaagaccctttaagggcgacgagttaatgtgcgatgagtattgtgatgggaaccactgtggggacccgacgagtttaaacacaagtgcgacgagataaaactattttgagatcaattgaggagtcgtgtgttttgtatagttcatagggtagagtctgtgtgctaaaatgttttctgggttggacctgaatcaggaaggagaggccctgacggactctttgaagtgtaggccttgagggtaaatacacacggtttgagtgctcctttaagcctatgttgatctcatatggttggagcattctcacaaaatagtgtgaccctaactggtctccccatgattttacctagtgaaagtgacctgacttgctagtgtgtagtttgtcttgtcatgtactcctaggcgcccgacgagatttttcactgacatgataccacattgcatataggattgagtcttagtgtatctgttgcataatgtctgtgtattgatcgatatggattgatttagcgatattgtgttttgatcattgagtacgttaatgtcgtgaaaacgaatgagacatgtgtggtgttgtgatgtgatgttgtgtgacaaagtagtgaaataacgtgagctatgcttaagtaagttgtattttgtttatatgatatttatacctatatgttgtctggtttctctctattagttaggaatgtgataactcactccccgtgtgttatttgtgtttggatcctgtgatgatctcgaactgtgttcgtggtagtagatgattaggtggataactatgaagaacctcatgctagaggacacaggaacacaatgctctaataggatgtgacattagggtataggttcctatattaattgcataaagtcttagacgaccttgttttgaatcgagatgatttattatttatttggacaagttttattatgatgttagaaaagtgaatgtgagccttttacccttttgaaaaacttgtatttaaatgtgttttaaaaacttttaattaattttggtttcttacttcttttattattagtatatatatgtgagggatagaaagcgtcacaagttttgtgaaatcggtaagaccatgttaaatcattgtcctgcacttgacttgtttatttggttcatctatttgatttatagtggtttgagcaatttgaaggtagcctttttaattattttagaagtgtttctctccttcataggcatgtaataaatttgaatgtaaatgatagagaagatagaaagcaagcctaaatttgagttaatttttcgagtacctgggaattttgtacacacacacaggtttagtgaggtgaacattcaagtacagagttagcacccacgattttcccattagaagggagatgcatgcagtgttattaatggtggatggcagaaggccgaaattccatcatataaacacaagattgtgccttatggcaggcttccattcataaattgcctatggtggttggcaaaaatttagtcacgccattccgccatggacactacttaacaacactggatgcatgtaattttggtatagcaaccatagggttgtctgtaattaactatgtaaaatacatcaatttgtaacaagtgcagccttaaaaggaaatgaagaaggaaaaggtgagaccaaagcaagaagacatgtggcaaatgaggaaggagagaggtgtagcatgagggctagaataactaactttaggctgactgattttgtgtggtcccaaaagtagtttaagaagccaaatgtgaaagagagggaggcagttattatgtgatatcatttccttcttctttggggtgccagttactttctctgttattcctttctacaattttgtcattgtacttttgcaatcggcatttttaatcaatacaactcttgtttccatttccttttcttgttgcttgtggtatcactgttacatttggtgctttcattcttcgaacatggcagataatacacgtcttaaggagctttctgtgaacatgtccaagttgctcgagatgttagaagctgataggcaagagaacaaagctcgatttgaaactctagaggctgcgatggacacattgttgaaatcgaacaacaactctggtgcaaatctgcacatgaacatagcgggaaacaacatttcctcgtttcgacggatctgaagttcttcagtggattttcaaggctgagcaatttttttactactacaacactccggatactcaatgtcttaccattgctgcaattcacatggaaaaagggatagtttccttgttccaaatgactaatcaatgtactccatttcagtcatggattgattttactcgtgccttagaactggaatttggtccatctccatatgaatgtactagatctcagttattcaaattgtcacaaataggatatgttcatgattattacactcagttcactgttcttgcaaaccgcgtacaaggtgctactagtgaagctttgattgattgctttgtgggaggacttaaacctgatattcaacatgatgtaatagcccaatcaccaactacactactacgttgtgtatctctggccaagctatttgaggaaaaatacttacccaagcacaagccatttcaaagtccctaccaaaaccgtaaccaaaacacaaccccaaacacaaacataaacacaagcctacctttttctcagtccatcaaatccacaagcctaccacccttacttctaagctccaacataaattacaattccaaatttccaaaaccaggaaatgttagatgtcaccagctgaaatgtagattcgaagggagaaagggctatgttatacatgtgatgcgaagttcacttcttctcataggtgtcttaatcgtcaatacttactgttgcaaatggatgaggatgaaaatgttgaagtgcaaccggatccacctcctagaattgaggaagccatgggaaatttgaatttagaccatcacctatcttataatgcccttaaaggttcctcggacctaggaactatgaagtttagtagtacaattaatggcatggtggttcagatattacttgatagtggtagttcagacaactttttgcaacctaggatcgctaattgtctaaagcttccaattgaacctgcttccaatttccaagtccttgtgggaaatggaaactcattagttgctgaaggtttggtgaagtaactagaagtcatgattcaaggtcattctctcaaattacctgtgtacctcctaccaattgttggtgttgatttggtacttggagccacatagcttgctacattgggtcctcatgtttctgattatagccagtttaccttgaagttctacaaggacaatcagtttgtcacattacgtggtgatcaccctaaattactgagccctgctcaatttaaccaactgaggagaatgaatcatacacatgttatagctaaagtttttaccttgcagaataagcaacaaatatgtgcctcaggataaatgactcgaattacctaaagatatgtaaccatatttggtgatgttgttgcataattatagaagtatctttgttgtgcctgctgaattacctccttcaagaacgtagaaccatgccattccattggtaaaggatgccaaaccagtgaaggtgagaccttatagatatccccacagtcaaaaacagtagattgaaactatgttacaggaaatgcttattgcaggcatcatcacacccagcactagtccattttcttcacccatcattttggtaaagaaaaaggatggaacgtggcggttttgtaccaattatagagccttgaatgcaataacaattaaggacaacttcccaattccaactgttgatgaactcattgatgagttatatggctctaattatttttccaaacttgacttgagatcaggttatcaccaaattctcgtggctgttgaggatagacacaaaattgcttttagaactcatcaagggcactatgaatggttagtcatgccatttgggcttaccaacgcccttgctactttccaaagcctcatgaatgatgttttcaaagacttccttagaaaatttgtcctggttttctttgatgatatattagtatacagttctacctggaaagagcatcttttacatttggaactagtccttcaattgttgtagaagcaccagttatatgtcaaactatccaaatgttcattcgggttgccaaaagtggattacctgggacatattgtttcaggccaaggtgtgtcaatggataaagacaaagtacatacagttttggattggccaacacctgttaacattaaacaattaagaggctttctcgggctcactggatattacaaaaaatttatcaaatcttatgcagtaattacaacacctttgactaatttgcttaagaaagataaattcctatggggagtagatgcagatgaagctttcaacaagctaaaaaatgttatcacacaagccccagttttagccttaccagactttttgaagccttttaccttggaaacagatggatctagaataggtgtaggtgttgtactgagtcaaatgcaacacctcattgcttacttttcaaaaaagttgaattttagaaagcaaaaacaatcagcttatgcaagggaattctttgctattactgaagcaatagcaaaattcaggcattatttgcttggtcacaaatttgtcatcaagacaaatcaaaagagctttaagtcactcactaatcaagttgttcacacacttgagtagcaaaactggttgcataagttgattggttatgatttcaccattcagtataagtcaggaaaagagaatgtagttgttgattctctttctagatattttatgatggctatatctcaacataagttatagctgattccagaattgagggaagcccttgcataggacaaacaattgagtctaattatgtagctttgtttgcagaacaagcctccaaatccgagttattcgatttttgataagttgttgtattggaaaggttgtctggtgttaccacgaggccatgaagtagtaaagaaaattttgtatgagtttcacggtacattgttgggaggacactctggatttaccagaacattccagagaatt

SEQ ID NO: 2496 - DNA, 832 bp, Glycine max
  Intron number 10 from transcript Glyma07g30580.1 (locus Gl yma07g30580) derived from phytozome v7.0 (chr-ID Gm07; pos 35558060 to 35558891 reverse strand)
gctacaaggtaaatttctactttgcctccttttggttcagtatgtgcctggcagaaaacggtaaacaggaaaataggtatcaaaatggttagcaacaagataatattgtaacccaaaagatagaacaaacacttgccattggtgtgttggacaatgagtttcatttgtaaaataccattgataattcttgcatttgctttcctaccaaatttcttgggtgcaattgtggtaaagtcaaaattatgtgattagtagctttggaatacttgtttttgatttaaatgtatgcagtccatgtgggacaaggttaatgttgttatttttgttgtatgtagtgtatgattatctgttttagccctttattataggaaatgatcattaattaataattattttggttgtcgttaagtatccactgtcctctttttttgtttctttattaagtatagccatatctttagaaattcaactatcaatgcttgaagttcatattctttaaatttgttatttgttatgaaatctagcctagtattttgttcaaataggtggttttgtctgactacttctgactttatcatgcttaatatcttggatgtttttgtggcttaagacaactcaaagttgtgtttatactttttataccatgaaaagtagtttcagtcttgagatgcagaacagaaatgaaatagattataccattataaacatcggttgctgggggtttatctttttgtttcatatttttcttgcttttgtttgtgttgatttgggtttaaatcatgtcttgacacagagggcaattgtttgttatggcaggtgtgcatctttgcat

SEQ ID NO: 2497 - DNA, 2842 bp, Glycine max
  Intron number 4 from transcript Glyma03g32900.1 (locus Gly ma03g32900) derived from phytozome v7.0 (chr-ID Gm03; pos 40629090 to 40631931)
ccacactcactaggtgaatcctcaaagagtgagttgtgaccctcacccctacaataattgtcatcggattcattaataggtattttgttttttttttaccaaaaatacacatatataaatacctcaaccttaatattgccacaatttataatacacctcgtcataggaatgagaaacggaacagctccgtcaaatttcattttggtgtactttagtcaacaaacaatttcgttgttacccgttgaactccattcatgggatcaccaatcacacggagacgggtgtccattgttgtaactaaataatggactttaatctcattcccctcgacgactcaaatacttgttgacatgtcaatctttttgtaagcggatccgcaatattattttttgacctgacaaagtcaagagaaatgacatcatgagaaatcaaatttcttatagacttatgtctcactcttaagtgtcttcttttttcattaaaattttgcatgtcactttagatatagcaatttgactatcacaatgcattgaaattggaggtataggcttatttaacaatgacaaatcacataatacatttttaagaaattcagcctcactagtagcagtatttaaagcaataatttttgctttcatgtgaaataataatttgtctaatagattttcatgatactgcacaaccagctaaagcaaagacatgaccacttgtcaattttatttcatcaaaattagaactttaattttgtatcactaaattcttcaattactttccaatctaccaactgcatgtgcaatattagataggcctagaaaagtttgtcaaatgcaacaaagaaccgatactttgagaatatttatgtgaagaaatttctttactcaaatttttttttaacttgatggatgagtcacaaggagtaaaaacatgtttcgtatcaaaataattaaacttcttcaatagcttttcaacataataagattgggtaaaaaatcataccatcatttttctctataagcttaatacccaaaatcacatctacacaaccaaggtctttcatatcaaaatttctagacaataaaaacttcacatcatttatgaaattcatttactaccaactatcaatatgtcatctagatatataaaatgacgcatccattatcatcaaattgtttcacatgcacacatttatcactaacattaatttgaaaatcatacaaaagaataacttaatcaaacttttgtgtcaatgctttggagcttgtttcaaaccatacaaagatttaacaatttatttttcaagaaaaaaatattttgaaagaaagtcacatctctagactccataatagtaacattagaaatttcagatacttctgaattaataactaagcatctataagtagtattatgtaaaaaatattcaacaaaatataattaatattttttttttcaattttccttttcttattaatagggatattaacctttactagacacccccacactttaagatatttcagtggttctccttttctccatagctcataaagatttttcttttgtttataaggtactcttttaagaatatgacatgcaaaatataaagcttcaccaaagtgtttattttattatttttatgttttatcaatgagttatatatataaagagacaatcagtcaacatgtagcaacaaaatacttgcagtaataataataaaattaaacaatagaaattaaaaaatcaaacaacaaacgtcttgattttaaatacttgtgttcacatgatcatttgaccaagtaaaagataactttttaaggcaggaatgaaagtactgagatgcttttagtatttttttttcacacaaactaattctaaaagcattttatcttaaacaaaaatacaattgacaaagaaaatattttttcaacaatctcatactaatttaaaatttcaggaaataaaataatataataaaaacatttttaatggaacataatgcattgcattttcatccattaatttttcatgcttactagaaaggaactcaatcatattgacgacatacatttttgataaaacagaatgctattgtagaaaagactatgcaagaagaaagtgataacgctttttctctctaaaacatttttctctctaagactgttggaaaataaaataaaatgaaggaaaataaatatgaagaagatgcacagtcttgaattaaataacaaaatagcagtagcaaattaaatttaattgacaacacataaataatgcattatatcacacaatgagcacaaggaaaaattaaattaagggaaagaattaaatagcctgggttgaagcgcgtaaacgctatccttagagagaaaacgcccccactgcacgggtaaaaaattctgattgcgctcctctcccaagatacgacaacccgttggttccgatcgtgtgcagcgaaaggatccccgaaccttatgaacaccaatgctcttgctctcacaaaaattaagttttgtataggaaaagaaagagataaattgttggcagaaagaaaccagagctctcagtctatatctctagaaaaaaaagaggaaagagatatatatataggcattttgcaacaacaaaatatgaccgttagaaatatgaccgttgaaaaaccaacctacagttgtcacaacaaatataacaaactagtttgactcattaaaacaaaatcttaagagaatctaaaataaatattattttataaaatagaattaatatatatttataaattttaaattaaaacacaaatatttaccaacacatggtgccggtgagagaatccttgacgcttggagtgtta

SEQ ID NO: 2498 - DNA, 2164 bp, Glycine max
  Intron number 1 from transcript Glyma10g01710.1 (locus Gly ma10g01710) derived from phytozome v7.0 (chr-ID Gm10; pos 1239873 to 1242036)
cttctttgtgggaagcaatcggacgggtcagcttttttcttttgtttttaaaatgtttgttagttaagaattttttaaaaatctattaatatttcactataatagttcattaattcacacaccatattctaattttgaataaaaatactattttatcgtataatttgcataattaataattctgttaagatgcacattatcttaaactatgcttgattgatgtgaaaaagaaaagaaaataaggggaaaattgatcaaatacaaatttaatttagtaaagaaattgaagaaaaggaaaaaaaaaaaagtaatgtagatttcacgcattttttgtttctcaccactttagtgaacaaaactgaaaaaatagagtgatcagtgagacttttcttttatacactcacatctttcattaattcattgctctctctctctctcttttttttttttccggtaatacaagtcgacttgggtactttagagtttagactccagataaatatttgcattaagacattttaaaatgaataatatattttctaaaatgacttttctcgcttttttgtgatataaaattagttattaaaattgtataatcaggttttaaaatcatttttttatattcatgaaatatttaaatcattaagtatttctgagacacatttgaatgtaaataagatttagttatttttaattttaaagaattaatattaaatagtaacactagcagtattgtcattgtttgtccagacattgatttaattctctatcttgactttaattttatgctcaacaagaatctaacgcaaaccaatgactctaaaatgctcagaatagcctattgaaagagcctcactttctttacttcaatgcttgaagtaacactgggtttggtaaaaaaaaaaaaaagaagtaacactggatttgaatgaaatttcagaactgaccaactgaaaatgacctatattaagaaccgaaaattattaattttgatatgaaaccaaatatttttttctaaaaagatttgtgttcggtattgattttgaccagaaactaattttaacaactaaaatttgtagttttttttataaaaaaaaactacaaactttatttcataagtgaattgatagcattgtttaagagaatatacttattaatagaaaaaataagaatgtttattccttaagtaataaaaaacatttatcatctccctgcgacgtacatagaagatcaaatttttttaaaacactgttagatttttatacttttctacttaaatagtaaatgcatgtttatgaaaaatgaattatcataaataagttaaactaatcatacaccaggatttgatgatgccgtgcagtgtgctccaggaaaaaaaaagttggtgttttcaaccaaatgaattccatgattagttcatttttttattttttatttttctgttagactttgtgatattggttcccctctcgagttccataccactgtgacattgcatgccagctaccatgtcatgttacccaagtttgtcccccttttatagcaacttgcaaataagggttaagtacgaaaacgagcaaattttttaaaaaattataaaaatgggtaaatcatatttttatttgtttaaaatattttttccttaaaaactaaaatcatatgttaaaataagatttcagttttttttttctttttctaatgaaataatatgcaaaaataagatttctaaaataatttaaaaaatgttacaatcgaattttaacatacgatttcaacttttaataataaaaaaattaaaaaactaaaatcatatatgcatatccgatttcgtaacaattttctgcaaaacaaaattatgctttaaagcatcattttttatgataaaattgtacatcaaagtctgatttatccattttcataatttttttaaaaaatatccattatagtaatttttttaaaaaattatatcattatgatacaagagcctgcaaatgcaaatcatgccgtgccagtggctgagttacgaaccctttatgcacatgttggatacagtttcaatatatatatttttttaaaaaaaacgtattgtttttaagttaataaagtaaaatagatgtctaacatagcaaataatgtgcaggttgcctcggacgaagcacgagca

SEQ ID NO: 2499 - DNA, 2034 bp, Glycine max
  Intron number 2 from transcript Glyma15g24750.1 (locus Gly ma15g24750) derived from phytozome v7.0 (chr-ID Gm15; pos 25892648 to 25894681)
tgtgtgtgcagggttggccaatctctctatctcaggttagagtttctctcctctctgttggatttgaatataagttttttattttattagtatgtttactctgcctgattatgtgtttttatgatgagatcagtgagggtaactcttgttctgtatcatcgtattttgtgatttcttgtgaggtattaatgacggcctgtgagcactgcaagctaagaagaaataaaactcgaatagtaagatgaagctaaagaacatgaacaattgctaatagctgactatttggagcatgaacaagttagatcagctaggtactccaaaattggaaaaatattgttgtcctacacacatatccaataccgaagcacatacagtaagcctagatagatacatatggctcccaccgacatttctaacaaaactaacaaactaacatttgtccgataaaaaaaaagatacatatggctttgataccacacatttggcttatcaaacaaacatacaatatattgttattgaaccccaaatcttcttttactatttcttagttcttacgtttcattttcatagcaaaatgagaaagggatagagctcgcttgtcttgtacatcttttttgggtttctctcacacatcatcatacctcttctagttttgggtcttgcactttgtgtacttttttgtcttgcaatatcaccaatctcgcatgccctctagaatcacagatcacatctattagcatcctcttcactgaccattgaacaaatcacgtatatttgtagttgttcacattctcttcactcgattgaagtataatctccttcctctgtctcatccattttgcagcattttttttatatataagcagtggcatctaagccatattatatcttgaattttgaagaatcttctctattcctgtatctttgttgtatcgtacaacatacctgtactaagttttttgggttcttagctagacctttatgccatgtgatttgatctcttgatttcagttcaggtgtaacttttttcttttgctaattagttctctatcagtttagatgattagagacttataggttaaattaaaattttaatacctaaagattttttttttctttttcaatcagtcctcagtcctcacacttacaaatttgttcaaaataatccccatgaacactttctgttataacactgtcagttgcctaacctagtaggcatttctttgtctagtatgtgcttcttcttgtttagattttcttattatcttgaaaaggccactaggtgctcctttcaccagtatgtgctccattttttatttagtcggtgttcctttagatgctctctctctcactctcttgtggtaaaatgtccaatatggactatattggcagtggggactattttcaaaacatttgcaagtgtgagtgggacaactgatttgaaaaggatcaattaaactaaggtaccccagtgccacaggaacaggctccttgctttgtgaaggtatggggaatgtaattgtatgcggcatttctcttgtatatgcaaagaggttgtctccggatataagtccatgaccaaccggttaccaaggtgcaactttactgttgtgctagggcttgccctctgtgaaagtcaaataaaaaaactaaaaaaaggatatggtgactaaatgaaaatgagtaaaaactatcagcactaacattttaatttaatcaaatatatatatatatatatatatatatatatatatatatatatatatatatatatatttactatagtactgtatgtatactgttaaaggtgaaataagtagtagaggtgccatttgctttgaccatgaggaaatctaaatctgcgtcatctcagatttcttattttgtaattagtgtcatgaacataagagtatgccagccattaatcaagttcttgacattgtcatgctcaaatttgttgctaactttgctactgataacttcctagtgcatgtgaataaaatcatttatgctgataaacagattgtggaagta

SEQ ID NO: 2500 - DNA, 5288 bp, Glycine max
  Intron number 6 from transcript Glyma17g24400.1 (locus Gly ma17g24400) derived from phytozome v7.0 (chr-ID Gm17; pos 24729813 to 24735100)
aggtaaactttgttccttttattttatcttacatctgacaaaatgagtagttaaataaatagatgatatttattagttgataataaagttgtagttttcgtagtggggaaaatataaatgaatacaataaaatatggttatcttaattcaaataagttatagggaaaaataaacagtattttaaatttaaaaaatgataccatcatgaaacatttacttttgtaactattgtcatagtaagaaatttttatttgcttttcaaatagattcttatgcaatacacacttataaaatcaccatgatttcgaaacaatcaatataagaattggaagagagattgtatgataaaaagatcaaaacagttttaaagtgaaaatagtgtatcattatcactgacataaaattaagaaatttgaggaaaagtataatgttcccataatagtaataacaggtatcataaaagtagccaagcattttgttagcaagttagcagtgaccggaaatatatgcatatgttggaaataaaagattttatttctttgccacaccaaatacaagagtatgatcccctatttatactagaatagagtgaccatttgactaatcacataaatgcttaataccttattccaagatactaaatgctaatgaaaaactacaagacttcataactcacaactttgacttagtaacttacaacttttaacttagaaaattgcacaattataagactcataatataagcttagaaacttgctattattaattttctaattaatatctaacatcctcccttaattggaaaattcttctgcacaccaagtcttgttcgcaatcttcgaaaatcttcaaatttgagaggcttggtgaaaatatccacaacttgatcttgagtcttcacatgagtcaattctacttctttcttggcaatgcactctctaatgaaatgataccttgtatctatatgcttacttcgttcatggaacaccggattcttggcaagctcttgtgcagatctattatcaacatagatctttgtgttttccttttgcaacaagtgaagttccttcaacaatcttcttagccaaattgcatgacatgtgcaagaagttgcagctacatactcggcttcacaagtagaaagtgtcacaatggcttgcttcttagaactccatgtaaaaacacaatcacccataaaaaacataaatccggtagtactttttctatcatcaacatctcctgcaaaatcactatcacaaaaccccacaagcttaaagttattggagggagaataaaacaatccaaaatcaattgtacccttcaagtaacgaagaattctttttgcgacttttagatgagtagaggtaggagcctccataaagcaacacacaactcccaccgcatatagaatatcgggccttgtattggttagatacatcaaactccccacatgactcttgaagaccgtggggtctaccttctctccttcatcaaactttgataacttcaagccaccttccataggtgtgttcacgggattgcaatcaagcatattaaatttcttcaacacttcttttgtgtagctttcttgtgagacaaagataccattctccatttgcttcatttccattcccaagtaatatgacatgagtcccatatctgtcatctcaaattcatgagacatggaatccttgaagtcttcaaacaaatttgggttattgccggtaaagataaggtcatccacataaagacaaataaataagacatcaccattattaaaagctttaacataaagagcatacttatttttacaacgaacaaacccattgtcttggaagtacttgtcaatgcgactattccatgccctcggtgcttgctttagaccatacaacgccttgttcaatttcaagatatttccttcttgacctttgatgagaaaacccattggttgttcaacataaacattttcttcaagatagccatttagcaatgccgattttacatcaagctgaaaaactctccacttcatttgagctgccaaggaaataaaaagacgaattgtctccatgcagacaaccggtgcaaacacttcatcataatcaactccatattgttgcttgtagcctttagctacgagtcttgctttgtgtctctcaatctctccttttgcattcttcttgattttgaacacccatttgactccaattgcttcatgacctttgagaatgcgtgataactcccaagtgttgttcttctcaatggctttgatttcttcttccatggcttgtctccaccttttgtctttcattgcttcaccaaagtttaagggttcactgtcaacaaaaagacaaaacaaatcatttataacttcaatttcatcatataattcttgaatatttctcattcttcttggtctttcacttgaactcccttcggaagatgatgaggcttcattggttgaaggagttggtgaaggagctggagttgaatcatttggagtcaaggtttcttcatctctttctttaaagtaccggaaaaaatcataagtgtcttctttctcctcccaattccatgtgccttcttcatagaactcgacatcttggctcacaattgtcttcccattgtttggattgtacaatttgtagccttttgagctagcatcatagccaatgaacacatgtttctcacttctaccatcaagcttgaatcttccttggttgggtacatgagcatatgcaatgctcccaaatactctcaagtgatcaactattggcttcactccactccatgtttcttgtggtgtttgatctttgacattctttgttgggaaaagattggacaaataaacggcacatgcaacagctttggcccaaaattcctttggcatatttttagccttcaacatacatctagtcatattaagaacaattctatttttttctctccgctaccccattttgttgtggagatctaggaaccgttagagggcgacaaatcccatgtttttcacaaaattcattaaattcttttgatgtgaatttcccacctctatcgaatcttagagctttgattacataaccactctccttttccacaagagctttaaaatttttaaaagctacaaatgtctcagatttttgctttagaaaataaacccaagtcattatactataatcatcaataaaaagcaagaaatatttattgttaccacatgaaggaggattgattgggccacacgcattggtgtaaacaagttggagagactcctttgctcttgaattagcttcttttggaaaactccttcttgcatgctttccaaggagacatgcttcacacaattgattaggatggttgatgagagacatccctttcaccatcttctcctctcctaaagattttagtgctccaaaattcaagtgcccaaacctcatagccaacgtcatgattcatcttttatgctagccttcaaacattttgcttcattggttttaatattcaaagtgaacattttatttcttgacataaacaccctggcaatcaaattagaattttgatctcgaagtgataaacaacaatctttcatatgaatttcataccccttttcaacaagttgtcccaaactcaaaaatattgctttttagtttagaaacatagtaaacatccgtgattaatttgtgagcaccatcttttaaagaaattaaaatgataccttttccttggatttacaccttggaagaatctccaaaggaaacatttcctttcaccttctcatcaagttccacaaatttctctttgcatccacacatgtgattgcttgctccattgtcaagataccataagcatttgtcttccttctcaccattattaagtgatagcagtagtgttggctcttcaacttctttatcatcaacaagattgaccctctcttcaacattagttctacactcccaagagtaatggccatatttatgacaattaaaacattcaacattagatttatcatacctcctttcatatgttttttcataattgtttctacctcttcctcttcctcttacacgacttctagtggattgatggctcctccattcattattgtcaaaattatcacgatctcctcttcctcctcttccttggccatgacaacatccacgaccacacatcctcttccacgtccacgtgctctttgactactttctcctccattttctttcaaagaagctttggctttgaggacttgctccaatgactcatcatgtcttttattgaacctttcttcataggcttgaagagaacccatcaattggtctacggtcattgagtctaaatccttagactcttcaatagcacaaaccacataatcaaatttagcgattaaggagcaaaggatcttttccaccacacggacatcttccatattttctccataacgcttcatttggttcacaataggcaacaccttattgccaaaatccgagatagattcggattccttcatatgcaatgattcaaactctctacgtagagtttgtaggcacaccttttttaccttatcaacaccttcaagggaggttttcaaaatctcccatgcttctttggatgtggttgcatttgacaccaactcgaacatagcttcattcaaaccttgatgaatgaaagcaagtgcttgttgatccttcttcttcgacttcaacaaagtttccttctcatttgatcacaaagtagcctcattttgaggttgggtataacctttctctacaatctcccaggcatcttgagaacctaacaaagctttcatgcaacgacaccaattatcataattccctttggtaagacgagggaattgaaacatactcaagccattgcttgccatctctcaacttacaaagtgtttctctctcaacactctagaactcaagctctgatgccactttgttggaagaaaaagattttatttctttgccacaccaaatacaagagtatgatcccctatttatactagaatagagtgaccatttgactaatcacataaatgtttaataccttattccaagatactaaatgctaatggaaaactacaagacttcataactcacaaccttgacttagtaacttacaacttttaacttagaaaattgtacaattataagactcataattataagcttagaaacttgttattattaattttctaattaatatctaacagcatattcatctcagtttcaatacattattcactgaattactgtttttatcttttcaatttcaggcctttttctcttcta

SEQ ID NO: 2501 - DNA, 5670 bp, Glycine max
  Intron number 3 from transcript Glyma06g46250.1 (locus Gly ma06g46250) derived from phytozome v7.0 (chr-ID Gm06; pos 48905761 to 48911430)
aggtaaggattccaatatttaacatcaaaattgcactttaactatgatcttcctcataacaaaaggggagtgaagtaaaacgtattctttcattaaataaattgtttctacgtattcttccattaaataacgtgaatataagaagattttaaaccgtttccttagtcctttgttttccattctccattacagaatctgcaaaagagctcaagtatgaaagcacaatccacaaagattattttgaccagttactccttgctgaactcaagaatgtgtgaataagagtgatgaaactcgggctccatctcttgaatgttgccgatcaaactgttaagaaaatgatatctggtagctttcattgatatgaaatagtgaataaatacatgatcttctctaccatctttttatgattatcaatgacaaaatatgagaacaaaatcacaaataaaaaggagaaaatatacaaagatttggatcaattataatttaaattgaaatcatagcgaatctctataattaatagattctgacaccccctctcaagttgctccataaacgtcacacatttccaacttctcaagagaattactaaaggtcttggatgctactgccttggtcaaaatatcagcaagttgttgttcttattttacaaaaggaaagacaataatagcatcttcaatcttctctttgatgaaatgtcagtcaatttccacatgttttgtacgataatgttggatggggttgttagcaatctctatggctgatttattatcacagtaaagcttcattgcattcttttgttgatatccaatatccttcaagagacttctaattcataacagttcatgtattccaactgtacccctctaaactccgcttcaacacttgatctagcaactaattgttgctttttactttttcaagttactagatttcctcccacaaaagtgaaatagttagcgatagaccttttgtcatctgctgatccagcccaatcaacatctgtataaccctcaactttgaggtgaccttgatttgagaataacaaacattttcttggtgcagattttaagtaccttaatatcttttcaacaacatccatgtgtggtttttttgggtcatgcataaattggctcatgacattgactgcatatgttatgtttggtctagtatgagacaagtaaattagctttctcactagtctttgatatcttcctctatttgcactagttgcatcaacacaatgaaaatttttgtgattttgttctatgggagtatcaattggtttacacccaagcattcatatttcagctaacaagtctaaaacatgctttctttgagaaagaaaaataccatgcttggaccttgaaactttgatccctaaaaaatatttgagatctccaagctgtttcatgtcaaatttagaagttaaatgtctctgtaagcttaaaatttcattaggatcatttccagtcacaatcatatcatcaacatatattatcaatgcagtgactttaccttgattatgcttgagaaacaaggtgtgatcagaattgctttgtgtgtaaccgaaaaacttcatagactttgtaaatcttccaaaccaagctcttggtgattgtgtcaattagtatagggcctttttaagcttacacaccaaagaaatatttgagtaccttggtataccaggaggaggatccatataaacttcttccattaaatctccatgtaaaaaaacatcttttacatcgaattgaagaaatgacccatcttgatttactgctagtaataataacaccctcactgaattgagttttgcaactggtgcaatggtttcttggtaatcaactttaaaggattgagtgtaaccctttgcaactagccttgctttatatcactccacacttccatcagctttatgtttgacagtaaatatccatctacaaccaactgtactttttccatctagtaaggttacaagttcccaagtagcatttttctccaatgcttccatttttgttttcattgcctggatccacttagaatctgctagagcttcctgcaaactactagaagtaaaggcagtagataattgagatacaaaattgacatatgactcttggagaacctttcagataacacatagttgtttatggggtatttgactttacaattaagaatgatttcatacttaattgggggtagttctctattaagacgaggtggaaaagtgtaagggttcattatagggtcagaagttggggtagaagaaacattgcattgtatatcagtactatcatctttgaccatattttcatttatattatattgaatcggatcctccatgttctcatctccattatcttgaattccatcatctgttgttgttggcataacatcaaataacttgatatcttggttaagtctatcatgattctgcatctccaaatcacccccctttgaggtgaagaataaagtgttttcaaggaaaaaaaatagttcatgctcatgaaatgtaacatccattgatacaaaaaatatttttgtagatggatgatagaccttatatcccttttgagtggtgttgtatcccacaaaaacacatttcattgctctagattctaattttgttcgctggtgaggatacaaatgcacatatatgacacaaccaaaaatatgggatggtaaattattgacaaaattaagggtgaaatgatgagaaagggcatcaagaggtctcttaaagtttaacacacttgagggaactctgttaataagataaactgcaaagcttaaagcttcaccccataagtaaaaatgaatattatcgtcaattaatagtgatctagtaacctccaaaagatgtctatttttgctctaaactattccattttgttgaggggaattaggacgtgatgtttgataaagaatatcaacagatttcataaaatttgtcaactcatttttgtagtattctccttcattattagacctgactatctttattagagtattaaattgtgtgcttatcattttgtgaaaaacttgaaaaatcttacacacattacttttgcgtttaagaagttataaccaagtcattcttgtagagtcatccacaaatgtcacaaaccatcgcattccattatgtgtgtgaagaagggcaggtcctgaaacatcagagtgaataataaagaaaggaacattagatctattgttatttatatgacaatgtttaaacaatgaaggaaataatctcttaagatagctaaaagatggatgtcctaatcacttatgccattgccaactatctcttttattctcagcttgtgtttcatcacttataaagtgagtcaatgcttttcctttggtatattgagaattaccttcaagatatatagtataatccttcacttcttttaccactgctaatcttctccttcgtatgtatattctgtagagtaccatatgtgggaaagaacaagaaaacacagttatgggactgggttaattgactaacagagagaagattgcaattgagagaaggaacaaaaagcacattagaaatggataacaagggagaaatggatattgtaccactacccataactgggaaagaagcaccgttagcgtttataatgacttaaacaaaactattagagaaaaactatgtaaacatatttctatcacaagtcatatggtttgttgcacctgtatcaattattcaatcagtacccttaatagtaacagaaaaaccccaagttggttaaaatgtaccaacaaattcagtagcagtggtggagttgtccttgggagacttcacctttttttcctttttggtttcatttaggataacatgtaccatcaaaacacttaggtgtaaggattgaagataaatcctacatatgtggagcaaaatctgattcatttggcctattctccattttcatactcagaagctaatctccaattcctaaaaaagaaagataattggagttgactttgagaccatgttaagaaaataatatatgatagctttcattgatatgaaatagtgaataaatacataatcctctttatcatctttttatgattattgaagacaaaatatcataacagaatcacaaataaaaaatgaaaaaatatatagaaatttggatcaattacaatttaaatttaaatcataattaattcctaggattctaaaactgtgcaaagttgtttgagttcgttggagaaaagccatggaataaaagagtttgtgtttctccatgtcggaggcgaggatggtcgttgtgaaaagggccaatagaaacaatctctggggtataggttttttcgttgtgtcttcggatactaaacggcacttggtagatgcaacacactcagtagttacgggtgcctttgtcccctccagcatctccttgatattgatcttaacaacatcgccattgtttgccttctagctagtgatcaaaataaccaaactccaaagtggttagattatttttttagattgaatgtctcagtagttacgtttgcagcctttgttttaatatctactaataaatgtctcatcactactatggttgacgttgacgaatacaaagtattcccaatttcagcagccctctctgttaaatgcatgtgaataacagctaatacccaaccttaagtccaataggccttgcaagcaaactcagcacattacatttacccattgggtttcactcaataaatatacaaaatgatttccaaaatttaaattggatcacttaattaaaatttggctcgtgggaacaaaaatattaaatcatacattcaactcatattttaataagataaaatactttatttcacaaaatacattcaacatagaataaaataaataaaatacaggtaaaattgaaaattttgatcaaaattacatattttttaaaatagaacaatcaatcatttctattttaaaaaggaggattaaatttgtgaattcaataaaatagaaagcccaaaattatattttgtagaatgtgtttggttttctcattggcaggtactaacaattctagaatgtgtttggttttacaaccggaatcacgagaaatgataattgattttaactatagcggagttttgttttatatatataaaaaatatagaacatagatgttaagtaaaattgattttatctcaaaaacttcagtttgatcaaaagtcatacgaagtaacttttcgttgagtcggagaatttaccaagttttatagctagtattcaagaccaaaacattcaaacacaaataactttacctaaaatttaattgacaaatgttaaacatactttctttaattatttaatatacctcttttttctatttttgttattaaattcatttaaataaccccaccactttccttccttccatctaaatattgtaaaacatgtctcacacatacaacattgtccacacaaacatcaaactaagaaccaccatcgacagggtcagcatgtgcctaagggactacttcatgtacatggtgtacccaactataagcagctatgctgtaatacatcgattatgcaaaggcaagaaattctcaggttttcaagataagatttgatgttgatgatgatgatgtgtgttgcgatgtgtgacattgaacaggcaagaaatt

SEQ ID NO: 2502 - DNA, 2292 bp, Glycine max
  Intron number 1 from transcript Glyma06g44880.1 (locus Gly ma06g44880) derived from phytozome v7.0 (chr-ID Gm06; pos 47690936 to 47693227)
aaagagatcaccactgtgtttggcagtggtgagtaatgagcaaattctcaaacttctgttgcaaattccattacctgcggaccagccgctttcacagtgtcgtcgaagttctccactccacacagctatacaacatcaaaaagaaggtaatccttctttacacaaaattactattattttaaaatgacaagaaattaatgttatattatcattaatttatttatagaatttattattgatcattaatattattaaggcttaaataattttaggtccttaaaatatatttaatttttgtcgagtctttaatatttttattattattattatgagtctctcatatattaaaagttttattttgaattttttttaatgttaaataatgatgagatataatttcaataattgatatatattaaaagagttattgagatgatattacgacatcatttaataaaacgataaaaattctaaataaaacttttaatatatcatagatccggtataacgaaaaaaattattaaacacttaaaataaaaattaaatgtatatcaaagatctcaaatgtatttaagtctattattaaaattatatgtgaaaaaattaatattatattgaaaaacaaataacaattattttggaatatttttttacacaataattataataattataatgggacgaagtgaatattaaagtgcttcatttatggtcgtatgtttgaataaaactttaatttccaatatatacttttttttagaagaattatgtacttgatgaataaacttgtaaaaagaattacgcaaatatgtttataccaatttgtattattcacaattaggttaggcgacaaaactagtcatgggttaaataaagttgaagtcttccgatttagaggtcagttcatatatagacttattttttgttaatatatatatataaacaaaaaaagtctattgatcaacttgctaactaattcgggtcaaataagtttaggaattgtctaacccaatccaagcaaaaataaacataaatattcaattaaattaatacatgcaagtagtacataagaaaattccaccaattatttatgatgaaactatttaacctcatttttgctcaaaataagttagataaccatataatttatcaacctattttatttaaaggataacctataacattcatgatttttttacaatgcatttcacactgtgataattcactcaacatttttattggtatgaatgcttcaacgtaaataatttttttcgagaccttaataatcagttttacctatttttataatggatgactgaccccacaaactaaaatgagattttttggtcttctttgttttcacttacatgctttttagcaaatttcctagaatgtcatccatccagaaattatttcaagcctaacacgcttaatcgtgaaatttttaagtaatagactaccaaaaaatatgtacaccttgttgatataaataatatcaattaatttcattaagtaatcaccaactgtatagtctcataactatacggtctctagatccctttctggtatgatttgtttagagtgttatatgctcaccagcttttgtctagttcttccttgaatcacatcatactggaaaagaaatttgctctaatatcatttataacatgttcttgattttttatttctcaacggcttttattcacattacggcatttcaagcgatgacactttattcaacattcttaaaatttgagtattacttctatcactttatgctacacctctatgacctttgtgagatgtagacacaatatttaggaagaatacaaattgattgtaaaatcttgataatttgacctttacttacaaattcttttatatatagttacataagtccaaattagatgaaactaaagttatttgttagcaacatactacattttttatgaagagacctaattctaatttagttttcttaataactggttcacattaaaatctagtcattaattactcttttgacatgtcttgattctcatattattctcctaagttaagataagaactttaatttttaagataagatatctacaattccaacataattaattcgtttatcatcccataatacaaaacataattcttcacaatattcgtaactcattcaattaaatataaatcagaagaataaaaacatacaccaacaactaaaatatttaatagtgtttaatcatgtcctgaaataagacctaactaatctattttactttgatttgttctattgtagtt

SEQ ID NO: 2503 - DNA, 814 bp, Glycine max
  Intron number 2 from transcript Glyma16g19250.1 (locus Gly ma16g19250) derived from phytozome v7.0 (chr-ID Gm16; pos 21222760 to 21223573 reverse strand)
gcaaacatctcatcacaatccaaaagttcgtagaggtatatttattttttataatataatgtaattatctaattgcctttaaatgtacttattagtgtcattaatcctctacagaactatagaacaaattctgtatgttttaaaccgataaaatcttcaaaaatattattcttgataagctgagttgaacaaaatttttcagcttaatagagattaacttattaagctattaaccttaaaagttagaggcctgtttatactagtgcacttgctactaacatgtgatcatgtggagggaatgtgactgattgaattacgtagataattctagctatttattacaattgtaatgtattttgtgttcatataattaatggaacttttttatgaattcaaataacaatgaaccttggtttggagctgaaacaccaagccaaaaccttggttctggtttagttttaaatttttgaggaatgatagctcaagttggttcgagtttaagcttgaagccaaaaaatcagtaccatggacgttgtgtcaatattagtcattatttccaaatctgtcaaaaataaaattaagcagccactaattatattatttggatcttatgaaagttaatctaatggcatgtcttgattgatttaatgtcttggcttggtttctattcctaatatactcttattctttttgaattgtaatgtcacagattaatgtcattgcgttatttaatccagttaagcattcaaattttcatttaaatttggtaatcctcatatttaatactctttcttttccaccctttaaattacag

SEQ ID NO: 2504 - DNA, 3143 bp, Glycine max
  Intron number 1 from transcript Glyma01g43050.1 (locus Gly ma01g43050) derived from phytozome v7.0 (chr-ID Gm01; pos 54160367 to 54163509 reverse strand)
gtgttccactcactaaggaaatcggttttcaccaggtctgttctctcctcaccctgcttctgtaatccgtactgtctcatgcattaattcactgttgtcataggatttgtgatgttaatattaatatcttttggtgtgggagttggagaaaggacaaagcaactaggtttccttttccttttctgcattggagtgagaggtgctgaactctcccagaatagaacagtagagctttccatttttactgttgttggcaattgccagcttttccgtaacttttttccccctcgacatcagtgaaccgtgtgggtggtattaaagataaaaagttttttttttattgttattaaaatacaatgatgatagaaaaataatttaccacaatgaaaacttttactttttttcttctattttttttcaaataatattaaatataatgagacatttataaattatcaatataatttaattaaattaaacaacatttacaaatattttttaaattatattttctttataaaatattaatatttttaaaagtatttttattttttatattttacgtatattcatagataaattatgtaagaatttgatttgcatgttatttattatattaatgaaatatttaagtaaattaaaaagataaagaaagaaatgaaattttggtgccccttaacggattagcctgaatgaatttacttggccgaattgacgcttttaaattcagtagacaccatcggagtataaaaattaagaacaaacctagctacagaaggaagaatttgaaaattcatagcactgcaatttcttttatgtatgcatggtgctattttttaaatgctttaattattaacgtattaaactatacagaaaatcagttgctaccgaacttgatcgttggtttaatagtaatattttgcatctaactgcaaatctcttacaaacaaaacacgctacattttgggatggtggttggtaacaactgcctcttcaatgttttcaaattcacataggtttccaaaatttgacttttatgttaccattcctttgcaagagctccaagttgagttccagtttaattaggtatctcctatttcggctttaaacaaattaggatccattttgggatgattgtaaatttttaatttttaatttttaaatgtaatttttaaaataaaatgtgtttgacaaaaaatggagttgaaatgattttttaataatttttgaaatacttttacatttattttcaaaacaaggaaaaaatatttgtgaatttgatttttagtttaaaaaaaatatgtatttcccacatttgataattacagttcttattgtcatcatgttgttactaccacaactaatatcattattattgtcactccaccaccacatcaccaacaccaacactaacaccaccgtcatcattatcatcgttgtcgctgtgataactgactgtcaccacaatgactatcaacatcgatatcactattatcattgtcattgacactagtagaggtgtttgcgggctggtttgagtcggttttagttaaattcatgacctaatctaatcaaatttgatcagtttggttcggtttgatttttataatttttttttgaaacccaacccatcatgaaccatttggttcgattcgggccaatgagttacccatttaaatttgatttttttcttcttaaaactactattttatatcattattcatctaaatatccaatacaattaacacaatattatcaaatatttgaaagtagtaaacttaattcatttaatgccatcaacataatattctaaaatgactaatacaaataaataaaatataatccattaatattataaacatgactgaaaaaataaatatgaaaaaaaggtaaacaaataacaatatacctaaaagtaatattttaagaagtccaacaatagttgtcccaatgcttgcagtttcaatacttggagtcccaatattagtatttaaaatcaaatcaaacaactctaaaaaattttatcagtttgattcgattttgatcggatctataaatttaaacccgtgacccaatccatacataaacgattttgatcgattcgtttcgattttgatccaaatacataacttacccaactcaatctgtttagatcggtttgagttaattcagattcgcagatgacccgtacccatgaacacccctagacattatcataaccatccatatttttaccactaccaccatcaccttcatcaatgtcatcaccactattaatgtcactactaacaacaataccattttttccattgtcacctcaactatcccattattgtcactgtcattatcatcattattgatattactaatgtcgttgtcaccatcattgttatcacaatcatcactggtacgactactgctaagattactattgtcgtcattgtcacacaaattaaaatagtcttaacctaattttaatatgatttgaaactttaaaaatgattttatttcgaaactaatcatattttaaaaattaatttaagatttttttgaaactaaaactaaaagttagttgttaattctaaaaatttcaaaattcaaaactaagaacaactccaaataggaccttaggttttgggtagttgccaggtccaaagttgtgcaagcaagaccacactataaatgatgaggacatgtgctgtttttggcccgtaatttggtgttgtatcttgaagggctagctaacggagacattgcaaaactaggcttggtcatctggattaattaccattctaaaaaaaacctaggaaatagaagtaaatatatatattcattagaagtactatattatatccaaaatataaaaagatgtttattacttatatgttatgtaataatagacatatttattttatttggtgaacaacgcatcattaattcaggtcatgatatttctttctgattttaatttgcagaatcagtgtatctcatggttaataatattcctcaaactttttgtttttgaagcgtgattcatgacttaggataagattttgttgttgttgttttgcacaatcaatgtagtcttgtttgctgtagtattttgcaagtttttacagcttttttttttttttctttacagt

SEQ ID NO: 2505 - DNA, 2463 bp, Glycine max
  Intron number 1 from transcript Glyma09g09100.1 (locus Gly ma09g09100) derived from phytozome v7.0 (chr-ID Gm09; pos 8599163 to 8601625)
tttctaacaagtaacaactcctatgtctcgctttctatgaattcatgcactttgttcccacaaaaccggtttttttttttaagttattattattttcttcaattacccttttgattttgaacaatttcttttggatgtgagaccgtgagatgaagaataagacagtggtttgtgttaattcgatggtttccgtttgtgtgagatgaaatagaggacccatatgctttcgggttgtgtggccatttaagaagtgatttttttttaaaaaaattaaacttatgttgtgtggctgaagggggttttgtttaattggagatatgtatagagaaggttgtttaattgggaaaaaaagaagaagtaaagatagtgggtttcaattgtgcttgtaagttgtaaccctacccttagttttctgatgaattgagaggattttttaattagacccatcttttggattaagtgaattaacctgagagatttgggatagagggtgtttgatttgggtaatgatttttttttccttttcaaggatgaaattctgggaaattgaggaggaaaatattttctagggcacaacaaccaacctagccttattcagttaatcctacgaggtggaatctgctgtgtagatcaattgataccattcaaaaactaaattttcaagggataatttggcagttggtcatatttaatggttccattgaagttttctttgatccactttactcattggaacctctgttcatcctctcacataaccaaaccacccacttgaagaaagtttatgtcttcgtgtccttagtaggtgccattccatttttctatcagatgtattcattcctagaatcctagtcttatgtgttcttgtttatccacgcattaccatcaatactgttattttcatttgttattatcattttttgcactccaggtggaatatttctgctacactgtacactgtagagtattgatgttttctttagctgtcttgtagaattttctgagtttgataggcactttattatcataaattatacctgaaacatttcttcatttaatccacctggtatgaatcaatattggtgacatctctaccagtctactaaatgtctcgttgtttctaaggagatgagtttgtcgctattctattgtgtaccagggactcattttgaagtcaatgcctttggtttagtttcataaaaaagcttttgtgcatatattttctcacttggataatggatggatccaattggaaagggagagttctactttgatgaaattaaaatttaaaagcaaaattttccttaaatctatgtctttggcttaactctgtttcagtttaccaactttgtaatggtctgagggtctttgcttgacaaatatgatacatgaccttccctgtcaaatttaataaaaaagaatattatagttcaaaatataaacccatattctagtatgtatttaaatactatctatgccctggctatggaacccaaattcaagtgcttcctagctgcttggcttcaagggcattggctggtggatcacaaattaagttacatctgattgttattgatttatgtttagaggtttggtttctgaaaataattaatcttaataggcattctttatgcagcattattaatgacaccaacatcgtgtagcatggttgacagataaccttgctccttatgcatgtggttaggggttcaattcccaggtttgtgtatggaaaaacatttgttaagagagattaaccattaaatggacttcagtatctcgagggattagtccttggctctcagccgagggataccctgggtcatccaaaaaaaattaatgggctttcactttccatattggtcaaggattttgctggagtgagggatttaaaaattgatgaagggaatcatactgattttttttatcagtattttggtgtgttttaaagggtcaataattaccaatagaacttgaaacttttgcattcatgttaagctgttaacattgatacatattttggtccctagtggggtaatgctgttattgttgttgttgtaagcaccaattataaagacacctacttaagttcatatttggattagcttattttgtgaggaaaaaaaacgtttttttttggtagcttcttgaaggatctttaaagattatcatttcccttgagaaaggctaaaacaagcatgcacttatactaagctgtttagagttcaaatgttcaattgaaaattaattcttcacacatctcttaatactaaaaaaagcttctcactttaaaatttagaaaatataagaggaaatttattagaactaaagcatcaaaggtttttgaaagtctaatttacatttccatcaagttcatgctaactgatgttttctcatgtgtgtttctgattggttgtttatttattattttctcttctaggtctgtgccagcatctggactta

SEQ ID NO: 2506 - DNA, 1023 bp, Glycine max
  Intron number 4 from transcript Glyma14g00560.1 (locus Gly ma14g00560) derived from phytozome v7.0 (chr-ID Gm14; pos 281722 to 282744 reverse strand)
tgccacaacagtcagaaatagtttattacaggtatgtttaattacttcaccgtgttagtcatctgtgttcaattagacctaaagtgttatctatgatatgatattagggaaactagggtggttataaaactatataaagtagtagatcttaactattttgggttgttaagtttaaaaagcttcagcttcagtttatttgcacatatggataggtgacaatgtggcagtaagatgtgctcttggtattgtttggcatcctttttgttccttttaaggaaaagaaagaatataaggaaaggattacaaagaatagatttccttctttcactttaccaaagaaaataacagagctgtccaatccctttttatatctgtccaagaaacccccttggaagaatccatgtgctgagctccaataagatgccatcagaacaataatgttctatatcaagttgaaggatatttaccttgaataaccaagcatctcttctccatcctaagacccaaatgacagtgtacaagacacccgtaaaactataccctctgcttctgccaaatttttttaattaatctcaagaaactgctcctggctattgggaaaaatccaaggcccatcaaacacactgaaaagcctactccatatgctattggctgatgggctgtctaataaacatatgcaattgattctgattttgaacaacatatacatctgctttttttttttttttggataaacaaagtatcatttaagaaaaaaagacatgtaaaaacctagaggataataaataaatcctgaaaaactaaactaaaaatgaaagggaataaagagaaaaactaagaacatgatacatgtaatgtaacacatcacaatctctttgtagatctaccaaagatacccctcctaaaaagacataaacatcacccttcttatgtctacaaaacctatgataaatcatcagccaatcactacttttctaattgtaatgtattctagctatttcatgcataacaggatctggcagg

SEQ ID NO: 2507 - DNA, 4426 bp, Glycine max
  Intron number 3 from transcript Glyma09g05180.1 (locus Gly ma09g05180) derived from phytozome v7.0 (chr-ID Gm09; pos 3963477 to 3967902 reverse strand)
acagggaatcatttgaagagtacatcgtatcaacggtgagttattgcaattattgatatgatatgattatccgattgataaatttgaatttttcttttgggtacgtgatttagtgataactgggtttgataatttccttctggggcatacttggttaaactaccagtgtcatttagtcatgtttaatattcttggccttatcttctttttttttttttttttgtgggggtggggggtgggggtggggtggggtggctgaataggagggcaaggcccagctacaaacacatcctacaggggaaagaagcccctataagttcctgctaaagaagcttattataagttgctttagattcatcccaaacatggagacccaaagtaagagcattagcaaactttgctaggcagtgcatagatttagtgatgagcacaatgtaatttgttttcattgtgcagtgtgcaacacaagattccagaaacagtagggcatgataccagtgacatcttctcttccttttaggaaaatgtgtatcctcaattaggtggttttcagagataaaatcatgttctggaacattcaaaccccaatgtgactagataacaatagttttgacttttaaatagaaacaaagagtgaatgttttggaagtgaaggaggcagctcgaaacaaagaacataacatagacaataaagggacaagaggtattttctaaatggagtggaagtactcaattcatattgtatagcagttattcagaccattgtccaatcctgctgaaatcaatcattgctaactggggcctgaagcctttaaagactctagactgctggtttcaagttaaatcgtttaggaagatagttcggggttgttggagacaactcagtacaagggtggggaggttttgtattaaaagaaaaattgaagttgctgtaatagagattaagtgtggaacaaagaatagtttggggatattcagccaaagctaaagagggcagagcaaaaactcaatgagctagaaaagaaaggggaggatagagacctaattgaggaggaaatcaggttgaggaaggagctgcaggaagaagtgtgggtggtagcgcactcaaaagaatcctttatgtggaaaaaaacaagaataaagtggttaaaggagggggattgcaattctagattctaccatatgactatcaattggaaacaccacaaaaacatgttgagggggatttttattggcaggtgttgggtagaggagtcgaatagagtaagggagaaagttaaacaattctttatgagaaggtttgaagaatcatcgtttgagagaccaaggctggatggtgtagaattcaagatcattaatcaggaggcaaatgcaaaattggtggccagatttgaggaggatgaggtaagggcagcggtgtgggattgtgggagttccaagagtccaggacttgatggactaaattttaagttcattaaggaattctgggatgtaatgaaaatggatgtcttgcgtttcttggacgaatttcatgcaaatggacactttccgaaaggcagtaaagcatccttcttggctttgattccaaaggttcaggatccacaaaatttaaatgattatatagctatttctctgataggctgtatttacaagattgttgcgaaaatcctaactaaaagactaaaaaaggtcatggctaccattattgatgaatggcaaagcgcctttatagaggggagacatcttttgcacattgtggtgattgctaatgaggtttctgatgaagcaaaaagggggaggaaaagctgtctagtatttaaagttgactatgagaaacatatgattctgtatgctgagatttcctcatctatatgctgaggcggatgtggttttgcgagaaatgtgatatggattgatgggtgtttgaagttttcttttgtctcagccctggtgaatggatttcccactgacgagttctctcctcaaagaggactcaggtagggggatccactagccccttttttattcaacattgttgctgaaggtctaacaggtttgatgagggaggcacataagaaaaatttgttcaaaggcttcctggcaggtagagatggggtggaaatcaacatactccaatatgctgacgacacgatattttttggtgaagcaaccatgcccaatgtgaaggcaatcaaagcaatgctaaggagctttgagttggtgtcggatttgaaaataaatttcgctaagagcagttttggggcatttgggagatcagatcagtgggtcaggtccgtcgcgggataccttatctatagattcttgtcattgcctttttcttaccaaggaatcattggggcaaacccaaggcatagtgagatatgggattcgattacctctataagtgtgagtggaaacagagaaacttatcttttggggaaagggtgactttgataaagtcaatccttaactcaatacctatttttttcttttcctttgtcagggtacctaaggtggtggataagctggtgcctctccaacaatcgtttctttgggacaaggttttggagtcgaagtatgggggatggtgaaacctagatgaggcaagaaggaaccacaatgagtaaatatggtggagggacttgtgttttgtgtggggttcggaggaggaaggtgggtggctcaatgaatgtgtgaagtggaaaataggatgtgggttgcgagtgaagttttgggaagataggtggagggaggaagggttatcttcgatggagaagtaccaaagactatattgcatatctcaacaacaacatcacaatattcaacagatgggcgttgaggtgggagaattgtcggaatggaattttgagtggtggagaatgatgttggaaggggagatgaaactagtagttagctttattgaggatattgaagagtttagggttcagcctaaccaacaagacaaatggatttggaagagggatgtgagtgggttgtgtactcagtgggaagtgaatatcgtttgcttagtgaagttgtgtcggatgagaaagaagacagggcattcacacttatctggaaaatgaaaattccaagcaaggtagcacactttgtttggaggttggtgagggataaactaccaacaagagcaaacctaaggagaaggaatgtgcagctagatgattacaactgcccgttttgtttgagtcaggaggaggaagcgtcccacacattttttggttgccaaagaattatgcctttatggtgggagagccttgcatggacagaagttgtaactgtgttccctgcatcacccaaggaacactttttacaacattcttactgcaaggcatcaggaatagtccaaaacagatggtggatttggaatcacagaaacaaaaatgtattctcaaataaggattttaatggacagaattgattaaggatgctattttcttttgctagatgcggcttagatatttagataacaattttgagctgccattccacttttaggccagtaatattaaatctggattcttgtacaagggagggattagaccatagatactcttttgtaatgggtattccagtgtacccagggatggggtttatggtattctaatatcttaagcatatttccataccataatcttacatagataacatgcatactgggatgtcctaatattagtactacttgtacagttgtactactgatatatatatatatattacatatttttgctgataaaaaaaggacttattttctaaagaataataagtggtaggtagttgcactggtgggcaggcttagagtcagatccaccgacaatggtatcagatttagactgagggagatgagcaagttggggatttgacttctgtaaaagtgagcaattcactgtaaaagtaaaggtaaggaattatatctgtttttgaaaaaaataaaatcaagggtattttaaacaacttcatttttcatagtttgctatacatctgcatgcattttcattacaatatcaaccactaatttttcaatttagtgcttataactcatcactttttcctcttatgtgaatctctcactttaaaaagcctaatcccaaagtttgattggtcttttgtcttataaagataccctttttttaacaccctaaaagcaatatctggttgacacttgacactttcaaaatcaacaattctgatagctgacatattccatgatgaattgatttctttttttggattgggggagttgtcatgtgacatttaatttctagtaaattttagtcactaaatttttaaaagtctgttttctatttttttacagttttatcttttactgttaatagttttgttctcaacttttcataaattagtatcacttttttggtccaggtattaccatctttgagagagaagc

SEQ ID NO: 2508 - DNA, 6448 bp, Glycine max
  Intron number 2 from transcript Glyma06g28570.2 (locus Gly ma06g28570) derived from phytozome v7.0 (chr-ID Gm06; pos 27070486 to 27076933 reverse strand)
ttccagaggtaagactaccctgtattctaatatatcttgcctagggtcattgcttatctttttgttaagttgtctgaatatcttgctgaaactatctgtagtttaacgtatatgctgtattactattgacctatgggtttgtttgtttcatgctggaagtcttcaaaatctatatgtaactgtatattactatcagtttgtgcagtattgtgttactagttttgctggaatattgtgttgctaataaaattgtgttctgtaaattttcttcaattggagccttataggtgagaaatcagctctgtatcatgcaatatttggcactttatatgcatgtatcttcactaaatcctcttagttcactttgtaaattgtaatggaattaggtgttctatcactttattagaaaatttaagaattgggtagaggaggggaacaaaataaagttgttattcttgttcttgaaatttcatcctcttacatgacgaatcaagttccattttggataatcaagggaagtttgtcttgcttcctgttccctcttcctgatgtttactgacattaagcatacgactattagagtagtataaagggaggtgcagtattcaactgcacactcacttaactatgttagtcactgagttagtcactcagttagttaagagtcagtaataactaattgttctagaactctataaatacttctctttgtaacagaaatcagttacccaatcataaaaacaacttctgattctaaagttctttctctcttttactctttatcttttatcttcttcagttctgttaagaactcttttatggtatctagagctcggtgacgatcatcaatagcgtcacaacagaatgcattgctttctgcttctttgttcctgaattcaatttctcacaagcttgaaccagttatcaagtcccatcgacttcagccatttgtcgcaaatccacagattccgctcttcttcctctctgaagatgatggtgacgctggcattgagaatccagcatatgaaagttgggagcaacatgatcaagcgctcctcacatggcttcaatcgacactctctacatcgattttatcgcgagttctaggatgcacccactcctatgaggtttgggaacacattcatgattattttcacaagcaaacgatagccacagctcgtcaacttcgcactcagcttcgagctacgacacttgcaggcaaatcgatgcatgagtttctgtcgcagattcgagcaatttctgattctcttgcttccgttggaagcctgattatgcttcaagagcatattgattctattcttaaaggtctttcgccggattatcatctgattattgtgattattgaaagcaaatttgaaccccagcctattgatcaacttgaggcgtttttattggctcatgaattgcgcttgaacaagttcaagcaatctttctctgattcttcctcaattaatctaactcaggtggcaaacaaataggatcctgaaagcttctccaattttcgtgggggttctagccgtggaggtagttacagtggtggttttaactgcaatggtggttgtcgtggtggcagtggccatggttgtggtgcaggctgcttcaccaattttaaatgtgaagtgcattacaagtatgggcacactgcttctgtttgtcattttctctttgatgaaaactatcagccaaattcctctttagttcttcgtgatcctacctcgcagaattataagcctcagaatcagtacaatagtgcttctggtcagagtagtgctgaccctaattctgggctgtattatggtgattctcgtccctcaaatgtctggaccaataacaattacaagtctgctaattctggaagtaaccccaaccctagtgctttattaaccaaggtccctaatcacgacttccacaaataacaattggattccagattcaggtgcctcctttcatgtaactggagagtttcaaaatattcaacaaattgagccttttgaaggacctgatctaattttcattggcaatggtcaaggtttgcccatttgttcctctggttcttcctcctttatctctctctataatactaaaatctctttatctcttcatcatctattgaatgtgcctcatatcactaaaaaccttattagtgtcagccagtttgctaaagataatagagtcttttttgagtttcatcctaaattgtgctgtgaaatctcaggtaaccaatgaggtcttgcttcaaggtaatgttggtcctgatggtctttacagcttctccaacatcaagcttcatcatcttgtgtttgcttcttttgctcttgcttgtatttcaacttttgaaaagtcttatgtgacttcatgcaataggtctgaaaagttcattgtaaatccatgtactagtactaggtctctatggcatgatcgtcttggtcatcctaattctcatgtactgtaattagcatagttgtgaaattcaatccggtcattggcccgatcgaggtagtggattagtggatcaatggtccaaccggtgggccagtaattagtccggtttgacttgttctatattaaaaaaatttaaattatatatgtatatattatatataagtatataactaacattaacattacttgattaagaaaaatctatccataattccatactccaaaatccaaaataataattgaagtattaaagttgataacacaagtgaagtgtattagtaataaagagagtgtaaatagcaactacctaaattaaaacataagtccagttttcaataaacaaaatgagccaaaagtccagttttccaataaacaaaaagagtgcggataaactttctgcactcccattattttttttaatgtgcacaacccaattcgagtttttaaaaccggccgggtcaccgggtttccacaaaaccggctgggtttggtcgggtcatcccgggtcacatgaatgagcggttcaatagcgaaaccggcccgattatgtcactgggtcccggatgaaccggtccgaccggctgggccgaaccgggtttcgcaactatggcaattagtctttcaacactgtaaaatacctacatctaataaaaattctgagtttttgttcagcttgtgcggtgggcaagtctcatagacttccttcctttccttctgaatctgtttacacttctcccctagagttaattttcagtgatctttgggaccctgcccatgtttcctcaatcaatggtttttcatactatataacctttgttgatgcatattctaggtttacttggatttatcttctcaaaaccaaatctgaaacctcaaatgtctttcaaaagtttaaggctatggcagaattacagtttaattccaaaatcaaaagccttcaaactgattggggaggggaatttacaccattaaaatcctttttggctgattgtggtattcaacagacttatttgtcccctcacccatcatcaaaatggggttgtggaaagaaaacacagacgtatagtggagttaggtctaaccttcatcatgcttctttacctctcaaattttgggattctgctttttgcacagctctatacttgataaatagattacctacaatatcccttaagtttgaaataccttatcatgtgttgttttaaaagtttcctgattacagtttcctcaaaacctttgggtgctcttgctttcccttgctcagaccttacaacaaccacaaattagacttttggtctcatgaatgtatctttttgggatattctacatctccaaagggtataaatgtctgtctccctctagaagagtttatatctctaaagatgtgatcttcaataagtcaaagtttccttatgctgacctatttgagtcctcctctccttctagtcagtctaactcttctttaactcagcattactttcctcctattcccattacacaaccctcaaatttaccacaacctacctcaactaatcctcagcctagttctgattctgttcagtcttcccatactgcacaaacagatcagtctaatgttgatccttccattccagcatccaatacaccccaaccatccactactgttcccactgaacagtctcaccctttagtaaccagctcagaatccacatcctcatctcttcctcccacttcacctcacagaccaccaaatatacatcccatgcaaaccagatcaaagtctggaattcatttaccaagagttaaccccactcttgtgttggttcattgtggacccaaatctgttaagcaagccttaacagatccaaattggatctctgccatgcagcatgagtatgaagctttgatgaggaataatactaggagtctggttcctcagccaccagacagaaaacccattgggtgtaagtgggttttcagagtcaaagaaaatgcagatggttctattaactagtacaaagctagattagttgctaaggttttaatcaagtggctggttttgacttctctgagactttctctcctgttctgaaacctttgacaatcagacttattttgtctttggtactaactaatcagtggcaactagctcagctgaatgtcaacaatgcttttctgaatggattactccatgagactgtgtatatgtctcaaccaccaggatttcaagacactagttcttctctggtatgtaaactaaacagagctctttatggcctcaagcaggctccctggcaatggtttgaaaggcttcagactaccttacttcagttcgggtttgtggcaagtaaatgtaatccctctttgttcatttacaagacccaatcgcacactatatatcttcttgtgtatgttgatgatattacaattactggaagttctattcctttaatttagcatcttacctctcagttgaattcaaaattctctctcaaacagcttggtttgttagattattttcttggaataggggtgaagactctggccgacaaatcaattctgcttactcaaagccaatatatcagagatttattgcagaaaaccagtatggcagaagctcaatccattgcttcccctatggcttctagttgcaagctgactaaatcaggctcagaacctttttctgttccaactctctacagatctgtggttggggctcttcaatacttgactattactagaccagagcattttgtcagtgaataaagtctgtcaatttatggctaattcatcagaacctgactggattgcagtcaagagaattttaaggtacttgaagggtactgttcttcatggtctgcatctaaagcctgctgcctcaagccagacctacactctgatggccctctgtgatgcagattgggcttcagatattgatgatagaagatccacttccggtgcagcaatatattttggctcaaatctcatcttctggtggtcctgcaagcagcaagtggttgctaggtctagcacagaggcagaataccacagtctagctcagaccactgctgaaatatcttggatccaaacactgttgactgaacttcaagtttctttctacactcccatcatgttttgtgacaatcaaagtgttgtggccattgcccataatcttgttctccatgacagaacgaagcttatggagatagatgtcttttttgttagggaaaaagtgttgattaagcagcttattggacatcatatccctgctgttgaccaatgggaagatgctttaactaaacccctatctcctactagattcagttttctgaggaccaaactcaatgtgattgagtctgtttcaaagactcaaccaccttgagtttgagggggggtgggggggtggggggtattagagtagtattatgggaggtgcagtattcaactgcacactcacttaactatgtttgtcactgagttagttactcagttagttaagtgtcagtgttagttaacagttagttagaaggttcgttagtgataactaacccttctagaactctataaatacttctctttgtaacagaaatcagttacccaatcatagtaataacttctgattctaaagttctttctctcttttatcttctttagttctgttaagaactcttttaaagaccaaacttagatcatgttccttataccttgccatcaagttcttaaataaaaaacagtgaaatgtggaattctacaacttattcttatagaagctatttaatgaaggaaaaaaatccacatgtcattcttaagcatttcgtgttatttggattcaaataacttttgcgccttctgcccttggcagactaaattaaaacttatagtttaatttttacctttttttatcttgtttttattttcatcttttctctgaaacaactaattagaatattttcacataatcccttgtgcagtattgcagggaaggcaaatttagagaagtcagact

SEQ ID NO: 2509 - DNA, 5806 bp, Glycine max
  Intron number 6 from transcript Glyma10g26870.1 (locus Gly ma10g26870) derived from phytozome v7.0 (chr-ID Gm10; pos 35333457 to 35339262)
accctgtcctgagcaacgggaaaagaggttttcacgttatcatatagtcaagttatcttttttgtatatattgcaattctgcagattactttttaggctgagtttagtataactttcataaagcttttacttgagaattgaattttgtgtgtattctcacacattcaatctacttttcattgcttactattatatatatatatatatatatatatatatatatatatatatagtacaaagagagggagacagctgtttacacttacacaatacagctgtctccacaatatagctttctacatacaactacaatacacaatactttaacactccccctcaagctggagcatacaaatcatatgcaccaaggttgggacatatagactgaatcgtagttcctcttaaggacttagttaaaatatttgccggatggtcattaaaattgatgaacttagtgataatctccttggacaatagtttctctcgaatgaaatgacaatcaatctctatgtgtttagtcttttcatgaaatactggatttgaggcaatgtgaagagctgcccgattatcacaatataacttcatttgcgccacttcacaaaatcccaactcttggagaaattgtttaatccacataagttcccatgtaaccatagtcatagatcgatattcagcctctgcactgaatcgagcaacaacaatttgtttcttgctcttccaagagataacatttactccaataaaaacacaatatcctgaggtagatctcctgtctatgggacaaccagcccaatctgcatcacaatatccagaaacttgagtgttatccttgtcttcatacaacaatccatgtcttggagccttctttacatatttgagaatatgcataacggtattccaatgatcaacatgaggattttgcataaattggctaacaaccccaacaacaaaagaaatattaggtcttgtagtggtgagataaatgagttttcccacaagtctcctgtatctctcgggatcagggtaaattcctctttgatctgccatgagcttcagatttgggtccatagggctatcaacaggcctacaattttgcatgcctgtttcctccagtatattaagagcatactttatctatgaaatcaaaacaccatctcttgattgagccacctcaataccaagaaagtacttcaaatatcccaggtctttgatctaaaaatggctgaataagtgctcttttagctgagagatattaatagcatcatttccagtaatcactatatcatcaacatagaccattagataaacacactttccaggagatgtatgacaataaaaaacagaatgatctgcttcacttcgtttcaacccaaaaagttgcacaatatgactaaatttgttaaaccaagctcgaggagattgcttcaacccatggagagatcggtgtagcttgcacactaggccatactccccctgagcaacaaattcagtaggttgtttcatataaatttcctcctcaagatcaccatgaaggaagacatttttaatgtcaagttgatggagaggccaatgacgcatggcagccatagcaagaaacagtcgaacaatggtgattttagctacaggagagaaagtatcaataatcaaagccatagatctgagtgtatcctttagctactaactgagccttaagccgatcaacctcaccattgggcccgactttaatagtatagactcatctacaaccaatagttttcttaccaggaggaagagggacaagttcccaagtaccattgttttcaagagcctgcatttcatcaatcatggcctgtcgccatccaggatgatcaagtgcctcatgaatattgttaggaacagtaagagaagacaatgagaaaacaaaagaaaagtatgaaggagacaaccgatgataactcaagaaattataaataggatgaggattacgagtagatcgagtatctttcttgagggtaatgggccagtctgaattagagttatgagaagaagtggaggaggaaggatccatggtttgaggatctgttggaggaggatcggaatcacgagaagaagactcaggcattgtagaactaacttgctgggtcctgtgttgatatgtaatgaggtggaggagcaacttcagttgaacttggtggatgagatgggattccagtagcactttggttgggattactcataggaccaggagatgggactggaagaacttgctgaagggaagaagaatagtctatggaggacgagaagaaaggtgtgtcctcaaaaaaggtaacatcaacagacagatagtatcgtcttgtagttggagagtaacacttgtaatccttttgaagacgagaatatcccaaagacacatttaatggccttagcagagagtttgtctaaatcaggaaagagatcatggacaaaacaagtacaaccaaacaccctagaagagacatgaaacaatggatcatgaaaaaaaatagagtgagaaatctgattttcaagagaagaagacatcctgtttattaagaaacaagcagtgagaactgcatctccccaatggtgtgtaggaacatttgagtttaacattagggagtgtgcagtttcaaggagatgacgattcttcctctctgttatgccattttgttgtggtgtatgaggacatgtggactgatgtaaaataccttttgaggataaaaaggaggatagatcatgagaaaaatactctttagctttatcacttttgaaaatcttaatagttttttcaaattggttaatctcattaaagaaaggcataaatataggcaaaagttcagatctatctttcattaaataaacccaagtacatatggagaattcatcaataaaggttacaaaatatctaaaaccaaaagatgtgacacgacttggtccccaaatatcagaatgaatgatagagaaagtcgagttacatctttttttagtttgaggaaatgatgacctaacatgtttccctaattgagggaagcatgttaggtcatcagcctacaatttgttgagggaagcgacagtcgacgggatccacgacagtgtatatcgtgaattgtggaaattgaaggtgccacttaagtatgcaatatttgcttggaggttaattagggatagggtacctaccaaaattaatttacacagaagacaagtagcagtctcgaacactagctgtcctttatgcaggaatgaggtggtttgagggccaaaagatggaaatggtggtggatagttgtcacgtggaccatttggaagcaaagaaataagatgatattctccaatgaggattttgacagcaaccaagttatggatgacgcagttttcttactttggacatggttgcggaatttagagaaggatttttccatgcattttaaccaatggtctagtaacatttctgcagggttcatgtaacagtaattttatctaatctagttttgttccagctggggtagcccattgtggttccacccctgactccattttagttagttttggaaccaatgtcttgggcatatttgtgttgggcaccccaatatttgtaatttagtacctctggtacttcattaatatatattatctatttttgctgagcaaaaagaaaaaaaaatgtttccctaattgacaagattcacattctaagacttgaagattcttaagactaggaaccatcattttcagttttggtagacttgggtgacccagacgttcatgcaaaagcttgggctttgaagttgcaaaacaggacactggaaggttggattttaagtaataaagtcctcgtgattcacgttcttctccaatcagatgacccgtaccatgttcttgaataacaaaagaattaacataaaaggttattgagcaatttaacgaacgagtcagctgacttaatgagattaagttgtaggaacaatgaggaataaataatacagagttcaactttaatgaaggaaacaaagatacttgaccaattccttgagatgcaactttggacccactggccacagtaacaaagtaaggagtttttggaaaagagatagacgaaaaagatgatttgttaccagagatatgatcagaggcacttgagtcaagtatccaagaactagaaccttccatagattgagagatacatgttgttgaaacacatggtaccgaggaggattgagcttggttgttggatttttcagatttaagcttcaaatattctaggtactcctcattagaaaacttagactctgatttttctgatttagatacatttgctaccttgtcaggaaagccatgtaaggagtaacaattttcttaagtatgacccatcctcttgcaataggtgcattgaggacatccactccttccaccgcgacctcctctgttgttacgacttcctcctcttctacgaggtgcaaccatggctgatgtttctacgacttcagctaagttttcatctttcaacacatggggcacaggaagaagtttagtaactagagagtccattgacggaacttgatcaccagcaaggacttgatcacgtacatgatcaaaatctgaatgtaggcctctcaaaataagaaccatgtaaagcttgtccagcttcccatttacttcctccaaagaatcagccacaagaaacctttttaactcttccactaccgctcgagctttacctatatgtgcaatcatatcatggctgatctgtttgagtgtagcaactttttgggttgcataaaaaaactttcaatattattggcaaatatctcttgggccttcttcctaaaagagcaacatgttttgaatgatctaaggatttccaaaacatccggctcaacagattgccacaacacaacacatagttgaaagtcaagtttttcccactcagatttcttgttgtttgggacagcactagctcctttttccaagtggtcatgatatccttggccaagaaaccacaactccacttaggcagaccaagaaaagtagttcttccagttgagttttgcaatagtgatggtgggggttctagagaagaagaacacaggactgacagaggtcatttctgataaaaaagacgaagccctaacggagaaggagaagagaatgcaagggctggaacgatcaagctgtcaataccagaaaacagggattgaaacgtgcccagaaggagacgacgaagctgttggaactagtccggtgagcttccggttaccagagggcggcgcgtggtcgtcacgcgccgaaattggcgtggattggtggcggcacgtggaggtgcgtggctgagattttggccacgtgacttccaggggtgagtcacactcttcaaggtgcacccaaccctgggatcgccggaagataaggtggtggatgacggcggacggtgaccggagacaaacaaaacggttatccgctttgataccaacatgagaattgaattttgtgtgtattctcacacattcaatctacttttcattgtttactatatatatatatatatatatagggtacaaagagagggagacagctgtttacacttacacaatacagctgtctccacaatacagctttctacatacaggcatacagctacaatacacaatactttaacacttttgcttaccccattaatgttatagatgaaagttttcagaagcttacatttaaaactttcttaaggatatttttccccagtggctattagttctttatttttttttgtttcaattgtttatttgaattatctttttacatttagctgctgagg

SEQ ID NO: 2510 - DNA, 850 bp, Glycine max
  Intron number 15 from transcript Glyma14g37240.1 (locus Gl yma14g37240) derived from phytozome v7.0 (chr-ID Gm14; pos 46520107 to 46520956)
atagactactttcaggttgaggttaaaaattgttttgtattgttgtttttgttgttgctgttagcagagtgataattcatattgtgtaatttctttcattgctgtcaaacgccaacctatccaaatggaagcatcctgctttttccatcaaacacttttttctttattgatataatcaaatattaggtttagattatatgaataagaaattcttcgtgttagatgcttatacttatctcattttgtacacttgtcctcagtttgaagactcttcttgttacttctaccttttaatataaaaggagccacgagcagagtaggtcagacaatacaaattcacaggattaaatcctattgtgatgaatatgtgatgtaggagaaaaggggaaagaaaaagaatatgtagagagagaacctttatagtctagattagcttttcatcttatctggcatttctagttacctaagatattcatgaatgagtatgcatgacacaagaatgcctctgcctaattgttcttattccctttttatgtgtgttgatttcattgttaaaacaaatgtcaagatgcaagtgtgcttccatttgttgtttatatttttggtttgtggttgttttcctatccgctctgcagggaataaggggaattccccccattccaagtggctacaatccggctacctgggtgcttgaggttactacacctgctactgaagagagaattggtgaagattttgcagacatttacaagaattcggatcaatataggtgcttctaatttgtagttgcttaagtgctattgctgaagtcgattttccattcttttcttttagtttaggttggagagag

SEQ ID NO: 2511 - DNA, 2100 bp, Glycine max
  Intron number 2 from transcript Glyma15g42880.1 (locus Gly ma15g42880) derived from phytozome v7.0 (chr-ID Gm15; pos 50308078 to 50310177 reverse strand)
tgttgagttggtttgtggttttcgtgctccaattggtatactatatttctctatttttatctctacataaatgtgcagatcttttttctaaacttcctcttttggactatgtgcttcaactaactatttgcttctatttatacaaatggtggaaaattaatcattgtagaatttgattcaattatctgttttgtcattttgtaatactaccccgtccctaaatataagactctcttaactaattcatttcacactcattaagaaagttagttaatttagttagtaacattaaatatgttagcaatttgtgttattttttcaaaattatccttaaaagtattgagactcatcatctcactccttttccacttaattactttctacctaattaattaatgtgtgctagtcttcttctccaattcttataagagagagaatgaaattatcttattaatttatagtgtttattgtaaagtaactaaagttattttagtaaaaaaaaataatgcaacaagttgaaaataatcttataaaaggggacaaacaaatttaaagagagtcttatatttagggacaggggtagtagttgttagtcttgatggtaaagttattgatttcttatcttttctattttcttattatttaagattattatgatatgttgactgttgagacttatattatgatctcgtacgaatcttattatgctctgttgagattgtgactatgatatgctgagtccaggctactgttaggcccatttcacaagtatataggagaaatggaaagaaaaatactgaagggagagtgggagaggaaaatgggcccagaggcaatgtgggtttgattatggcagctgaggtggagtttgaaaaccggaaagatagagttgtaacagaatgtacagatggcaagcaaggagagggggatcagggatgtaggtgcggaaatcatggaaggaatataagttggaaattaacagaatgcaggggaggaattgaagggtggtgggtgtttgggtgagctgagggataagtctctctcagtctcaaggttatttggggttttcctattttcagtcatttctcttttcaaggagcttaactccattccatcacggttcttttcagatttcactctggtttctatacttcatttcgaaaatatatatcaatacactattcagtttcctattccattgttcaatcttaacagctagtccgctacatccttgatttactgtaagaatctttatctacttgtgtgtgtgattaatattttattgatcaatttctataatgcaaaatgtggatttaaaggaaactgtggatggacaaaatagttaataaataaaaaaaattaggtaaatcaatagtatttagaatttctaatcttagtgttctaaagcgttaatgttgtatttactactctccacttgactgtcattagttttgagaagagttgttgatgttgagattgagattgtgaaagattgttgtagattatgttctgattatatttgtttgttattatggctataaagatttatattttaggaaggattactgtatcataggaaatctgattgatttctactagatttaggataatcctttcctctttctcctgttccttatttatacatgtgtcattgttttgcatcaagtcaataacaatcacagaatattcaatttacctctctgtttttctctaatttcaagtagatctaatgtaaaaagtcataagtttatcttttacatttgaaaagttaaattgatattgcgatttctcatgtgtatcatctgaaaatactcttggatgaagtatcaattgatggtatttcattctccctgtcccctatcacatttgtgaatcttctggtttgttagttagcatttctgagataatgatgcttacttactcttttctatccttatagactcagtaccaattcttcagtttgctacagtaattttgaattcttgttttgcccttttcatatttcttttgaaggttgacactgtttatggctgactattagcaaattgattcttgatttcatcaggaaccactgcgtatatagagcagtcactcccttat

SEQ ID NO: 2512 - DNA, 3523 bp, Glycine max
  Intron number 2 from transcript Glyma13g36530.2 (locus Gly ma13g36530) derived from phytozome v7.0 (chr-ID Gm13; pos 37778191 to 37781713)
ttcaaggattgaagttttgttgctctggtacggcgtttgtggatttgtatgctgagaatttacatatggtctagaaattagaggtattttttttgtgagagtgtgatcaaaatgtatagacgtcgtgattcgtgaatcattgatgactggtgtaaaattcatgcaaaagcacggcctaactattcgacgttttgaggaaatacttggttggggaatttacttctttgaaatgtatttcatgttattgcaaggaaagttctggttgtttcttatagctctggttgatttgatactatgaagtatgataagttcttccgagtttttattttttattttttaatattaagtcatctgtggaattattgtaagtttggtgtatctgataatgcttcaatcgataaaaagagcatgagattggttgtgtaacgggttattttgcaattgaccatttaaactgcttgattacatttttttttttaaagagccatgtcaaattttattaaaaactgcttgattacattatataatgtttgaaggttgttgttcctctagtacccctatatagatttgtaaacttcaaatttttgtgtatacttgagagtgttgggtgtctgagtatagatgtatatattgtagttcttaatccaagtagcagtttggagtggttgaccccaaaatgctatgcatgatagtgggatgactgctattttgaagttttaagatacacatagcataaatcatgtaagaataaaaatctaaaattaatgacattcataattaatggtcaaacatcagaatttgataactaaacacacattttctaaaatagcaaggctgaaatggtaatgggctggcctgaacagtgatgagcatgctggaaagtggttgacaaaagatgtgtaccaacagaaactggtcagaaattatgtgtgctgccagaaatcttgccaaagagagctgggtcttagttgaggatggtgaggctagggtttcagacttgggggtgcacgaatgatgatagtgggactagacatgacaatggggcggggcggggacggatattgtctccccaatccccgatcccgactccccaacatatccccatacctgtacccgatatctgacgggttaaaatttattatcccatccccgtacccgctgggtatcaggtatccccgaccctgtcccgtaattcaaattagaaaaataattttttcttgtaaagaaaatattaaaaatttgattttagaaaaaataaattgattgttaaacatttatttttaactacttatatatcaataaatttatcatagcgcatgtgtctacaaaaatcgttaagaaaagaatattaaattatgtaaaaattctaaaataaaatgaactagtaataaaaattctaggccttttgattaaattatgcaaaaattctagaattttaagtggcgggacggatccgggttcaaggtcgaagcggatgtagtaatcccatacccgacttttggttatcggggaaaacctgtacccatacccggttaactcaggtattacccgtcaaagtcgggacggattcggacgggtacccacaggtatgggttttcttgccatgtctaggtgggacctggttaaatgagcaggtggtgatggggagggaaaagggtttctgacatgatttctgccacaactactcactgatagtctttgaaggaacattacttcaagttttgattataaccaaacagaccagatcaattggttctgcctaaaaattggtgaactgtttagatgtctagtttatttagcccacaaaactggatgaacaaataaccagaagaactggataaaccagttgaaataggtgaattggtgaacgccagtttatgtttaaactttttgccatttaactaaactatttttggagtctaatgaatgcctgtgtaagaaacaatggtttgctcccatcttagctttcgtatatgttgtaagcgtggatgctccattcaatatcttatgtgaaaacttgcaagtatacctcctcttagctttaatgattagtttgattttgaagaagcatactctgatgttgataattagagtacacaagtttatttttaagttcatataagtgttttttttgcttaaaaatgattttaatatctaaatattgttagcaagtaacaagttgcacaatgtacactgtcacttctgtgaggtattactctttgcattgctgagactgaaccttaaggagcttctaatttcatattattttgaaggttagtttcttaacaacatacaaggttatataatatattaataatataggataacatgaagatgctattatcttttatcttatagcttccctgtgaattttttcataattcattgttttaggaacataatcaacatgtacatgcaagcattgaaaatctgaacatttggccaaggaatatatgtcatttttccttaaattcccttatttggacagcagtccaatttggctctgaatgtacatttgtatcttgcaagccccatccatactaattatgagcccccgatggacttatcttacctaggtgtgattaaatttttatgtggctaggataatagggtggagctgattacatctttcacgtgttgtaagttatcctagaaatatctatatataattataatacactaaggggcatttggaacagcttatttgcgcttatagaagattagaaatggcttatgacctttctataagctttttaaaaaaaaacttattttaataagtttcacggagaagcttttagctttactcaaataagcttcaattttagatgccctctaaatagatatatggagaatagaaccaagtatgtagctgctgaatctagttgcattgactcccattaatcaaacaggaggttcctatttcctagttaatatgaattcctgctcccctaaaatcagttatttaccacttataaaaatggaatgaacttaaatgaagttagtgttccatatggatctgatgatattctgtcaaatctactctttaaagataacatttttccaagcaaactattttctgcagaggttgttctaattttgaaaaggataaaatttaagtgttattcttcaattaaacttggtttttcctgggtcatgctgagctgtaattccaaccattaataagcagattaatatagtaaaactccattttttattgagaaaaacagtaccactagtacttaagatactacacttaagttttgtctttttaaaaaagcatcctctcttttctctcatgcctgtcattaagacttaaaaagtacaaaggattttctgatgtctatgagaagctgaactagacctaaatttctgttgcaatgcagtaatagagggtgtttaatcataccagattaaatgggcggagaagtttctctattgctgtgcctgttattacatctactcacttgaattgtgtgtttctgtattaggtaccgtgccattactagtgcttactaccgaggag

SEQ ID NO: 2513 - DNA, 2284 bp, Glycine max
  Intron number 1 from transcript Glyma05g29130.1 (locus Gly ma05g29130) derived from phytozome v7.0 (chr-ID Gm05; pos 34799391 to 34801674 reverse strand)
tggtacgtgtttttattaagaatccttctgttgaaaaatattaatttggtttcttaattctcatttttagcaggaaaatacttattattcatctactttttcttccatcccttttttaccattttttttttgtctatctctatttattttttatatatcgcaaccattactttctctatctacatttttctttctttccatctctaattatttccaccaaatccatcgcattttgtagtgtacgaatatcatcattcttttcaataagcttcttattcttatacaagatttaaaaatattcaataattttcattctaatgatagaattcaacttgaatttttaacttatttttattgagtctcattttatcttttcccacacacaacaattcaaattttgacttgggaaaattatttttccaatgattaagcaaccttgcttgtagtcatttatacaagcaacttatgtaagcattttaaagaattcattaatttgttctaatagtattctcaggtcagttaactacaaacaattatgatttcttcaggacacacatattctccttgattctcttgaaattgaactcgttatgtaccttaattttactgaatggggtgtgattctgtgtatgtttaggagaaaagaaaggataaaatgtcttcgtctgtggacatgattttgattatattgtcattttagattcaggggaagaaggaggccaaggttttcttttttctttttttaaggttatcatgattacggtggggactattcaacaatattacttaattatgattattatctgtctataaacttaactgagtattttaagtaagatttttttctgttaatcattgtttttcatctaaaaagacttaaatattcttccttcactataaaagccagaattgtatcacatcatcttgaatgcagtgtccattatatggaccacatttgagtacaaggcctgcaatattgaatgatttttcgattttgcacgtgtgagtgagacaaaaagtgcatgcaagtaaattaaggatactaatattcctttcaatttatatatgtcctattttttttaaaaaaaaatatacatcactatagacatgcgttattattgctttatgctatatttctcttttgcctgctaattaaataacctaattgagtgtaacaattgcatatgaaccaaatgaaggaaagactcatatgatctaaaccggagacaaataacaatcaaatgcgtccaattacctaaacttcagacacacattgccgtcggacttataaataaatatatagattattttgagaaaaaaattaaaaactctaaaacttatttaactttgaaataattaatcaagctgataaaaacacgcttgcaattgaaatccaaccgggtgcggtaagctgcaatttcacttaattacattttaccaaaccgaaacaagtatggttatagtgaagctaaaatttgaaaaatgtcctatttcacattcacatcaaattaattataactaaacatataaaaacatcgtgattcaagccctaaaagtcgaaatcagatagaatagacgtttaacgttaattgaatttttttaaatgggtatatacaagtttactattttatatataatgaaaaatcattgtgttagcacaaaacttagagataaattttaaatatagaaagagaattatatccaatttcataatccaaaataatcaaaagaatatctggctagactggctttggcactgcctgctgcataatgaaaattcatatgaaaagaatacgaaagttctagtttaaaaataaaaaaagttgggaactgtcactccactcctgcatgtttgtaagccaaatcataagagtggtgctatttagagacccctctattttaaacaccccatttacatctcatttctttttatctatatttttctcacattatatatcacctattctacttatattttttttctctcttaattttctcttttctctcactaagcatttgggtgtccaaattaaatatatttttccaaatcacaattcaattacgtatcagaaattaatttacaccaaatacataactacgggggaacttcttcagtcattactagctagctcactaatcactatatatacgagatggtacaagtgaagtgaccatatcttaatttcaagccataaaaactttccatcaagttatgggtttccttgtgttgcttcttttctccctcttaggtctctcttctagttccagcatatctcatcgttcc

SEQ ID NO: 2514 - DNA, 1752 bp, Glycine max
  Intron number 1 from transcript Glyma10g35220.1 (locus Gly ma10g35220) derived from phytozome v7.0 (chr-ID Gm10; pos 43417219 to 43418970 reverse strand)
tgaaccaagggagtaagctttatcaggtatggcctttttggtttttgtgaagctccccaagggttgaatgaattttgtgtagttttggtgttttgcctaagggaatgaattttgggaattaaactcaattttgtcctcaaccaatgagttttgtgtagtttttttagatagcttgattataatccaaaattaactcaggtagcatcaagctatctaaggaaactaccaacaagtggttgattgagtggtctcgggttcaactcatgtggataaaggggagatcccactaaaggtggtcagtcaaatttcttgggaaagaatactcatcaataaagctggtggatactccacaccaatgtcatggtgacccaaaaaaagctatccaaggaaactaaataatatgctcaagctttctttctaagaaaattaaaataaaatagaagaacaagaaaacagggaaatagaatcaggatagtatcgcaacatatcttaacacttcctctcaatggagaatatgtatatgtatctagctcgttacatatatatatgctatattgggcccttgtaaagacttagtaaagatgttgtcaagattatccttggaacaaacagatgaggtgttgatgatgcggagagaatattttctatgataaaatgactcaacttaggaagaaaataaagaacgagaaacttaaccactagctagaagatacactcaatccttaaccatttaataaaagtaaatcaaacaaggcttagccataataattgctgaagccgtcaatttcatcagttgataaagagaggtttaaccaccatgtgaggtagaaacaaaacaaattaatatcaatgcttaaccacccaaagcagaagctgctcacatcatcaacgcttaaccatcaagggcaaaagcaaataatgtccaaatacacattaccaaattttcaagacttgtcattatacgcaacggtaggagaaatattgagctgaagcaaacatttaagatcttgataaccttgagccttgatgaaatgtatgaaagagaccttataggcagtataaacaagatggttacactttggaacggtagacaagagtgagatcttgatttgttggagagaagagagcagaaaactgagaaaggaaaagaaaaagacaagctttgagagccctgtgcagcagagggaaaaacctctttttatggtagatgtcaatgctctaataccatattgagatggaaggaatgatttctcttgtgtatcattgcacagtttgtacaattatttatatacacaaaatctaaatcaatctcttaagaaagttgatgaaaagctgtatattttccaatatgagatcccaatgatttgattttagggtgatttctttctgagaagattatgaagaatacaattctgctttgtagtttgcctgtatcctaacattgccaaactgccaatcaccaaaacttcatgttaccctttttctttttggtgggactttcttaacacacacacacacacaacagatgcttaaaatttaaattctaaaatattctgtattcttgaaacaaggccttagctgtgcaagtttcttcctccatgtgtacagtgcattagctgaccatatcatatttcattgtggataatgcagatgctctatgctttctggttcagttttgttacccaacatgttagttgatactgactgttaatttttatcaaattaattacatgtctcaggctttgcggagga

SEQ ID NO: 2515 - DNA, 569 bp, Glycine max
  Intron number 1 from transcript Glyma20g34070.1 (locus Gly ma20g34070) derived from phytozome v7.0 (chr-ID Gm20; pos 42522496 to 42523064 reverse strand)
gaggccaatcctactcctctctcctcgatctcaaggttagttcatctcaaattagggttccgattctccgttaacattgatttttgtacttaaatcaaaatctgtccacgtttcagatttggtgtttgtacgtttagctggaatatttttttgctcctaaaatttggataactccttttatcggagtaagttttgatcggaatgagcagaaactaacagaatcggtgttttttaatagtttaaagtggattttaaagcaactgcgttttcgatttttctttattttaatatattctgttgaaattgatcaagcttgatgttatcagtttgttcaatttttttgtagctaatatgattcggtggaatggttgaagctttgtaggtttcagttgttgttaggcaatattatgttgcatgaaagtattggctattggctatattgtatatgttagatggttagcatatctgtttttatacaaatacaaattggggaacaaatgatgaggttatggattttattttatttgtttccagcaacttgtttcagaaaaagatctgatagtaaggga

SEQ ID NO: 2516 - DNA, 3586 bp, Glycine max
  Intron number 2 from transcript Glyma08g23760.1 (locus Gly ma08g23760) derived from phytozome v7.0 (chr-ID Gm08; pos 18103469 to 18107054)
tcttatccagattcatcatcattcttcctcgtcaggtaattaactgttagaattaacacttcgatcggttaatttctattgaatattaatatatttaattttcattttttttatgtattatctgcgtgaaatgtgacaattatgataagcaaaacgcctcataataagcctttcagaatggtcgtagctagatttcattaattattttaacacgttactctcaatttaatggatcaaaacgtgatactcaattattttgaaatatatacttgatttttctttattgcgcttgcattttatctttgtttatttgacacacgttcatactttttgtattgcactttcatcttatcattttgatatacttaaagtatgaaggaattgggtatcacgttttgatccattaaattttgatataaactttggtccaaattgaaatgagcaattagagtctatgcaacattgtctacgacaggtatcacgttttcattttaacacattgacggtaaatgtttgagtctctgtaacattgtctccaacaggtagagataacttatatttatcaggaaaaagattaacagggttaaataaaataacttaataggggaattttgaaaaattcagggacaaaaaatgcaataaaattatttttggaggaataaaatcatattatatcatacaaaatatttataaatgtaacttagaaattcatacgctttagactaagttttcatcttgaattatataaaattaatcttgacattaatattggttctgataatatttaacttgaatgacatttggtataaggaatgtcaacattcctcgtaaagtgacaaataaaagtttcagttatttgatacataaaaggaaatgaaaaatattgattgcacatggaaaattatagacatttgtgaccagcaaaacaaattttaaccattcccaaaaattgtgattatcaaaaatcataattttcaggtataatttttttttcttgtactaaactcccttattgaaattaattttaatatataaataaatacgaatgaaactttaattcttacttttaaagatggaaaaaaaatatttcacatgatagttaatcatagtttcaccttttttttatgataattgaccttaaacattttttaatgatagtttaaacttcccttactgatgtttttttaataataaccaaatacattttataaaattttcaaaaatcttaaaccatagtcttattcctatttaagtttaataagacttttattccaagaaaaataatttagttagagatgagtttataatatatatatattttctaaatcaaatgtcacactgagatagacatgacaattaaattataacatgttcatatctatttgaccttaacccgactttggcaaagaaaatttcttttgatcgaagttgaggtcgaattttataaattaattataataaataaataatttaaattacaacacttaaatcatataaaactacacaattcattaaaaaaattttgttcataactatgtttaattatgtttttattttctaaaagtttagataaatttaattttgttctctcaaatttaataataatcatgttagttcctaatttttaaagaaaatatatttttagttccgaggcatttaatttgagggactataatgattttttcaaatccaattttggtttttaaaaactaaattataggtgctgaaattgtattttttaaaaatttgagagacaaaaatatatgtatttttaatttggggacctaaactaaatctaccccaaattttagagactaaaacatgatcaagtctcttaaatatgttatttttgtgattcatattgtttattatgttatacattaattgaatcaaaatataattaataatttaatatataatttatttaagaatatatataataaaatatttttaaaaaaggcaagcaagtttcctacagatttctttgacctctatgaggatgagttttgttttgtttttattattcattggaatcgaagatggtaataataatttaaaacactcttacatacttttttcagtcatttgagatagactttttagtatgagttttggttttaatttttcatatcaattttgtttcgttcttattataatgtcttgtgtcattttcatctctacttttggtcaatactaaagaataaaaaataagaagaataattaaaaagtatgacatttaatcagaaaaaaattgtcaaacaaattttctttaaaccaagtgtaaacgtttttttaggaaagcacaaatattcttgatttttttaattcatttgaaaggaaagaaacgcatgaaatattttttttaaattgaattgtaaaaataaaagaaaaaagttaaattttttattttaaaagttatttcctctatttttaattaaataagatatcagtatttctattttctttcttctttattttttctcctttcattcaaatagagcataaatcgaaaaatttacacaaatggataaattttgaaaatatcataggatatgagtaagtcgtgttttaatttgtttacgggtttttatagtaaataatattaaagaaaataatatgttaataataaagtgataaaagagtggaattttatgtaacttgaacaccaaagattaactaattaagtacggaaagaataaaatgttacatactattttacatatttaattgtctacatagaaacatcttcctacaaattaaaacatgatttacccatactctataatattttcaaaatctatcaatgtaattttttttaaaaaaaattaacccattcatgtaaatttgccccataaatcattgatatgtttagattgaaaaaaaatatatacaaagaaaaattatgaataatgatgaattattttattatttgaataaaaaaacatttttaaaataaaatttcaaaattttatttctttggattacctccttaattcaaattttgaactttatctctttttgttttttttctctatctttgtatgtatgccctaccaattaccaaatagtagtgtgcaaatataaatggcatcttagtaactatataatgattgattaccataaaatactaaatacttatatagtagttttatttttggtacatagctgtacagtagtttaagcatacgcgtataggggaagagtggtgtaccaaaaaaccagcataagtgcataactaaattaataccaccatatgacatgttaattttaaaatagagagagaatatatagatgtggcgatggtaatggttgaagttagttcgtgctgagcaataagccaataactcttgtcgggtcttttttcttatatagaaaaaataaaagagaaacaaagtgagaatggaaatgaaagaatgtgtgccactaaaccttaacgaaacgaggcgctagtctcggcatcgccacacaataatagcacaattgattgataatttagttattagttataattattattttttgctgaatatatgattgtttttaattaatagttaatttttattttgttaagattggttggaattgg

SEQ ID NO: 2517 - DNA, 4147 bp, Glycine max
  Intron number 1 from transcript Glyma20g08160.1 (locus Gly ma20g08160) derived from phytozome v7.0 (chr-ID Gm20; pos 11348829 to 11352975 reverse strand)
ctggtgcaactcacttagcttatgattcacaggtaagtattgttagaatatatgatacatatattctaatatgatacatgtattctatatttatgtatatctcctattttgattatgtaattaatcttgtgcatattctatccagattcttagctaattagtgtcctactttctaggctaattatgttcttgtatattgtatatattctcacgttactaatgaaaaaagggcacagattcaaactctttcatggtatcagtttagttttgatcctaaaatccctaacagtcacctctcttccacccttttttattctccttccgctacaattctccatggccgatcaacccaaattccatcctgctttgactatcaccaatgttaagtctctcatttccataacgttggatacggagcatggcttgtatcgctcttgggtggctttattcaaggtccttgttagggttcatgatttacatcaccacatcatctctcctacggaggcacaggcctacggaggcacaggaggtagccacctatgccgcatccaaagtcgcagaccctgctctatggaagcgtctcgatgccgcggtgcttcaatggatatacgggactatatccaccgatctccttcatgctatcttgctcaaagacgacacggctcaaggggcgtgggctcgtctcgaatctatgtttcaggacaacaaggcttcttgggctactcatcttgaagaggaacttgcggaatttttcgtctattgatagctattgtaatcacatcaagttgttggctgatcaacttgccgatgttgatgcccctctcaccaacagcagattgattctcaaactcatggcagggctacctgaggcctatgtcgggacggtaaatatcatccaaaatcaagagccattaccctcgtttgcgagttgccgatctcgactcaagcttgtgaagcggaccattaaaaactgtttggcaaaggaaggcaactccggcaacggctctcaagccactctccttacgagcaccgacagccaccacggcacggacaacaacacctctgcatcctctgcttcatcccgtcagagttctaaaggaaataagcaaaagaagtccaactccaaggtttttgggaaaagccataatagcaatgggcaagtggccccacaacaatctggactcatgccatttaattagcagcaacagccatgggccgcctgggctccttagttggctcaatggccaaacccgcctccatacccatatcctgcttcctcttgggcactaaaaaatgttgttgctcctactgttgggccacgccaatttgggccagggatcttgggttcgcgtccacaggcatacaatgccatagcaccatccactagctacacacctacggacattgaagcagcaatgcatgctttatctttttcttagccggatgggaatttctatatggacattggcgctacatctcacatgtctgcgaaccaaggcattttttcttcatatttcaatttgagcattaaaaataataacattgttgtgggtagtggacatctggttccaattattggtcacggtagtactatgttgccatccctttaccctccctttcacttaaacaatgtcttacatgttcctaaattgattaaaaatttaatatttgtccgtaaattcaccactgataattcggtttccattgcatttgatccccttggtttttttgtgaatgacttacagacgggagccagactaatgagatgtgacaataccggtgacctttatcctctcttctcaaacactcaagccactcctccagtcaatagttcagtgtttaccgctattttatccgatctttggcatacttgcctaggccatcctggtgatgttgttcttagttcccttaatagaaaattttttattaattataataaggcttgtaaaaccttttgttcctcatgtcctctcgggaaacattctaagttactgttttctgattctatgtcgcacactgcttctccttttgatataattcatagtgatctttggacttcgcctatcatgagttcttctggccattgttattatgttctatttcttgatgattacagtaaattttgtggacttatcctattgcaaagaaatcacaagttaaacacttgttcaaatcttttcatagtctaattcatacacaatttacccgtgatattaagacttttcaatgtgacaatggcgcagaatatattaatggcactttgcaagagttttttttatcaacatggcatgatttttcgtctatcttgcccccatacttcccctcaaaatggaaaagccgaacgccacataaaatcaataaacaatatcatacggaccttgcttgctcatgcttctttgcctctttctttttggcatcatgcattagaaatggccacatatctcctaaacattctcctaaccaaggtcttaggatttatgtctcccactcaaattctatatcaatgtgatccaatatactcagaattatgtgtcttcgattgcctatgttttcctctcttcccgtccatttctattcacaaattgcaagaaaggtccagtccttgtgtctatcttggtcctgccccaaatcatagaggttcaaaatgctatgacatgtcaagtaaaaaaattattatttgtcgtcatgtgaaatttgttgaaactaaattccctttctctaaggttcactcccctcacaaagatgactatacttttatggattttaatcccatttttcatcacttgcaccaccaaagcaatactcctccaaatttggagcaccaagctgaccctacttcccgtcctaggcctatggcgtcaacagacccacctcagcccactcactcctctactttcggtactgtcacattgcacgctcttgaccagcagcctggtttgcccccttctttccctatgagaactgggccagtccaccaacaagcctatcatccctccccagatcggcctacaaccattcccacactgttgccaagtcctacccctcatcccatgacaactcgagctaaaaatgggatctacaaaccgaattcgaaatatttttctaatttttttgccatgactaccgctactatatctcccttacccaaagatccagctagtgctattcgtgacctgaattggaaaaatgcaatgttagatgaatttaatgctcttgttgctaataaaacatgagaattggtacctaatccaccggatgtgaatgtaatcaggtctatgtggatttttctacataaacgaaaatccgatggttcttttgagcggcaaaaatcctgtcttgtaggtgatgggaaaacacaacagccgggtgttgattgagatgagacctttagtccggttgtcaaaccggctactattcatactgttcttagcattgttgtttctaaatcttggcatattcaccagttagatgtcaagaatgctttcttacatggctatctcaatgacaatttatatgcatcagcccatgggtttccacgacaaaggtcacccggatcatgtgtgtttactaaagaaatctctctatggccttaaacaggcttcgcgggcctgatatgagcgttttgcagattttgttgccaccattggtttttctcatagtacatctgatcacccattgggcttggatatggcatatattttgttatatgttgatgatattattcttacagcttcatcaaatcgattgagaaagcattttatggctctcttgggtgtcgagtttgctatgaaggatctaggtcctctaagcttctttttggggatttttgtgtcccgcgatgctaatggtatgttcttatctcagaaacagtatgccacaaagatcattgagagagctggtatggctaattgcagctcttgtcccactcctgttgacaccaaaccaaaacttagtgcatcaaaggattcaccttatgaggatcctacgaagtaccgcagtctggatggtgccttacaatatcttacctttactagacttgacatctcttatgcaattcaacaaatctgccttcacatgcatgatcccaggaacaagcatatgagtgctcttaagcgtattttgcgttatttgcagggtactttgtctt

SEQ ID NO: 2518 - DNA, 5774 bp, Glycine max
  Intron number 7 from transcript Glyma16g19520.1 (locus Gly ma16g19520) derived from phytozome v7.0 (chr-ID Gm16; pos 21524448 to 21530221)
ggtaagcatatataggtgccaacttcttgtgatctctctttacctgctgtactaatcttttgccaatctggtacttaggaaggtgctggtgtgtcaaactgttgattgcagatcaaaatttacattatatccatatctgtgctgtttctcaatttggaaggagttataatttcgtttcgctaattattatgtagtaaacttgggtccagtccaataactaaagtatctaagtagcttaaggccttataaatcccacgctataatttcatacctttactgtgagacttgagtcccatacctttcaattagatcccaattgtattgcaacaccattttgagaaggtgaggaaggatcactgaaaataaaaattagtttattgagtttcccaattaagcatcagcatgtacaatttatgccttgtcatgatgtgcctctatgttctaattggaactttccaaaattaatgaaacgattttacagtgagtagttagtactatataaagagccttttactcttgtagtatgcataatatggttcatatgtttgcatcctaactgggtacaattttacaatataacaaatgtgtcgtctctaccacaccaaagatgaaagaaaaggaaggaggtaacagaatttaaatttttggtgtggaaaagaaagatttgttaacagttgatcttcatctagctgttggaagtaaggctttttatgtttaggaaaagtgtttaggaatattggagactttgaatagaaacttgataggaaggagaattctttatggaggagagaactttgtatttttgcttgatacaaatgtgtaggattacatctctatttatactactctaaagagaactctagacacactaattctagagagttctcaactctagagatccaaagagtattctagagaatattaaaaccataagaaatatctagacactccaaacactacaagaattctctagaaacatgacccataattacttaagcccaaaataactaagtccaaggaaccaaataattaatttaggctcaaatcaagtttatatttcaacatccccccttaaacttgatttgtgactccaagcatactccttagcttcacgaaagtttccaacttgagtggcttcgtgaaaatgtcggcagcttgatcttgagacatcacatacttcaactttacctccttcttctcaatgcattctcttatgaagtggtaatgggtgtcgatgtgcttacttctttcatgaaagactggattctttgccaaagcgagtgctgatttattgtcaacacatatttccataggttcttcttgtggcatttttaactctttcaacaagttttatagccaaattgcatgacaaacgcatgatgtggcagcgacatactcagcttcacaagttgatagtgtgactattggttgcttctttgacatccaagtgaaagcagtatctcccataaagaacacaaaaccagtagtgctctttctatcatccaagtctccactccaatcgctatcactatagccaacaatgtcataattgtcagaagagtaatagtgcaagccaaagtttgttgtacctttgatgtatcgaaggattctctttgctgccttgaagtgagttgtggttggagcttccatgtagcgacttactactcctatagcatagagaatatccagccttgtacatgtcaagtaacgtaaacttccaatcaaatttttgtaaagagttggatccacattctctcctttttcatgcttgctcaacttgctgccacattccatcggggtgcctactggattggcgtcatccatcttgaacttcttaaggacttctttggcatagccttcttgggtgatgaaaattcctttgtcttcttgttttacttcgatgacgagataatatgccatgagccccatatccgtcatctcaaattcatttgacatatctttcttgaactcttcgaacatgcttggattgttccctgtaaagatcaagtcatctacatataaacacacaatcaaaatatctccactttgcgctttgatatagagtgcatgctcatatggacacttgatgaagttcttgtcttgaaagtacttgtcaattcgaacattccaagctctcggtgcttgcttgagaccgtacaacgccttcttcaacttcaagactttttcttcttgcccttttacttcatagcccagtggttgctcaatatagacttcttcttcgagaaaaccattcaagaaggctgacttcacatccatttgatagatcttccatttattttgggctgccaaagaaatgatcagtctaatagtttcaagacgagcaacaggagcaaatacctcatcatagtcaattccttgtctttgactatagcctttagccaccaatcttgctttgtatctctccacttctcctttagcattcttctttgccttgtacacccatcttactccaattgctttgtgtcctcgtggaagtgtagtaagttcccacgtatcattcttcgtgattgacttgatttcttcatccatggcgtctttccactttatgttttccgccgcttcttgatagcttagaggctcacaatcaccaaaaagacaaaagaggttaatgtcgtttaggtttttggttacctcataaatctcttcaatgctccttagtcgcggtgtcctctcacttgaacttgtttcatccagccttggtgtcggtgaggcaggtggtgtaatatgttcctctatgattggttgttcaatttcatcatcttcttcaaaataaggaagaaaatcatacttatcttcttgaacactccaatcccaacaatcttcttcgtcgaactccacgtcgtgacttatgacgatctttctactatttggattatagagcttgtaccccttggatcttgagtcgtaacccacaaacacgtacttctcacttttatcatcaagctttgtcctcttttcgtctggaacatgggtataggcaatgcttccaaacactttgaggtgagagatcccgggcttccttccactccatgcttcttgtggtgtcttctcatgcatgcttcttgttggagaacgatttgttaggtaaactgcacatgccactgcttcagcccaaaactccttcagcatcttcttgctcttgagcatgcttcgcaccatgttaagtatggtccggttctttctctctgctattccattttgttatggcgatcttggcactgtcagtgggcgacgaattccatggtcttcacaatatttgttgaacttatttgaagtgaactctcctcctcgatcagatctcatggccttgatggaaagaccactttctttctccacgagggctttgaacttcttaaagttttcaaacacttctgatttctccttcaagaaataaacccaggtttttctggaataatcatcaataaagaggagaaagtacttattcttaccaaatgaattgggtttgattggtccgcagacatcggtgtgtatgagctctagcggctttgttgctcttgttgttgattcctttggaaaacttttacgaaattgcttcccaattagacatccttcgcaaagttgttctgggtggttgatgctaggcaagcctctcaccatctccttcttcgctaaacgttctagaccgtcgaagttgaggtgcccgaaccgtagatgccatagccacgaagagtcggtatagcaagcaatgagacactttgccacatcattttgaatgttcaagaggaacattctattctttgacataggcaccttagcaatcaagttatgtctacaatctcttaagaaaagactatgttctttcaaatggatgtcatagcctttctctaataattgtcccaagctcaaaatattattcttcatgttaggcatatagtagacattggatatgaattgatgactcccattcttcaaacgtatgagaattttacctttgcctttgactggtatctttgagtcatctccaaatgagacatcgccagttgccgcttcattgatctccacgaacatgcttttatcgccgcacatgtggttgcttgcgtcggtgtcgaggtaccacttgtttcttttctcttcaaatttgttttggcacgcgagtagcaaagtttcttcttcttcgcctttttcttctacgaagttagctttctcttcaaccttcttcgagaatctacactcggatgcatagtgaccaatcttgttgcaattgaaacacttgatttgtgatttgtcatacctcgaccatgaatttcctcttccacgacctcttgttacttgtggattccaacttctttctccattgttgaatttgttggagtggttgttgtaaccacctcttccttctcctccatgtcctcgtccacgtccacgatcttggccgcgacctcgtcctctttggctcttgtaatttgcatagtttgcttcctttacgttgagttgttgtagttgctccgtagcctccttttgtttaatttttctctcttttttttcttcgtatgattgtaaggaacccatgagttgctcaatagtcatggtctttaaatccttgttttcttcaatgttggtaacaatgaagtcaaaacttggatttaaagttcgaagtattttttccatgaccttcacctcatcaagatcttcagcatttcttttaagttgattgactacggccaatactcgagaaaaataatcagaaattgactcggactccttcataaacaaacgctcaaagtcacctctaagagtttgaagacgaatcttttttacctgctcaactcctttgttgcaagtttgaagcttatcccatgcttctttggccgtcgttgcgttggatatcttctcaaatgtatcttcatccaccgattgataaatgagaaagagagctttcttgtctctctttcttgactccttcaacgtctcctttacaccttggcttagcgaggcttcatcttgctcctcgaagccattctctacgatatcccacacatcttgagctcctagtagcgccttcatcttgatactccaattatcatagttgttctttgtgagcattggcatttggaaaggaaaacctccatttgccatcttttgaggatcttgaagctctgataccactttgttggaaataaggctttttatgtttaggaaaagtgtttaggaatattggagactttgaatagaaacttgataggaaggagaattctttatggaggagagaactttgtatttttgcttgatacaaatgtgtaggattacatctctatttatactactctaagaagaactctagacacactaattctagagagttctcaactctagagatccaaagagtattctagagaatattgaaaccataagaaatatctagacactccaaacactacaagaattctctagaaacatgacccataattacttaagcccaaaataactaaatccaaggaaccaaataattaatttagacccaaatcaagtttatatttcaacactagcgtgcttgaattaataaaatatgcatgcatacatacagaaaggctgaaatgttgaaaagccagatacagaattatagtgtataggcttgcattttcacccaaaccaatattcaatattcttagaattttacttttggaagcctacctgactaacaaaaactaacaactaccaactaaaattggccgataaaaaagaactgactaaagatgccagcttattttttcaggctcgacctttgctgaccg

SEQ ID NO: 2519 - DNA, 1163 bp, Glycine max
  Intron number 2 from transcript Glyma06g47340.2 (locus Gly ma06g47340) derived from phytozome v7.0 (chr-ID Gm06; pos 49823592 to 49824754 reverse strand)
ggcttaccaaacccttactcatctgggatttaaaggtaccgttcttattttgaaccacatgtttatgcttttatataaatatattaattaataataatacaatgtttgttatgtttatgtgcttctgtcaagtatctataggcatggacaacactttcaatacaatatggaatatagttaaaaagctacattggtagcattcaaacttcaaattttctcaagtgctgtaagacgaaggaatgagtttgtgtgtatatattgaagctatatataggtcccatgagtttgtggttgagtgagggagaagttgccaacaaccctgagtttgtcttgtatggcctttagttcgtagcttcacccttcatcaagattcatgagcatagaaccccaccgttcacctacgcttgcatcttcccaatctctgctcagtagtgattaatttgacttctgtgcatggagggaagggaagaattgattctgtgtgtgtgtgacttgcgtgtgggaatttgggaactagggggtttgactgtgtgtgtgcatgagttgggtgtgcccatgtggggtcaagggttgggggattatggtgaaagcttctttctttcaatgatgtatggtctataacaatatttagtctcaaatctgttcagctgttctgttttctcttcttgcgtctgtttgtgcaagttaaaaaattgtgcccccttgtcttttttattcatcaagtcggttattggtagatttaccttccaaagtttagtccttgaaggataatttggcaacaactgaaatgtaattgctgaatgcataatcttggtagtagacaattttcattatcaggggttaatttgattaattactgagaaataaatgaactctatctgtctgcgattcatcttataaagagttttacaagaaagtataggcaaaacacgtgaagtttagcattgttttggatttgctttcatattatttgtcaatgttattgcatcttactctatatctcttcatagaatggatagcactgtaaaaaatggtttatactgaattaatagaaagaaaaggctaataatatttgaaatgttttcctagtatacttttgtttattcttattacacttctctttgtttaccttgaggatgctttattttcatttgtgtagaatc

SEQ ID NO: 2520 - DNA, 4236 bp, Glycine max
  Intron number 10 from transcript Glyma06g22320.1 (locus Gl yma06g22320) derived from phytozome v7.0 (chr-ID Gm06; pos 19120831 to 19125066 reverse strand)
aaggtatgaaaccatggaacagttagtgaagattctttggcttgactgattttgtcttttgcatgtcttggcataaaatggcatttccttttcatttagcatattgcaacatttccagctgtgattttttagacggttaaaactgaataaatcaactgataagttgctttgttttgtttttttatttttttattggtaaaacgtaactgagttcaaaattctatctccctcccactactaaagaaaaaaagaaagaaaaaagaacctctggcctaatatgctttagtttttagtgagatccaaacccacattttaagagaattgatttagcccttagagaaaccttttcaacctacaaacaatctttttttccttgcacctcaaaaccttttggttgtttcataagaatatcttcctctgactttccatggagaaaagttgttttcacatcaagttgctctagttccatgtcaaaggttgctacaagagcaagtaaaacacgaatggatgtgtgtcttacaattggagagaaaatatctttgtagtccacgccttctttctgactatagcctttagttattttatacttgatgacttcagtgcttgacaaactagacttcttcttgaagatccatttgcatccaacaacttttttgccttcaggtaactcaactgaatcccaagtctgatttttctgaagggatttcatctcctcattcatagccatcactcacttatcagattcagcgcaagtgattgcttcatgataggtggttggttcaaataaatcaacttcttttgttacctgaagggcataggatatgatatcatcaaaatcatatctttcaggtgctttaatttgcctttgagacttccggggtgctctagtcttaggcagttaggttgcttttgaaggttctgattcgtttggttagactcctcaactggttttgagtgatattgttggggttgcgtctgatgattctgttcaatatcatcagacgcttcagtgtgctcttgatcactaaaatttctgattgtggagctctcaaactccacctgctgcttagtgacatccttttctttgtttgaatcttctacagacttagaatgtaatacaaagagttcatcaaatgtgacatctctacatagaatgacctttctttccgatgaagaccaaattttgaattcttttactccatttacataccctacaaagtcacccttcttagctcttggctcaagtttgccttcatttacatgatagtatgttggacatccaaacactctcaacattgagtaatcaacaagtttgtcagaccatacctcaatagggatcttgaaatgtatggtagtggagggggagcaatttactaagtagcatgttgtgttgactacctcaacccaaaaatttctattcaaccctgaattagatagcatgcatttggctctttccaataaggtcatattcattatttcagctactccattttgttgaggagtatatcgaatagtatgttgtttaacaatgctttcatctttacagaattcactaaattcttcataatagaattccaaaccattgtcagtcctaagatgctttactttctttcctgtttaattctgcatgagaattgtccaatgcttgaagaatttgaaggcttctgatttctgcttcatcgtgaatatccatgtcatccttgagtaatcatcaatgacaaagaggaagtactttgctcctcttagggatgaaactcttgaaggcccctggtagtaagagtgaatgcagtccattgcagcctttatagtgtgcattgcctttgaaaattttgtcctatgccgctttccatagacgcagtgctcacaaaactgaagaggtttcatcttgtggtttccaattaagtcttgcttgctcagaattttcattcttttttcactcatgtgacgaagcaacatgtgccacaaagaattatcattagacgcatgacttccaacttgtgaaacagttgaggttgaacctgtcacaatggaccctttaaggataataggatatatagatttacttgcttggtttcctgcattacagcagactttcctttcccttttatttgcataattccaccttcagcacaataagtaaaaccttttgaatctatgacacccacaaagactagatttttcttaagctctgaagcatgatgaacattggttaaagttctaacgatttcatcatgctttctgatttgtatagaacctatctcaactgttttacaaggggcactgttacccatcaagacattaccagcaaatttcttctcatatgtcacgaaccagtttctgtgtggacacatataataagaccaacctaagtccattatccattgttcagaatgttgttgttgttgatcaacaacaaagagtaccaaatcgttttctgatgaggaatcattttgaacaatggttgcaacatattctttctttgttttcttgggacaatctttcttccaatgactaggttctttgcagtaattacagatatcctttggataaatcatgcccttcttgtttcctttgtctttcttctttttttcccctttagcagtgttgttcattgataatctagatgcagcagcttcatcactatttccagatgctttgagtcgaagctctctcgaataaagactgaacttgcttcaagtgtaattgagtcttttccaacacataaagaactcataaaattctcatataaacgagggaaagaggctaacaaaatcattgcaagatctttatcttctattttggcatcaatgtcataaagctccataaggagtttaacttgcccaagtgctcttttagagacactcctttcatttagagggcaaatagacattgtttctacagcaacttgtagcatattaatttcgtaatgaagagtttcgctagcttgagtcaactcatatgtagtttgttcttcagaaacttcataaagaacttcatcaatagaaacaagagaattatcgaatgagcttagcacagatttatcaatctttgacggtaggccagagagaggtgcccaaattccttgttctttcaacaaggaatgcatcttgatgtgccagaggttgaagttctttcctgtaaatttgtcaatcttgattgtgttgaccagtttcttgaacaaatcttgaagacccaccccgaacaaaaagaaaagcaaaatggttgatcattgatacccaccacgaatagatgcagaaatgatctgaatcgatgctctaaataccagttcgtgtgtaagactgagtaagttcagaatagggaagaagactatcagagaagaagaagaagagagtaacacataaagagtatgttgttattattcacgaaaaacttaatacaattaatgggttcagaaactcactctctcagagtctgctcaacccttataactaactcccttgtatataggaacaaggaatgacaaaaaactgttacaaatcagaacttgttatctgaaccatctaacaactaagaggactggacgctcctcctgtagcatgattggacgatcatacagaagactaagttacattttagaggactggattggacggtacaaagggtgtcatccaaccacctttttcgtccaacagatgtctttgtgatgttatatgaactcgtgtattgctgaaaacttgaaaatctggagtaaattttcctttgtttgaagaaacccatctatttccctgaaaacatgctattgtcagaatagatgttgaacatgcagttaattagaatataatttttttaatcaaaataatcatgatttgatttttaatctactaatatattatgaaatttatcagtttaagaaccgtatgatgctactacttatttataaagcacttaaaatattcactggaagtgaaaaatcttaattaccacaatgatgcggcactgtgatgtttacttacagcagaccacatttaagctcatgttgagttgtagagagatatatctaacatgacttggtttttgaattaagattttcggacaattagtgctaaaaggggtagttttcatttcataatagcaattgaaaaatttattgaataaaatattgcgagttttgagtacatttcttgttatatgaaatgcatccttggtccccccaataatcttattgttgccttgaatacaggtgtaacaggggattgcacaactccaaggacagaa

SEQ ID NO: 2521 - DNA, 6123 bp, Glycine max
  Intron number 8 from transcript Glyma06g21830.1 (locus Gly ma06g21830) derived from phytozome v7.0 (chr-ID Gm06; pos 18407373 to 18413495)
cactctcaactgatattctgtttggattagtgaaggtggacagaaaattcttgtcatgagctaaatttgcatgccttatttataattctagcagattgagagttgagacaattaaattctattccttgaacaattagcagtttgattgtgatattcaagacactttgggcatatatttgattgagtctagtgcaagtgtttttctatacatgtaagaaatctgacatggtgttgattgcatggatttcttttgttctatattgttgtgcaattattttatttggttactggtcaatctgtaactcatcaatgcatggtctttgctcatatttgaatttatttgatgagcatgttcaggttaaatgagtaaatactcttatttgtagttgttcattataatatcctcctgtgtacttactcacacacactgtttttggagtaaataatcattttggtccctggaagtggtggaattaagtatgagaaagatgaataaaacagtaaataacagataaaaacagtgggaagaaatggatgaaatagtggaattgtattatggtaggacaattacaatctcaacagctgaaggaataaaagataataatctgatagtgtactaccagatcccaaatcactgattcagtgaccctaccaaataacagaattctttcttgcccactactgctcaatactactacttatatactattttgatgtatcctctgccacctcatcattctttttcccttttccattcttcctcgtatacactctccaaaccttgggcctattaacattctcatcaaggcccacttccttactaaggtttctatcaattccatcctccttagcaacaaccttgtcctcaaggttaaaatctggaaactgtcctctaatgaacgcatcatcttcccaagtcacatcatcactggacttgtgcttccactgaacaagactttgaggcacagatactcctccttgagtgatagtgcgtgaaccaatgaccttctcaggataaaattcatccatatcagtaacctctagctctgtgggtagatccccttgcacagaataatcaccaatagcctttttcaacaaggagacatgaaaaactggatgtatcctagactgtggaggtaattgaagcttgtaagcaacctcacccaacctctcaatgatctgaaacggcccataaaaccttgcagccagtttaggattgattctctttgctacagattgctgcctatgaggccttaacttaagaaaaacccattcccctactgcaaactgaacttcccttctcttcttatctgcatattttttcatttgttgttgtgctctcagcaaatgagccttcaactgattcaaagcctcgtctctttcacacagctccatagctacagcagcaactttggtctcattactcaagaaacggatgatgtttggtggctgcctcccatagactacctcaaaaggagtcttaccaatagatacatgaaaggtggaattataccagaactcagcccatggaatccagtgtgaccatgtctttggttgttcaaaagcaaaacaacgcaaataactttccaagcatctgttagtaacttcagtctggccatctgtctcagggtggtaggccgaactcatcttcagtttagtgccctgcagtctgaaaagctccaaccagaaatgactcataaagagggggtctctatcactaatgatagatagaggaacaccatgaagcctgacaatctccctaacaaacaattctgctacagacttggcagtataaggatgtttcaacagcagaaaatggctatatttggaaagtctgtccactactactagcacagcctcaaaccccttagatttgggtaagccagtgataaaatccaaagaaagatcctcccaaatggcattaggaataggcaaaggttgaagcaagcctccaggtgctgttgctgcatatttttgtctctggcaagtatcacatgccctcacaaaatctctaactctcttttgcatacctgtccaatacagattagctgccaatcttctataagttcttaggaaccctgaatgtccccccataggcgtttcatgaaattcctttagcaacacgggaattgaaggagagtcagaggataacaccagacgaccctgataaaataagacatcctgccgcacagtgaatcctgtcttagctccaggattccttttgagttcttccactgttttcttcaatacagggtcctgcctaacctcttgcagcaattgctctccatccaaccatgtgggatatgataacatcacagccagctccatatcaccatggcatcttgacaaagcatcagcagccttattctctaatccaggcttatattttacttaaattgataacctagaagcttagccaaccaacattgttgatcaggtgaagttactctttgttgcaggaaatgtttcaagctcttatgatttgtataaaccacaaaaggtttgcccaaaagatagtgcctccaatgttggattgcaagcaccaaggccataagctccttttcatacacagactttgtcaaattcccatcagataaagctttgctgaagaaagctattggttgtctcttttgcatcagaactgcaccaatgccccttcctgcagcatcacactccacttcgaacggcacagaaaaatctggcaatcccagcactggaggtgtagtcataatctgtttaagtaacttgaaagcaactaaagcttcttttccccacacaaaattgttcttcttagttaattcagttaaaggtttggcaattttgccataatccttaatgaattttctgtaatacccagtgagccctaaaaaaccacgcactcctttcacatttttaggctcaggccattctaatacacatttaattttgtctgggtctactgctaccccatctccagaaatgacatggccaaggtagtccacctgtttacaaccaaacttgcatttagcttcattggccacaaagcaatgagattccagaactgacaacactaatttcaaatgctccaagtgttcagtttcagatttgctatataccaggatgtcatcaaaaaacaccagtacaaaatttctaagatagggtctgaaaatgtcattcattgtagcctgaaatgttgctggtgcgttcatcaacccaaaaggcattacaatgtactcatagtgtccattatgagtcctaaaagcagttttatgaatatcatccttatgaacacgaatctgatgatatccagcctttaaatctattttagaaaaaatagttgctccatacaattcatccaataactcgtccacaattggaataggatacttatctggaacagtggctttgtttaaggctctatagtccacacacatcctccaggacccatccttctttttgactaagataaccgggctcgaaaacgcgctcatgctggtcctaataactcctgcagctagcaactccgtcacctgcttttcaatttcttttttctggtgatgaggatatctgtagggccttacattgaccggtccatgctcaggaattaacttaatctgatgcacctgacttctttctgggggtagagtaattttttcctgaaatacttcagaaaattgacttagtaatttggtcaattccatctgtccagctgcttgagcaatatccctctcttcctgttgagtccaccaccaaccttcacctccccttctatgcttatcctctaaaaaagagtgtaagcagctctgcttttcctgtatacggccctgagcttgtaagtttaccattcttccctcgtgcataaactgcattgatagatccttccaatccatcaccactttccccaaagtgctcaaccaagacactcccagcaccacgtctaaacctcccagctctaacaccaacgcatccacatgaaaaacttggggccccaaatcaatttgaactccttcacatattccctttgaaagaaccttatgaccatcacctagcttgatgttcttagctgccataggggtcacagataaccctaatgctgtagtgatttctggggagatgaaattatggctagctccactgtcaattaaaaccatcacatcaatactagcaatttttccacaaatcttcatcgtattatactcccccatgctacccatcactccaatcagattgcattccgcctctgtctcctctccctctccctccgtttcagtggcttcaagagaaacaatttccccttcctcgttcagctcttccccttctcctaaaatcagaacacgcattgctcgttcaggacacttgtggagcgtgggatggtacttccctccacacttaaaacacaaccccttggctcttcgttcagctatttcatcactctgaacgccgcgaactcccttccaccgttccgacgacagcgtacgacggtcattttccccttttcgtcctgttgaattcattgaggacgtgggatttgtatttgacccggtagaacccgttttctgacttggagcgtacccacccgaattagagcgggtaaaatctttgtggatcgggttagacccatttcgagatttagacagcagcctattgggctcactacggcccatacgattcttcccatagtaacgatctccttcatcgtcttcttccttcagttcctcttcaacatctttggccatcctcatcacttgcatacgattctgcggattcaacgttcgcacccgccaccgaatcggttgtttcaagccactcatgaaataacccaagtactgctcctccggtaaacgacccacctgagaagaaagcagctcaaatgcttcgacaaactcttctaccgttcccgtctgacggagggtagacaactcctcaaacggattttccaatcttctaccaccatacctcgcaatcaaagctctcttcagaatttcccacgaaagatcatcctctgtttcccgtaacaagttaaaccaatggattgttgagccctccatactcagacgagacagcttcacccgcatttcatcaggagtattctgcacgtcgaaatagatctctgcgcgcgtaatccacgctacaggatcttccccttcaaacaccggaagtttgaccttcttttcgacgaggcgagactcgttctgagttgagtcaccaacagaagtttcgccctctggcgacactcccttctgactgatctgtttgctgagctcagtaagaattacactctgttgctgcatctgttgagcatgttgctgcatctgcagagcgaggtcatgcaacgtcgttgttacgttacccatttgtgtctccaaagcttcaatccgctctcccattttgggtttccttggcatttacaatttctggtttcagggggtattgatccggcaggtcggaccaattggtggaattaagtatgagaaagatgaataaaacagtaaataacagataaaaacagtgggaagaaatggatgaaatagtggaattgtattatggtaggacaattacaatctcaacagctgaaggaataaaagataataatctgatagtgtactaccagatcccaaatcactgattcagtgaccctaccaaataacagaattctttcctgcccactactgctcaatactactacttatatactattttgatgtatcctttgccacctcatcattctttttcccttttccattcttcctcgtatacactctccaaaccttgggcctattaacattctcatcaaggcccacttccttactaaggtttctatcaggaagtatatagtgttgtcacattagttcctgaactacaaaaatttcaaataagtcccataaatttttagttgtttaagtccttaaacttaaccacatactatcatttttgtccctatgttaatatcatcacttaagttgcacaatttttttgcattttggattaatgtgtttgatgaattaaactttcagggacttaattgaatttccttagttttaaggtaaaatgtgtcagtggaatatatattcagggattaaaacggttgcttactctgtttttgttacaggatattgctcgtttccggcctgatctcaagctgct

SEQ ID NO: 2522 - DNA, 2787 bp, Glycine max
  Intron number 1 from transcript Glyma02g09130.1 (locus Gly ma02g09130) derived from phytozome v7.0 (chr-ID Gm02; pos 7112760 to 7115546 reverse strand)
cagataggtattaatctttgtcttttattttataagcaaatggtttataatctttgttgttttactagattcttgatttcaaacactcacacaccttgtcttattgcctgactagctagtatagccatgaaggttttaaattgtagtcccagttgcagttttgtcacgattctacatgttgtggaaagttgcatacaaatgctactgatggggctggcaattgcaatcgccatgcagatataattaatgaatccaaaaatcttgatgttgcggctaaaattacagccacaaactgtttttaaaacaacgataaccattcataggtttgaacgggtttcgcaagtgaggtgtgaagaaacctagttgtactatttaataagttttattgcatgtgttgcatattttattttctgtcagagcatttgtgcccataacgccttaatttgtcagtgtcaagcaacaatagtgctattctaaacttgttctttggctaactgtataagtcattatatctatattgagatgtaggataaaaagctctaaatgttttcctaaaaaattactaatgctaccggtatatatgcagactaacctaaaaaattactgcacacacaaaactaaaagtatttatatacccatttttaatcaatatatgatcaaaattaaagtcttcttatactgagagcttagaattgaaaacttataatattaacttcgtctataactttttacaaggtcaaaaagtcttctctacttttctgttttgggtttgctcgatcataaaattaaacatattaacttaaatatatttttagttcttaaaaattgaatcattttttttagtttttttaatccttcaaatctacaaaatattatttttaattcttttgcagaatgcgagtgaaacatgaaataaaaattcacaatttcataaccaaaatttgtttatcattttatattttaaagtactatttctaataataaaaacctatcatgattaagttagaaaaaaaataaaataaaagtccattaacaactttaaaaattattttattttttttattaacttgattttgacggtttcaaaccatcaaaaaatcatattttaaaatataaaatagaaaatcaaattctaatgataaaaaataccaaaaactataatttttttttattttctatttgactcaaaacttgtagaagaactaaataaaaatattttataaattttaagaaaaaaaaataactttaaatttaaaaaactaaaaaatgacttatatttaagggattaaaaagatatttaaatttaatttcattcatctttaagagataattaaaataacttcctgaagctctaatgcttcaattaataatttttcttataattctatttttcggtcttttacaattttatttcttcaaaagaaattagctaagtgagttaacctagctagcttcagctagctaatacgtttaacaatgttctgatttaccagaaaagtgaatcaagttattctggttaattagagttaaacccatggtggaccaactaaatgaatttttgttatccgattaattttttgcaacactcgatctaattgccacaaatttgacgtcgtgacaaattaaatatcaagatgcatgagttgggtattgttgtttcaatagaagtcaccagcttaatgtctttaatagtttaatagttaatttactattgaggagttaaaattaatttactactttggtatgtatttactatttacaaaatagtaatgagtctattaattttatgatatcatttgtaccactttaaaatattttttatgaaacaaccagaaaccatgcaaactttgattcacacttatgttataatttcaattcttgaaaatggaataatctttatataatttttatgatatcatatgtaccacctaattgaagatattttttatgaaacaatcagaaacaaaaactttgattcacatttaggttataacttccattcttgaaaaatggaacaataatctttatatattttttcttctcatgcagccacgaattgtctttatgatgtgttataggattctctgtcaaatcaatgtattcttaattacttacccagtaaaagaaataaatttctctaattattttaatcaatattttaatttcttgaattgaaattaaatatatataatgagatatgtacaatttattattaagaaaaatattaattaaatgtttaatattttgaaaaataaaattttaaaaacatttgtgttttatattttttattcacatactttattatcaatgaaataatttttctcaaatattttaaaaatttatacatttattatttaatatttcatatttatttataaacacttgtgtaatagtagcatacaaaatacttattaggttatattttaatttttacctaaatggaaaactacatgttaattatattaacacttaatgtttttagcttaatttccatgtactgtgggtataacataattagactgttaattaattaaaaatgtgagagatttggctttttctggcggttacgataaaagttaataaacaaatcatatataattagttaattttgtattaattagattattgattgaaagatgatgtaaaagttttttcttagcctatatactatctacacttctttttttgtttttataataaaaactaaattaacttctaattattaatatatgtatgatatcgatccatgcagtggagatcccacttttttggagcccttttgggtga

SEQ ID NO: 2523 - DNA, 1750 bp, Glycine max
  Intron number 1 from transcript Glyma09g32240.1 (locus Gly ma09g32240) derived from phytozome v7.0 (chr-ID Gm09; pos 38789002 to 38790751)
aatcaaatccacagacaagcttgaaaccatttcaggtaaggcttctaacccgccaacctactccgttgttgttaccatttcattttagggcttttttctaatcaaaattggaaaatagaatgactgtgtctgtgtggttcctcccataaggtgtttgtgaaaatgctacaatgaggaaaatagttggatagggttttatttgtacttctattgttgcttgttgaagactgtatgagtagagtagaattctgtgttttttcacttacacggatggcttaggaatgctggaactttgttggattagaagagtgttttttaatttttttatttaggtataggtaataggtttggggtgggttatggtcatggtctagccaaggtgaaaggaaggaatctgtaaaacatttatacgtgcaaattgtttgagatgactcctatatatgcttctcaatcacaaaacagaccatgtgtctaaggcagcatgaggcaaaatgtatgaccatgctccagatttattgaaaatcataattttttgtaggtttcacttgttatttaatgagttttttttcctgattttgtagttttcaataattttcaatctataataaagtgtgtgttagaagagtatgttgctagaacttctcttatgagaatcaacattggagatctccaatccatgcgttgttatcttgtgtaaccaacaggtgctggggaacattatcaatttgtgttatcctgagatccaatgggagcaggggaaatattgttaacacaacggtctttgatttatgtgtccatggaaaatgtgtttgagcaatgagcactcagaagtcttgtaaaattttgcaccttacagttacaggtatctattgatatatacaaatacttgtttcgtccctaattacaagacttttaattcatgcctctaaagaaaaatagttattacatgtcaattatttatactattattctaaaattatttttttattctctttttatccacttttttttaatgttggaaaagagaataattaagtaaaaatatataaaaaaataactaatatatctaaaaattaaaaaaaaatcttataaaaaaagacgaacatattttttgaaaataatcttataaataaaagacagagggagtaggaaattgtattttctcgttgcttttaactattagaattcctacctagttttcaaattcacaacctcctctcactaatggattcagattgcaagaaaaggctagacctacccagcaggggtaggatatggtctattgcctcctatgatgttataaatacctacctcatgaggcaatagttctaggctttattttgcataaaaatctgtactaaaaggtgacgaataatacggttcttcccttggaattagcagtggaatagtctgccataatttaaatcttgtaattctttgagtttccttgttcacacataagttagagagtttagtatggttgaagtgaaaatttacgggataaaaagtgaaaacttttaggataaaatagtttatatgtggtgttacacttgctgccgaacgggttgaaaaatgatcttcaaccaaagcacatatcctttgtcttcaaaaaagaaaaaaatgattcatatggtgattttgttaatttttcacagcctgagacatcaagaatttgtggtactcttattaattattcctgtttaccatattttcagggttttgttcgttctgatacgagttttcttatttc

SEQ ID NO: 2524 - DNA, 2215 bp, Glycine max
  Intron number 2 from transcript Glyma10g02140.1 (locus Gly ma10g02140) derived from phytozome v7.0 (chr-ID Gm10; pos 1502646 to 1504860 reverse strand)
ggacgggtggaccatttttcaatctgctactgttggtaagtattaaatttagagtgcagcaatgcattcggaaggtccccttaaaaatcggttcgtcagcattcatcgggcagaatatggctctgataccatattaaatttatagtgtagcaaagacattcgaaaaattcccttaaaaaccggtttataaggggtggcctaccgaactatataagtacttatcaaaatttgctaaacatccaatgtaggactattttcaacagtaaatatgtctttcttcttcccaccttctgctactatttttaattagttatgtttttttcttggtttgatattccaactttgaaaaataaaaataggtatgatatatagaatggtcataagtgagatttgattagtagctcggtcacttaataaagttttataaatgctctactttgaggctggcgttgtgattgttaagtcaaagacagagaaaaaaaatcattagaaaaagttagaacaagacaacgaaaatggcaacttgatgcacagcccacatgttggtttaaaaattattaataaactaattttgctaggtgattttgtagttaaaatacataaagtagatgtgggaagatcattttaaatggtttggacagacatggactacttgggtttgtcaagacatcgtgcagttcctgcattgcattgaaaaatagcgttgtagaggttgatgcatgtaattatcttttgttttgttttgtgtgtgtacactagtaaaatcctacctcttgtgagaataagcacaacttagttttgaatgtttggaataaaaccaaggaaagttcaaaagataaaaggctttgtcattttaaaatttttgaggattctgctttccgtgattgaacataatgctgaaaaaagataggtgatgagtgcatgtatatatgtttaaagactattttcaaaggcatcactgcaaatttaaactaccccagctatcaatgacgtatgcatgaaatataaatagtgtcaaagtgatgctagtattattggttacaatgctgactagctagattccaaaatgcttgttttttttttgtgatcattgcccgtcgtcaactattcctgttatgggaataaattttgaagactctaattttgtgttttcagtgttctgtttggtttttccagttatattgcaatccagtaatatcaattggacttctccatcagacaacgggtctcaatcacaatgacattagcaaatatgtattgtaaataaatcaaatttcttatttcttgttaaaggtagcagtaataaacctagatttgggatctcctgcccgaaagcatgttttctttattaatattttccgagctatgagtggtgacaccattttttggaaagaaaatgacgtgagtaatcttggtgaaagatagaaaaagaacagagaaaaaaaacataaccggtgtggtctaatgagaagaaataaaaatagaattggaaactcttttataagacaaaaaaaaaaaaaaatacatgcaggcagaggtaggactatctttggccttagatacatgataattttatttatattttcgcgaaaagtagagttacctctatggttggtcaaagtaaagggtccacatgcctatccacgcccacctaaagatctgcataattctcatcacaaccaaactactttttcagtgccattaggtccactttgcttgttttttcttctatgcttccccttttacttttctgcttttgctcttaacaaataaaaatgctttaatttcctcttttgggataacatggataaaagaaagtgaattttatgatctttattattattcatgtgacaaataatgtgcagtacaaagttaacagacttttagttctctttcttcgtttcaatgatacctttatgttgagtttgtgtctcccagcaaagtttgctctttattgttcatttatgaataatgatccaaaatctaatcctaacagcgttgacaataatggtatgttgcaactattcagttgtaactcagttggcaacacatcttaagtttatgaaaaaaagatctgtgttcaatccttacaagaaaaaggatgaataattttaaatgtaattaagtctcgaacagaatgattatgattgttgttaataaaggaaaatggtatgttgcagctgttgtaggagcaggattcatagcaaagggtata

SEQ ID NO: 2525 - DNA, 835 bp, Glycine max
  Intron number 3 from transcript Glyma15g42900.1 (locus Gly ma15g42900) derived from phytozome v7.0 (chr-ID Gm15; pos 50333792 to 50334626)
ctgttaaaccagttgtcctcacagggtcattgcaggttggttttggcccctttataattgatatgtgatattctgttcaatcaaattcttatacttgtttagtgttgctagtgtatttttaatgatgtttaattatgtctttagttcttttttttatatatgattttagacttttaaaattgtttgttttggaagtatttcacatatcttaaacattttgaaatggtttttttatcactgggtagtagttacttagtggtgatattgatgtcacatttaatcatgttctgttgtgtcattaaccatattgaggtgcatgtgacgtgacataactggatgtatgttatgtcattgttaagtggtggcatggattactttaagaaatgagtaaatacacaattttgtttttaaaattcctgaagaaaataaagttaccaaataatccttgtaaaagtgagatatttttgtccttctattcgttgaatgtattgacttgactaaaatgtcccatatttataatcttgagggattaaattgctactttattgtattagggatcaatctatctcattttttttatggatcaatttgagtattcacccttgaataattttaaaatatacaaaaaacaaccattcaaaattaaatttgagggacctacatcaaataaaaccattttgtgatggctaaatgtatgtatattttacttaattatgttaatgcaaccaaaaggttcttcaggtttttatgtagtgttgtcttatttactgaaatataacgcaatgaatttcccttgatgattgcaggatagcttttttgccagctttgcccttgg

SEQ ID NO: 2526 - DNA, 991 bp, Glycine max
  Intron number 10 from transcript Glyma08g17110.1 (locus Gl yma08g17110) derived from phytozome v7.0 (chr-ID Gm08; pos 12534808 to 12535798)
tcagacagtactaaagaaaaaagtatgtgatttctagtttcttttcaccccaacacctattgtttttagttcttacgcagattccatacttttttttttaaaattagaaaaaaatgtgttgtgctctatctgtctagtttcatttgctctattgtaatttgagacttaagacgataatactactgtagttgtgggtctaacattggtgatgccgaaatgatgaggatatatttcttctgcaggaatgccagaaatgctcttgtagttttttgtggaaggctttataaaatagaggattaatttaaaagatcatttacatataggaaatatgaaattatatgattgctatgcttgaggcattattagctaagttcttttgggcatgcaactataaagagacttgtagacaattattgatatatttaactctgcctacacaaagattgtctaacatttaagcaagcctaatcaacagcttttgaatcttcatagaagaaaacgtctcttgaaactgaactttcattgacctcaatgaaatgaagctgtagctgtccagaatcttgtgaagatggttccttttagttccatgttagctgttagtcagacagttgattttggttattctccggaaaattaatcctttatttttttgtgaagatcaaccctggtccataaatatatgttcttatgtgtttcccctacaaatagaacccgggcttcataataaaatgaacaaatacaatcaaaatgatcaattatgagcattgacttttaggttgcaacaaattttaactgagaaaatatagttcatctttttctcattgttattgaagagctgagtcaatggataaatgacactgaaaataaatactattatctaatctgattaactagaaaaattgttcataatttatatcactgttattttattagtagtttggctggatattgtgtaagctttgctcattgagtgttaaaaattggtctgcag

SEQ ID NO: 2527 - DNA, 4621 bp, Glycine max
  Intron number 1 from transcript Glyma09g21230.1 (locus Gly ma09g21230) derived from phytozome v7.0 (chr-ID Gm09; pos 26169952 to 26174572)
gagtgctcgggattatccccttgtcacccagggtaatgccaatacggtaatttctgttttggatcgtgggtttgcactgtggatttgcttttttttaggtagtgaagtgttgggattgttattatgtgttgttgttgcttgatgatgatcattggaatgtttatgcaaaattttggtcttcatttgttttgttttggtcttagactcttagtttttggttgagcaatgtgtgtgagtattgtaaacctcctattattgtgtttaattcctacggataaaaaaaggtaaaaagacaggatttccctttgatttggttgcagttaacaaaataaatgtgtcgccatagctaggttggaaccaaaacaaaagttgagcggaccccaagatatggtaaagaagtttggagttgagaatgatggaggggttcaatgtaaaatggggaactagtagtgaagtgttgggattgttattgtgtgtgtatttgcttgatgatgatcattggaaagtttatttgaaattttggtcttttgttttgtttttgtcttagactcgtagtttttagactcaaaggtgaaaagacaggatttcctgctgactggttgcacttaacgaaataaatgtgttgttatagctggtttggaaccaagacaaaagttgagaggaccccaagatatggaaaagaagtttcgagttgagaatcatggaggggttcaatgttgttagatttttatgttagaaaagttttattgtatcttttgttgtatctagtagtactggtttacaggagtctagggactctctagtctcccctcttactgtaaacttcttttaaatatgtatatatgaaaatctgctgagtgtgagacactcaaacattactctcaactaaaatggggagctagtagtgagaaagggatgtggaggtggaggtagtagacgtgtgttcaagggggatttggggagcgggggggagggagagataaatggttgaggctcttgttacagcctagagtaagaagttattgtttttaaaagcaataccagattttgtggtagttagagattcataaaacatttccctcaactctgaatgaactttgctgaaattcttcttgtggttggcttgattcgttttacttgtgaatgattataggttatttaaattttatgctcatgaagtcaatttttacatttacccttgtgctgtttatcttgtttggtaatacatttcattctcccacaaaaataagttttaactggcatgtttggaaaaatgctttggtatctcatttattgcttgatggaagagaatggttgtaagctgaatatgttatttgtttcatagacatttaatatgttgaatgtttatgattgccataatctcactagagagaaactgagaatgtcatgtcttccaattgcttattcttaatttggtgatgatttgatatattgtaacattaatcttgttatactgatttaactaatttgattgatatatttaagcattcgttcgaaaagaatccacgctaaaactctaatgttgttatgcaaatcatgaatataggttgcaaaaagacttaaaagactctaaagatatcaaaggaaaaggcacaagatcaacaggttggtgagaccaagaggataataccaaatgagctcttgctagtagacttattaatggaactattttaggcaaactcagcactatgaaatactagattggaatcacatattatcccctgaaagactcctaagtaaatcacctagatcatagttaacaacctcagtttgactttcttatatgggtgcaaaacaacagagaatttcaactaggtgccacacaacttccattggatttccaaaagtagctcataaactttagccctcttacttacatcatagaataaggcagtcctggaaaacacaaacctctttgaagaacaactaatcaacattcttactacaagggaaaggaaggagctatcttagagaatctatcaacgatgaccatgaccaaatcaggggttcttgcagtatgtagcagtaaaaaacttatacattttcaaacctctccgaggctcatgaggaattgactgggtagtgtacagaccagtgttttatgccaaataacattacctttgaaacttaccaagggctgttctccatatctccccatggaatccgttggtaaaatatcccagtgcttgttcttcaagtagctatgagatttgagctgtcaccaactcaaatccgttgatgtactctgccattgtttctgatcattcaatcactgcaagcagtttatacgggattcttcttatttatctctgatgccatctctcatttcaggtgtaggattttgtttctcagacaatgaaaccaatggccagtgctaccttagggtgtgttttgtttgcattttcattttctgttttcatttcctgttttcattttttgaaaactgttttcatttttaaaatattagaattctacatatttggtttgatttcttgttttctgctttcaagaaataaaaacactgaaaatgtcttttcaaaaggaaatgtatttttagatttgcttaaaattacattccttgttaccgcgttttcattttacccaaaatgaggttcctggtttcaactgaaaacgagattttattgttttcaatttttggttcgtttgggaaaatattttcactgaaaatgaaaacagaaatccaaccaaatacatttctatcaccattttctattttcagtgaaaatgaaaacaggaaacaaccaaaccaaacacccccttaaatacttataaaagccattggaatatttgcttctggactactaccctagatttaaaatatttttcagcatacaccaacaatccccacttggtctgtaccatcaagatttggtagttcagccttcttggcagccaatctaactttagtcagtgtctcagtactttgcagttgcacatcactttagtttcctctagagaagcatgtacctctttctcctcaacaatttagcaatcatcagtttcttctcatcaaaataatccaactctgtttgcttctccattacactgagcttcctttgcaattgcaacaatcacaagcttcaattataatcttcaacaatacaaaactgtttgacagcctcagccgactcactccctgtaaaacctatgctcactgccagagtagttaatagcacgccatagtgttgctatcacgctggtgcatcatatctcatgatggccccactccttgcaactgagtcacgttgtacctggctgtcttaggtggagtggcacaatttgcagctgctatggcagctgttcacggctgctatttagaatatggggccgaagacttttttgcccttgactgagtgctgtttcaatggtaaaattggcttcttggggggagttaaaattggacagatttttaagttaatttgtttttggtttcccttacatttattcatgtgcccttgcaagtgcaagccccctcaagagagctctttactgcactcctccagattccagaactgcttctcactgtcgcacactgccgcgcagctcttttcctgccaatttcgggcgtctggtctctgttctcatcggtcgtcataagtttacgaagacccatctcttttacagtcaatttccagtgatttccttttgtcactgttgtggcctacccactaccattttaacctagtttctacttttttcttttcagttgtcttcaatctctctaaaaatgttgaaacaacaataatttctctttaattttaggtatttttatttatttttcagcatatatacatgtgtgatgtaaatctatgtttagggttctaagtagtggtcatcctgccataggctattgggtttgtggggttgcgctctgctctcctctgcgctgttatttgggattgactactgctgcctccctataacaaattttctcacctctaaatgtctagggtcctgtggatttttttttgtcactcacatcatgtaccatccgctttgctggtttgggctttctactaatcagggacctaacataaaatagcacagaagtgtttgatagacactccaaatgtgaaatgtatttcttttttctattcataaaatatcctgagattgatgccagtgaactcttgcacccctgtcccccactttgagggctgggggatcccaaagtcttttttcaggctagacttcagtttatcattatcctcttgattggctagtggcaacattctattctgtattggttctactttttgtttggccagacataaccctgttgtttgtaaataaactttgatgttcatcagatgccaatataactgggcatctattggttttgctctatattattgtcgttccaattcaagaaatgctgtatatgactatttttctgaactttattttatattatcggtgaagaagtgctgtatatgactatattgtctgtgttttattcactgaataatgctatgccttgaggcatcactcatttttgtttatcaatatatcttgtcttctttctgctgactttccaacttacaaatcggcactcttttatttgtatcagatttgtctc

SEQ ID NO: 2528 - DNA, 1485 bp, Glycine max
  Intron number 3 from transcript Glyma13g02450.1 (locus Gly ma13g02450) derived from phytozome v7.0 (chr-ID Gm13; pos 2320282 to 2321766 reverse strand)
cctaaagcttcggttagagaattacctgctgaaatactgtttataatttgttttttgcaaactttattctgttttagattgcatagctgaattttatttcttatagttaatctatatccacatgtagatcatcttttagttaatattttgtatgttaaattttatgttggtggtaacttaattagtataaatttataactagcttgtactctaacatgttgagttagacttgtactttggccctttattttattttgtttgcattggagtgctatttagaggtaaacaacttagttgaggttgacaatttgaaaagtgttttgaatggcctggaatgcttttgatggttaaaaactgtttgaacttagttgaactcgggattaagaagtaaatattgatgaaattggtagatgagatgagtatgttacctttattttttcttttgttctttgagtcatgaagcatatcatttatatcttcaagtggtttcttattagtcatatttgtatgcaacttgcacactggacggacatgacaaatatttcattttacaaatactacatgctgggacctaaatctgaaaatgtcatcaactgtctattctataaacatgtttactttgatctagtgtacaagtctgggtctagtggttcaccaatttgtatccaagtatttccctgttcgtgtagtctggattatctatctcttcagcatctcttatgtggcttattcatgtgctgggatgatgtggttacttggaaaaacaatctaacatgatttgatattcaattgcttaggaaaattcctttcaatttcttatggtgggcataacagtcatcattttttaaaataaaattattgtaaaagcttagcaaagaaatgcaggagacatatttttatgtataactataaccttgtacggtcaatttatgtcatgataagctgacaacagacgtttgcatgctttgttaggttataagtatttcaatgtcccttttaatataatccaacatttgttcacttcttttgctacctttgaattcctgcaatcttaaattgtttttccatgcttactctggtttttatggatgtctctattatacatgaatttgtgatttatttagaggataattgattctgtgaactgtcaggtttggtcttaatgtttcattaaaagtgattttgattgtacaatactccatttgttttcatgtaaatatggaaatctgtggaggagtaaggattatgtataggatgcattttttgttttcaatctgtcaatgatatcaaaagtggattctaggcatacttccaaaactttgggaagtttgtattgtctatagcatcatgtgtgtattactttgttgtgttcaataaaaagataaatttatgtgttattttcttttctgttaaagtctttgatgatgatttattgtaattttcttttcaggttcataattctgagaaatcaaagcccaaaacagc

SEQ ID NO: 2529 - DNA, 9783 bp, Glycine max
  Intron number 2 from transcript Glyma07g29650.1 (locus Gly ma07g29650) derived from phytozome v7.0 (chr-ID Gm07; pos 34640932 to 34650714 reverse strand)
tgggggatatagttcaggtatgttgttattctttcccctgaattgtccttaaagtaaaaaaaaaaaaaaatacttaagtagtgttggaagtattaaaaatagttctaaatagtcttccaaatatataagaatccttcaaattggtacactttactcaaatacgtcaacttaaggactaaagtgatagatgttcaataatcaatactttaaagactatttaaaataggtttattactttagggacaacttaggagagagaataattgatgggccacagattacgggcttgggagacacgaggagtagacccataagaagaaccaatcctcccaagtatatgaaagattacgcctgaagcaagctacgatttcggttaagagaataatgtgctggctcgctaggattagttagcaccaattaaagagaatatcttgtctgatattctgttatagtcattgtagtgttgtctgctattaattttgtaatgttgtctgctagtaatagttaattgtagtgttgtccatagtggtgtatttccgttattctctgcttgatcattgccattcaatacctaggaacactatatatatatgtagctgcagaatgtgaaaggaggaaaaaaagaattatcagttttctttcatctaattttggaggcccttagtcctcgaaatccaaggcccattctacaggcataacagtttggtgctttaattgagcttatggcggatttcactcggtttaagtccaatatggaccgcattgaagaagccattgccaaactcacctccactcaacttcatcttaccgctacccagaattccctgtccgtcaagctggacgatctacttcagaaattcgcacagatggaaacaaacccctactctccaatgtcgtccactgcaaaccagcatattgcaacacagtcctcaaccctacatcgcatgaagttagaggtcccgcgttttgatggattggatcctatggggtggatcttcaagatcactcagtttttcgagtatcattccacaccagactctgaacgattgatgataacctccttctacatggatggctctgcacttgcatggtaccaatggatgacacgtaacagtcaaatcacctcttggtccggcctcgttcaagctcacgcaatgcggctccgttaacgagtacttggccgagtttgaaactctagccaatcggattgttgacttaccaccccttttcctgctcagctgtttcgtttcaggattagctcctgagatctgtcgcgaagtgcaagcattctaacctctgacgttgattcaggcagtttcactcgctcacctcctggaggagaagttttcggactcttgccggatgtttcgcggtaaaaccaacaccaatgttcccattggatcttttcccatttgtcccttaccacctatatcatccccacccttgctgcccctcccacccaagccttccccagtacccttcaaacgcttttcctcgaaggagatagcaatccggtgtgagaaaggcctttgcttcaaatgtgatgaaaagtttagtcgaggccacaaatgtccttcaaagatgttcttttgactgccgacgaggatgctatttcggtgggcgaattccttcttgtcgattgggtccaggaagaagacacaacagagacacaatcgcaggcccaaataagcttgcatgcactctcgagccatatggccccaaaaaccttacgcgtattgggtcgtgttgccaatcagcaggtgttaacattaattgatggaggtagcatccacaatttcatccaagagctactggccacaaccttgggccttccaacgcagcccactccaccgttgtgggtcttggttggcaacgaacacgaaatctaatgtcaccttctctatatgaaggtccttgtctgtgttcaagggcaagaattcatggtggatcttcatgttcttcgattatgcgacgaagatcatgtattgtgagtttagtggttgaaatcgctaggacctttcgtcatagactataacaacctaacaatgaagttcatgcacatcgacatagcttgaaggcagggagacacgaggagtaggcccataagaagaaccaattctcccaagtatatgaaagattacgtctgaaggaagctatgaatttcgttaagagaataatgtgctggctcggtaggattggttagcaccaattaaagagaatatcttgtctgatattttgttatggccattgtagtgttgtctgctagtaattctgtagtgttgtctgctagtaatagctaattgtagtgttgtctgtagtggtgtatttccgttattctctgcttgatccttgtcatttagtacctaggaacactatatgtatgtagttgttgtaaaaccttaaggggtttcctagattatcaattacatgatcttgaaacctatgattctcacaaacaatagataaacaaataatgcgtacctttctccataggaagacttctctccggtgtactttgatttccttggaagaggagagaaataagatttcacttccttagacctttctttatgcctctctctacgttcgtgatggctatgggtgagagaaaacacttttctgtcaggaaggggaccttatttcacgttagtgggtgttaacccccttttataaccactactctcatcaagtagtagttaaccctagaaacttctcctattaagcccaattacaatttagctcttaattattaattatttatttattagtccctacataagtcacatgtctctcacatgagacattaattctaacattctctcacttggctcatgtgatattaataaacattatgaactaaataaataaatagattaactaacataatgcacattaaaaaatgactaaattgttttatacattggatacatcataatttcatgattaagaataacaaccaattcgagtcatggcggttgtacatcacctaatcgagatagtcctttccatgtactacaaattagtcttctccttaatatgatcattagttaggagtacataattggttcaacataatatctttattcaagacaaacctgttaactttactctaacacaaacatgcatgtaaatataaagaataggtaatcagaaacatatcataaatgagctcagagtgtcagcaaaaatacataaggtaaattacacttaatgatcatcaataacaataatgcccatattttcaacatgttctataaatgtcttaggtggtaatccctttatcaaaggatcagttatcataaggtttgtgctaatatgttctattgacactctttgtttctgaacttcttctttcacgacaaagtacttcaattccatatgcttagcacccttagagtacttgtcgttcttagaaaaaaaaatactgctgcggagttatcacaatacattttcagcggcctagcaatactgtcaataattccaagccctgaaataaagtttcacagccaatagcctgaattgtagcctcaaaacatgttacaaattcaacttccatggcggatgcaacaacaactaattgttttgcactcttccacgatattgctcctctggctaagagaaatacaaagccaagagtggattttcttgtatccacacatccagcaaagtctgagtctgaatatccaatcacctcaaggtgatcaaacctcctatatgtaagcatgtgatcttttgttccctctaagtatctcagaactttctttgcagctttccaatgttccattcctggattactttgatatcttcctaacatttcagttgcaaagcttatgtctggtcgagtacatatttgagcaaacataatactcccaacaactgatgcatacgaaattgcttccatttgcttctgttcttgatcatttttaggatattgtgcgagactaaatttgtctcctttctgaattggaatgggagatgttgagcacttttccatcctaaatctctctagtattttattgatatatgctttctgagacaagcctaacaatccttgtgatctatttcagaatatttctatccctatcacatagcttgcctcacccatatccttcatttcaaagttactagaaagaaacttcttagtctcatgaagaagaccaagatcattagttgcaagcaatacatcatcaacatacaggattagaaacataaccttactcccactgaccttcagatatatacaccgatcaacaatattttccttaaatccaaaggaaacaatggtatcattaaatttcaaataccataggtgggaagcttgcttaagaccatatattgatttctttaatttgcacaccctatgttcctttccttcaactgagaaccccattggttggtccatataaacattctcctttcgtgagacaggtgaaaacgtctctttataatcaatgccatcttgagtaaatcccttagcaacaagtctagccttgtaacgttcaaggttgtcatgagagtcacgtttagtcttgaagacccacttataaccaactctcttacaatcctttggtaattctacaaggtcccaaacaccattatgttccatggaatttatctcttctttcatgacatttaaccacttctcaaaattatcacaacttacagcttgtgaaaacgaaactggatcattatcattagtgcttaagtttgtttctgtttcatgtaggtataccacatagtcattcgaaatagctagtctcctttctctttgagacctcctgaatgctacttcttgcggttcgtccacaatgagttcattgtgtatcatgggctcattattgtgttgtgcttcttcattattgtttgtaacaataactgaaggagcaatcaccttactgctagaggcacaagctaaagggacttgcactctaacttctttaattttcacttctcgtggaactgtacttccactgatttcaccattttcaatgaacattgcatttccaatttcgacaattctcatactatgattaggacaataaaacatattaccctttgacttttctggataatcaatgaaatatccactgattgttcttgcatccaattttctttctggcggattataaatccttatttctgcctggcaaccccaaacatgcagatgccttatactatgtgtcttatttgtccatagttcaaaaggtgtatttggaactgccttactaggaaccctattcaacaaatacatggtagttttcaaagtatatatccacaaagatacgggtaaagttgaattgattaacatactcctaaccatatccattaaagttctgttatgcctttctgatacaccattttgttgtggtgtaccaggcattgtgtattgcacacaaatgcctcgtttctaaagaagcttagcaaatggacttgagtaatgcccagtttcatcatattttccgtaatactcaccacctctatcagatctaataattttcacctttctatctaattgtctttctacttcattcaagtaaatttccaaggcattcactgcctgagatttctcatgcaataagtagacataaccataacgtgaataatcatcaataaaggtgataaagtatctttcccttctaaaagaactaacatcaaaaggtccacaaatattagtatgcacaatttcaagaagttgagtgctccttgtagctcctttctttgcatgttttgtttgttttcccttgatataatccacacaaatatttagatccataaaatctagatcaggaagaatttcattctttattaatttttccatcctttctctagaaatgtgacctaaatgtttatgccacaagaaagcagatcgttcattcactaaactacgtttagtgccaacattatgatgcatagttaaaacaatttcagcatacaaaccatctaatttcaatttatataaaccatcacaaagaacaccagtaccaatgaaatgattatgcttaaataaaccgaaacatccattaccaaaattaaaagagtatccagtaacataaagtttagataatgaaactaaattcctagataaactaggtacataaagagtttccagtaaatctaaatgatttccagtgtcgagttttaaatgataagttctgatcgcttccactggagctttcactttatttcccatgaagacaaacttatcatttgggcttatggtctagattgtaaggaatccctgtatagtgttagaaacatgagttgtacatccaggatcaatctaccatgtattatagggaacttcaattaagtttgattcaaaatatacaagagcattaagctcacctttctttttgaaccaagacttacgctttgggcaatccttctcgaagtgtccagattttccacaaaaatgacaattattgctctttgatgttttttttctggatttgcacaggaccgtcattgatctttaatggccctttgcctttatcatgcttcttcacaaatcttttttcagctccttgattccctcggtggcttacataatggactgagtgacttccttgattcttaagcctcatttcttcctgaactaacatactgtgcaatttatgcacattccatttatctttcatggtattatagctcatttggaacatgccatatttagacggtaatgagtttagaataaactgaacaaaaaagttcacattcacagtcattcccaaggtcttaagtcttgctgcaatgtttgtcatctcaatggcatgttcatgcatagtacgcgaaccatcaaacttcatgatggttagtgtactcattaatgtcccagtaagagacttatcagctgtttgagagcgctttcccactaatcccataaactctttagcagtatcgttcttagggagaactttcttaatattgtctgcaatagtcattctcatgaacattaggctgtgtctgttagatcttttccaagctttataatgggctttctctgcattgctactagcatcagtaatagtagcaggcttttcttccaatatagcaagatcatgatccaaaacaccgagatgaaatttgacttgctcattccagtcagagaagttaagcccattaaaaattggtacagatgatacatgagaattcaatgagttgggaacagacactgcataataaaacttcacataagcattttggtacataaaacacaagtcgtacatataatttactcagataacaatcaatgtatattgatgttctcctttgggtgatacaccaacacacaacatacaaacatgatgatgctaataaaattcttaacattatttgacaattaaatatgcaccaattagtagtatctatttcatttgggtatataaataaaactaatgatacacacaaatcgcctacaattatattcatttaatataagaacaactaatcaacctttgggcgatccataaatgccttataacaatgaatttcaattacccataaaccaataatcatataatttagcatccattattctatgagtaattgaaataatcattaatttggaattaaataaccttataaatttggccactttggtgactaacaaattcaagatacatttaattccaatcaaatatatatggcctgcacatacttattgctattaacaattcatagccattctattaatttcattctaggccataaaataatattcacatttatttgtgttttgcattcaaacacgttcaaagaaatatgcagcatatagatatacttactgttaccaataatttcaaagcattcacgttaatttaattctaagacataagctttcagtcctttaatgacattcaataataatttttgaaaaaaaaaacaactgggactgaaaatagcaaaattgggttgcaaatagcaatttcaaaattccttcacccctatcaacaacgtacgtgcagggctgcggatgttttctccgttagaaacagaagggtgttgctaggtgcacctagcattattgctggtgcacccaacacttaacatgaaatgacaaaaatacccctatgtatttttaaaaatatttttgtgcacccagctcattcaggttgatccgcatatgcaatgagttgatccgcataggtattagttgatccgcaattgatatagatgatccgcaagcttcttacgatcaagttgatccgcaagtagatttttaagacttacggatcaagttgatccataagtcttttacggatcaagttgatctacaagttgatttttaagacttacggatcaacttgatccgtaagtcttttacaaatcaacttgatccgtaagcttcttacagatcaagttgatccgctagttgatttttaagacttatgggtgcaccagcaataatgctgggtgcacctagcaacactcgctgcaagcttcttacggatctttctttctccattcaatacttaggaatcaacttgatccgtaaaagacttacgaatcaacttgatctgtaagtcttaaaaatcaacttgcggatcaacttgatccgtagagggagaaagaaggcaaggataattttgccatttttaaagaatgttgggtgcaccagcaataatgctgggtgcacctagcaacactcgaaacagaaatagcgttaatgactttctttctccattcaatatatgttaaaggaaaagtctttctctagacattatcatcaaattaaattacatagtacaaaacgataaatatgaaatattttcccaaatttaatatatacaattcaaagtactacaaacataataagtttttcttaattgaacgcaatcataataatataattttacgcattcataccctcttcaatataagatttcatactagcagcggaaagtaaaaataaaatccctaaatttcataattagggttcatgcataattgggagaaattaaatcattcttgaagaatcataaatttcataacagatgctctgatatcatatgtaaaaccttaaggggtttcctagattatcaattacaggaaaataacaggattttgaaatttatgattctcacaaacaataaataaacagataatgtgtacctttcttcataggaagacttctctctccggtgtactttgatttccttagaagaagagagaaataagatttcacttccttagacctttctttttgtctctctctacgtttgtgatgactataagggagagaaaacacttttctgtcagaaaggggatcttatttcacattagtgggtgttaatccccttttataaccactactcccatcaagtagttaaccctaagaacttctcctattaagtctaattacaatttaacccttaatttttatttatttatttattagtccctacataagtcacatgtctctcacatgagacattaattttaacagttgtaaaatgtgaaaggaggaaaaaaagaattatcagctttctttcatctaattatagaggccctttgtcctcgaaatccaaggccattctgcaggcataacaataatactttgaggacaaattggtgttaaaatgtaaaaaatcattcgtttttgtttttcataaaaatattctatgtaatgttatttaaaattagtccttcgtaggctgatgcgaacaattgttatataatatgctttagctttagtcatcaattgaggagacaatatagttggttgaattggtttaatataaatgtttaggacaatgttgggggtacttttgcaggtttggagca

SEQ ID NO: 2530 - DNA, 1136 bp, Glycine max
  Intron number 19 from transcript Glyma18g40770.1 (locus Gl yma18g40770) derived from phytozome v7.0 (chr-ID Gm18; pos 49453995 to 49455130 reverse strand)
gaaattgccgaagctttcttaagtcaggttgacaggtaaaagtagatttttttttcagtaaccttgtttgatcctttgcttccagtgtcaaattccaagagatactgcagccctgcagtaatttttctgaacagctaacctcttcagcttctaaaatttggatgtcatttttattggatattacatttgtcacaaagtctaattctttatatttgttgctttcattgggttccatgctttctactacagaggcagtttagttgtgtggcttgttccatctgttcactaattaaagtagaaatgtaaatgttaacgtaatatgttatggatatttatacctcactttttctctactgtttttattttatttggatttggatcctataatgtgttcgatacacttttagagagtaaagtgtgaggttgataactactgataaaaaagaaaaagaaacgaaaccaatagtataaaatagtatatgcaaagagttaacagaattttaggaaccatgaacataacattttcacatatatgaagatgttttgatcaaatcaggatggataagatcaagaatgagatcattaggaagaaggttggagtggtgtgtatggaagacaagaaaattattctcaaaaggtgcatggtaagacgagaaagaaaaccacttaggtaaaccacatggttgaaaacataatgttgtgttcaaggggggagaaccaagccacttaagggctcccactgtcaaccaattttgataccaattgataagcatccaaacacttggggaagctctcccttaaaagcatagctgtaggggagagaaccgtcacttaagcattccaccgagcatcctatactactcgatattggacttaggcactgcataatacccaagccctacaaaataatttcttgaaaatcttcagttttgcttcaaacgtgcattgaggtcacttatcatatttcatttggacatacttcctttaacagtaaatagcattcctgcttcattgtgtttctatgcataaatatgaataaatttagtctagacttgatattgatgtcagaggaatatacatttttgcttgattctcaaacagtgctgctgtattccacaacgcaagtacaaggtttt

SEQ ID NO: 2531 - DNA, 669 bp, Glycine max
  Intron number 2 from transcript Glyma19g34930.1 (locus Gly ma19g34930) derived from phytozome v7.0 (chr-ID Gm19; pos 42523250 to 42523918)
atatacaaactggagaggaggtggctgtcaagctggtatgttaagttatcttcaagtttttaaccctcttttatgtctggatggggcaaaatgattaattagttaattgatccattgatgtgttcctgtttctgatttcatgtgtctaatatgtgcatttgtgaactcatcagtaatcaccttgatttaatccgtggaacatggttattagaccataatatatatgtcttgcacccattggagtgctttagaattccattttgtagatattgtcacttcagatgaagtctcctatatttttatcaaggttatgagagttccattaaggatacgtgacacttgatttgagagatagtttattatcgttggagtaacagaggaaataacatttttttcttacacttttactgagcaatacttatggattgcagtggcatgggaaatgctacattatctcgttatggatgcatactttagttcacattgttatgctgcagtttatcttagattgttcgtcatattctttcttttgttgtgttttgaaattttttatatcagttaatgatgttagtctgctcattatattctctgtttttgttcttaaccctctcgtcctctccctgtaaaatttcaggaacctgtgaagaccaagcatccccagcttctcta

SEQ ID NO: 2532 - DNA, 316 bp, Glycine max
  Intron number 4 from transcript Glyma05g37150.1 (locus Gly ma05g37150) derived from phytozome v7.0 (chr-ID Gm05; pos 40808402 to 40808717)
atctctactggtaatgttcatgttataatcaaatcttaactaaatgtctgtccctgccaaatgccaatcagggccttgctttcttaacccatgctttaccttttttctcttgattcgttgtaatttaacattatcttctggtgtaaaagcattaatttcaaatcttaagatttatttgtttatagtgtttgtagttgattgaagatacttcctaaaatcatattagcttttttttttatatttaaatttcagttgtagcacaactgattattttaattgatattcagctctggtggggtggtgttggcttctcgtg

SEQ ID NO: 2533 - DNA, 6737 bp, Glycine max
  Intron number 1 from transcript Glyma20g33110.1 (locus Gly ma20g33110) derived from phytozome v7.0 (chr-ID Gm20; pos 41715732 to 41722468)
gtgttatctgctgtgcgccttaggtcatcgtaccggtaagtttacgaatctcgtagcctgtaacatgctatgatgaaatgttaaagtgtttttgcaatgattctagaaattaacttcgattggtgggttggttccactctatctatggactgagtatggtggaaagttttctctgtttggaaaggaattacacttgcttaactttccttaaaagtggcttgtttccttcgaggcttccttttttctgctaattcttttatatattggatgaagggattctattgtttgattgtctgctgcagcaggggtttttgatgtatgcttttgtttttgcattagagacttgtttatgttggtgctgatttgtgtggtatgcatcactttttttgtctctttatgggagcttatgtaagagactatgtatgttgttgaatcatgacttccgttgtgcttttgttcagctttcttttgttaaatatattattctgtttacaaaaaaaataatttaggttccaatctcactacctatgtgaggacctttcatgccctggctcttataaatccctagtccacaactcacctaaaattttcattaccaaaaaacatggggtatattgtatctcatatacaagtaaacatattattgttccttaacctgcaatcctatcagcacaagtactagaatcccacacaactatatgaacatcattaggctaacagtctaacaccctacattctcttcatgcattccatgggttgagattcattgactatttatacaaagagaatgaaaagttctttatccttctagacaacctcgaccaagatctaaattaatcatatcaaacacaaaatctgtaatagcaacttcatgaatgaatacaacactatctctatgcagccgaagataccaaacaacagcaaaccaaacagtccaccattgatgtgttgaacaaaatggtttttagattccattggcagcatcactaggattccaagccaaccataacagttaaacaattatacatttctctagtaagttagcaagcctatgttaagagcccttaattgcaaattcgcaagggtttttctctcatcttcctgacttcatatatctcttcatctcatcttctcggggtacttctcggtcttcaattcattttaaacctagtttgtggattgtattgtcacctctaagctcttggtctggtatcttttctgttgcttgagaagttgcttgcttcacagtttcatgctatctattcaaaatgaggaaaatgaaactgtatttgtactaattcgattcatgtatgctacagaatttgaaattaatagttgaagattcatggtttgcctgtttaatccaattctattttgtttgttttcttattttagtaaaaagcactaattgttatttttatgtcagaatcaatgttagaaactagttaaacctagggagagtcaaggaggaaacttctaaatgtttgccatcaagttaaatgggaatgaagttagtgatgtggtgcttatataacactaagaaacaattttttttccttatcatttcccttttcctacgtacctatcctatataatttcaacatgtttgagtttctttcccatagttatgcaaattgtatgaagataattgctctatgtagcatttgacatgtttgagcctagctactttcaattttgacttggcgacagtcatgtcacccttcaaccaaacaaattaagataagacaccaaagcaacagccgaaagaaaatcataattaaaggagaatttaatgccataaatgtcagatgttgatggaaaagccctgcaatacaagtgccaaaaataataaaagaacaaagttatgacaaatcaaagcacacggagaacttttttctccaaatctgcaatacacgccttcttgaaagaaaaggtaaaacaaatttgtaacttaatgttttcaaagttcactaaactggaaaagtccagaatttaattttcttcaacatgggggcatgtctggcggtggtggtggcaatgttagatttttagactctccatccttcacaataaaaactgtctccataccccaagattagtggcgttctagatggcagtgcataaaccatactcctgtaattgaaatcacatgcatgcaattcatgtaacaaaattaaactctcaacttagaaaacaaaaaatggaaaaataaaaaaaaattcaaattaatagaattaagatggtattccaagccacataccagggtttacagcctcgaatctaatggcagcccatccatttataggcacaaccactgtattcaaataaggaggatcaacaagattgaaattcatgtggtccacgctttggttaaaattgcctaacccatatccaacaacatggaaactgtagccatggagatggatgggatggtctgtccctccaacaaggtttgttgtcccttggaaaacaatttcaactgttgcaccatagttcaacacattaaccctagtcccttgctttggcgtgttaaatgttataggcaaaaaatccccaatgaagttaaatataaagggtggaaatctaggaaatcccggtttaaataccccattgatatgacattttgtgttacaaatcataccattgtctgagaatcattaagcacatgaagcttgctgcatgctaccatttttgttaactttgttcaattccatattcttaagcttttgtttagacaccagtttactagttttacatagcagacattggtttctgaagaaattttttatcgcatgtagtcatattctagtttaggataggaaattaatttgtttatgtaaaataggataaaccgagggatatttgtgtgtaaactgtgagtcagagaacacaacagatgctcgtttatatagactgatagtaataatcacacataattagaggagttaagtttctcctaaatgggatatgtttcctacaaatcagatcctaatcaaatctatacattaaatgggatatgtttcctacaaatcagatcctcatcatcttcttagcataacccaatatctcagctttggcttcaatttcttcttcccatccatcaaaggatgaatcatcatttgaatcagtattgggtgcagcaagtttttcaaaatcatcccctgccttggatggttgaggctgagggtgagttaccacagctggagctgctgttttattttcttatacctttttggcaatggatagcttctccttaggctcatctatatccatttcatctttactctaatccttcttaaagtctccttcctctgcagcttcaacaaagacatcctcagtaaaccacttattcatgatctcctcctgggtgagctctgcctaatcattaagtagcaccaacaatggatttgctccttaatcaccctaatcttcatctgaatcatacttggattgaacaatatcatcatcctcaccatcctgaacaaccaaaaggtgataatataagtgtaacaaaattattttgcacccactcagctaaagaaaaagaaaaataaaacaataatggtgtttcttcccttcgaatgtttaaatattgaaatctttgcatttttctgttcaaaggttttgcaagtttcttgctatctgttatgctgatcctttgaattagtctaacaggtgtttgcataggttctgtatttcatttgtcattacttccattttgtcttctgttttgcttattggcaacttcaattcctgattcttctccaaaacaaaatttgtacctcttcttgcaatggcatgaactccttatgaacagaatctgtttgtgtcaaaagtttttccgccttctgctgaatcaaggggccagtattactgcccaaagtatcagctaaatctccaagcacgacaattgctgtcttagcaaacaacatcatccctggaaggacaagaggcaccaataaattaaaataacaaattcaaaaatttgaagatgcaaaattcccaaataggcagaattagaattaaagaaaattacatacagccccaaaaaacactcagtatacaattttatttgtaattttttataactaaaaagaagaagaaaaaaactacttctctgccttctactggaggacacaacgtgtttcataatctagatatttcatcaccaattaataatgcaatgaggacaagataacaattgagacatgcagagatggatcattcatttataaagttaaagagaaactatctttcatttatgaagttaaagtgaaagcatctttacacccgtaaaagaaaaagcgaggaccacctctgttccccattatatcaacctacttccccacttatttcgcttacgtccttagcatgaatatatagattgttggggaaatcgagggaagtaaagtcgaagtaaacacgaggggcggaagtcattagaatcagagactcattaggccataagttttcacttaggtgaatcagagcctttccttgttctcccattcaaaacattagcaccaacaccaccacttcccgcacaccaaagcctaacccttttccttttcccaaattttcgctgaaccctttcaatgacaccaatcctttggattggatctttcaggcataccccaatatttttctttttgccaagttccttgggaaaatcaccttcctatggctgtgttttttatgcaaggggatgccttgagttggttgaaatggatgtaccataataatcaactcactgattggttttctttccttcgagcccttgagccttattttgggccatcttctgatgaaaaccaccaagtagagctctttaaattgcacaattatgggtctattttctgactattaacttgcttttgacacgggtatcccactaccactttattcttttgtgtctacaccaaccccacctaccaccaaacacattttttcacttgaccctttggcccaccaaaaccccctgctccaacccaacttccttgcttcctgcaaccttgagaacaaggtctctcttggggagacaataatggatacaaagaccacttcatccaggcccagaaaattcaaagactacatttgaatatccttcaaacttcttttggctttttctccaaggcttgattatggccaagtgtttggacaagatgttgtgtccgttagagacacaatagtatacattccagctttataatgattgagattcttatgaaatgaaatatatttagccttacatgtaatgtagcctagtgttagcttgtagtgagtaaccctaatatgtgtcccaataatgcatcaccattaaactcttttctttactagaaaaaacatatgtatactccaagatcaaagtcagacttcttaacaaaaatgtccccgtagtacctaagcatcctaattcctatccatgttgaaaatcataaacttttccttttgctagaaaaataactaaattgacccaactagtcttttgtctagtaccgtaatacactaaaacatgaatcatccacattatctaaaaacattactatttcaagatcagccatataagttacattataatttatatatacaaaagttagaaagattcctaaaaatactgtcattcgagattattattattattatatcattatgatttttttatatataaaagatagagaattgaatatatgaattatattaaaatttataaaaataactaccaaacaaaaagattaactgacataaaattatttcagtttaatcaaaactctcaattttgagtcttgggcatgcatgatagtcatcttattctacttgaactagatagataatttagacaaaagaaaaataattattattgaacatataaatgatattttaaattcataataaataatttatattgtaatatagcattacaaaatgaaaataaatttaaaaataaattgaactaaacaaaagataagtaagatctctaaagatgtgatttgatcaaaattcctaaaatgatcttggttgataactcttaaaaaacggaaatcattggagataactaatcttacttattataatttataactttatacaagttttgtttaattatcgatttagtttttatcgtttttaaatttatcaattttagttcctataggattttttattcaatgaaagttaatatgtgaattttttctagcattcatatcttaattctcacaatgttcttaccgttaaaattttttaattaaataattttaacgaaaaaaatcttttaaaaattaaaatataaaatttcatttattaattataacaactaaaaaaataaatttaaaaactataaaaactgatgaattaaagctactagtttatatacagagagagggatagaaaaggttaaacgaaacacacagcggcgagttatacttttcatcgttcccgtgtctctcgaagctcttcattgattcgtggccaatcttgctctctctctctctctaaattccttctcactgccaccaatgcttattccataagttttcctctagtttaaacctataccaatttgatacaccaaggttttgcaaaccttacagtgcgaaaactcgtgttcatcaatccttttctttttcttttgttgttgaaaattttggccagactttggaaaacaggttttgtatttatcaatcatcaaagcatagtgtatgtgaatttgattgaatattaaaatattttggtgaaggaaa

SEQ ID NO: 2534 - DNA, 5597 bp, Glycine max
  Intron number 1 from transcript Glyma10g11000.2 (locus Gly ma10g11000) derived from phytozome v7.0 (chr-ID Gm10; pos 10928480 to 10934076 reverse strand)
tccccagcactaaaaacaactcttgcattctcgaggtattgtcttctgctttttctgcccctatggtttttctaactagtagtaataaaaagaaatggataaattcaacgatacatcttcctgtacgatttgtctataaatatactatcatcaaatattcctattcctattccatttataatttaattaatatatttttcttgtcataaattattactcctcgtactctaggagtacataactattatatgatgaaataacttcttccctcctaatcttcctctttgaaaataaaaacaaaacatacccaatagtacttctggtatattatatgcctttcctaacatataagttttcatgaactattatattatataaaacttatattagatatattacttaattactatatatctaatatgagagttgctataatatatacccagtaaaatttaagcgttttgataagttgttttttgaattaatagttaaatgagtatgaacacatacatcaatagcaagagagaaagagagaaattcttaataacaaaaattcctaaattaatttcaaagtgtttgatagaatttctcatttttttttataaacaaagattttaattaaaaaaatgagtataagaggtaatctaatccaacgaatttcgcatctatatcctttgcttaatgatgttttatggtcaaattacccacgtaaaacaaaattgttacattttttttatttctcattctttggcaaacagtgggtgactatggagaaagcaaatacatcactagtgagaacaaaatcagaccaactattagaatcaatggtggcaggcttaaagtcgccaccatcgagcgatcactccgcgaacggagtggtggactcgaggaagtcaagccgatggctgacgggggcctcgccggggcgcggcgggaagaacacccacataagaaagtcaaggagtgctcagataagtcaaatgaagctagagctcgatgatgtgagtagtggtgctgcacttagcagagcctcaagtgctagcttgggactctctttctccttcactggctttactatgcctcctgaagaaattgctgactccaagcccttcagtgatgatgatatccgtaagtacatgacaatttaattaccatacacttaatttgtataagactgatactcaaagacagttctataaatcatacacctcattatactagtattttttataattaacaagtgtcagaaatgattttttaatatgttttattattataattagagtttcacagtcagagattcaccttgacatttaatcaagaccttcaacattattgagataaaacttcaattctaaacaaataattaacaacactaaaaataccgattaaactacatatattttctatcatattttttatgtctttcttttcatcatatcatatcatttattactattatatgtatactacttaatttctctttttttctcaatatatttaatagaatgttgtgtctacctaatttttcctttaaataaacttttttttaataattacttatatacaaaaaaatattgtgaaatcaacctattcaaatgaattaaacttcttttgttgtctagattgattctttgtagtcctaccgtcaaccattcaatgatacagtttgactctcggataagtgaaaataatggacgtacaccatcacttgttgatttttattttattttattgtgaaggattacttatgtaacgaataaacaataacaacaacaacttgattttaaaaacgtttttgacaatgaaatcagacatgcatgcaaatcacaaagcaatagatgatcttgtagctttccatgtatgtgtttgtgaaagtatgatatatatatatatatatatatatatatatatatatatatatatatatatatatatatcatatagttaatgtaaggcacactttatataggaagggaagcattttgtcatactaattaatactaatttaagagtagaagttaatgaaccatggacataagttaccttgtttttttattatattacttggtttgactctttttacggtcttcttcttaattaaaaaaaattcttgttaaataatggtattgtgcgtcttaactatttacttaattacttaccttattttatttctctttattactcctaaacaaaacgttaacattttgtagtttgtaccatctgaatgaaaaatttgatatgtttctttattagtgaagtattatttgaatttcagccattcaatttaaagagcaaatgctatataccatcggtctaggtttgtgtcgtgcccctatagtatccacaaaatatacgtggtgaggtttcctctgttgtctgatttactactttacagatctgggtagatttcctttttctgattaataataatgacacaacatatgcatttataagaatgaccttttggcaagggcaaaacaaactcaagtacatgtgaaaaagtaaaaatagaaaaaagtcattcattttcttttaaactgctatgaaacaaaaaagtacagtccctgttggtacccttccgttacccagaaaagattgctaatgctggaagtgataataacggcccctgactggtcagtgataagtatgagaaatttctttttaaagtttgaaaggcaaattcattgatataaaaaatacaagaatcttaaccaaatcgtactaacagtgtggaggctaaaaaaaccatttttttttcctgattttaatatatgatgattatattgtaggtacaaagtattaattaattttactaataactaaatttttagtgaaaaatttggttaactatatttagtagtatcttaactatgtatttttacccaccgtgttatactcacttattttgaaagatatagaagttaaagatatttctatatgatattaaaaaatgattatttaatatttaagaaaggggtcgaatttagatctttgtcttaataaaaaaattgtgaaattatcatatttaaaaaatataagagaattaaaaaaaaattatgtatatttactgatattattttcatgttgttagttctcgtattttaactctgatatatatacttcctgaactttttagataagtaatgattttcatcctttatagatcacaaatagtttatatagtgagaaagaacgaaaataattttttccctaaatttaaaaactaaatttgtcaaaattaaagattaaaatcaagtttcacataaaggagttgaaaacttcagaactttggctagatctccattcatgccatggtaatatggcaacatcttaatgtagaggtggctaacatgcttggaaatatatgcatgttgaattcactgttaaaccaaacacacacttacctacttgcgttcacattgattcacgtacgcgaaggaagggaagtgtctttgtcggatccaatccaaccagccacctctgactacaaaccccgtgattaacgatccaaaaaaacaggtaactatagtggtacccacactacccaccactgaaacgaccaagacagtggtgtagctgctgtccatagataagtgtcattttcgttagaccaatcatatatacgtgttgccgttaataattgtatcattattatatattactagggcgtgcctctctaaaatttataaataaataatacaaaaaagaagataaatatagtagtgagaagttatgaagttactgtaggttataaaaaatatttgaaagtttaaaaaatagtttaaagacaaaattatctaaatgaaatatgaatatcgaatgagatattttctttattattagtataaattagaaaaaaaatatgccttaaggataaaatgagtgatttgttaaggtaatgaaagataaaatattaatttgtggatgtaattataagagaataaaatgaatataaaaatattatatcaaaacaccttattttctttatatatagttatagatatatacatgtatataatttatttaatgatacatattaaaattttaatatattaaagcatcaattgatatatactcggtgtcaaattttcatactattattaataacttttttctaaagtataaaattaccaattcaacaattgaattgaaacattttcataatatatttagtttataatgaaatctcatacaagaataattaatgctttatcatactacttttctgtaacagataatatattatctggaatacaagtaaatatccacgactaactaaagtataaagtcatgtataaattatgtgaaatttgttatatatgattaaaataaaaataaaatagttggatcaatcataatctaaaaaaattattagtgtaaatataaaatttatcaccttatattaattaatcatctcgtccctatttatacttgcatatagtttttttacgcgcttaagcacacttatttattcttttatggacaaaaagcacactaattctatcacctaaatatatgcaaatgtttacatatatatagtaacgtcgttttaattagctgtactaattatctgtaatgcatgcacactctcaattttccatttctctctgatgtgattcgtgggtggcttttcattttcttggggagacttcttatttttttgtttcttccccttgttcccatcctcatttataacaatgttcaagcatttttttctttctttctcggagtaccattatgtggggaacacgacccattttgtggactaatatgtctttgaaagacaatttagctcttaattatgtcgtacctacgggtccacaacatacaagtgaacatgtctctttctgtgtttttttttccttccttttttctgggagagcaaattgccccattcttggggccactcaattaaattcaggttgactttttattttcactgctatgtggataacacttcacttattgatgaacaagtagttgatacaagtgacacaagtttcggggtcgtcccttaagcttgtaatgaggagttcgaattctaattgatgtatttagagaaattcttgttggaaggaaataattcacctatgatggctaacagatttcttggataagatgaaaaaattttgtgacctaccgaggataattctatgcaaccatatgaaccaaaaaaaaaaaacttcacttattgatgtcaatgctcaagtcacatataaccatggtccatgctaccccacttgagttttcatggccagcaaatgttgcacccttttaacggatcatgtaatgtcaatgacatgagaagcatccatgcatagtactttcttgcaaatcatattaaagatatttaccaccctatagcataacacaaccacatacttagtcaagatcaagaacgtgcattttttattaattaatttctagtgcactattgtgccaagtgaaactaatatatagttgcatgcttggtatatactatataggcttctgattgtaggagcttctttttcccaccttgaattttataaagagggtcatttactatgtatgttgcagctgaggatattgaagctggacctaggacgaagttt

SEQ ID NO: 2535 - DNA, 2075 bp, Glycine max
  Intron number 8 from transcript Glyma18g45440.1 (locus Gly ma18g45440) derived from phytozome v7.0 (chr-ID Gm18; pos 55210742 to 55212816 reverse strand)
aggtatttctcatgttatagataaagaaattgttgtcctcctactaaacatgactagaaagacatcatagaagaatatgtttagggaatagggaatatttttttagcttgctttagaagcaatgaaccacttcagaatcaattctcccagagctttgtttgataactatttgaagttttgaaaatgtccaaataaatgccctctgcatttcaactatttttgtttgaaacttggttcagagcacaacattaattgaggctattatatgtgtgtcaattaaacaatggaggctattatatacaataagtgtcatgtcataaatacaaagattacagtaatccaaacctaattatcttgattaaataataatatatccacacaccctatttactttatttctaacaaatttcattgaactactattcttaaagagcgtagagcgcttgttttaaaatgatgtggctaaggatcccttttgataaaagttgtatctagtaattttatcttctaactgaattagttaatgacttgaaatatttattaagattgatgatgcatataactcatataagcatggttatgaaactctagagttaactcgttaactcttacaagtttacgaatccacttaccctctgtgagttgactcataagtaaactctctttttagtagactctgggtagattttataaactttaaagtaaactaggtagactctcgagtttaccaccaagtcaacgagtcaacaaattaaaaaaattagatcaaaatgtaagtaattttggattattttctgtctgtttagtgtttaacatatctttctttagtatgttgtttccaaataaaaaaaaaatatcacatttaatagcatcaaaccccttgttctctaataatatcaaacccttaatagaaatgatctaccactactataacatctgcaagttattatctagtagtgatgcattactagatttggttatttaagtattgtgaaatttatgatttactattttgctttattatattgttgaaatgtttaattggtatattatttatagatattttattattatttttatatgaagtagacccttacgagcatggttatcaaactcttacgagtttatgagtctacttattctttgtgagttgactcttgagtaaactctttttttagtagactctataaactttaagtaaacttgataaactctcgaatttaccaccgagtcaacgagtcagtaagttaaaaaaattagaccaaaatgtaagtcatttttggttgttttttgtctgtttagttttcaacataccttcatttagtgtgttattcttaaatataaaaattctcacctttaataacatcaaactcttgttctctaataatatcaaatcctcgatgggaatgatctaccattactataacatttgtaagttattatctagtagtgatgcattactagacttggttatttaaatattgtgaaatttatgatttatgatttattattttactttattatattgttgaaatgtttaattgttatgttatttataaatattttattattatttttatatgaagtggactcttacgagtcgagtttatgaaactctcacgagtctacgtaaactcttgagtttgataaccttgcttacgagtctacatgttgagtccacgaatcgagtttatagaactcttacgagtttacgcaaactctcgagtttgatagccttgcatataaaaaaataaagtgtcaatttttagtgaaacaaagattatttctttttcacattagtctgccctggtttgtagcactcttagtctcagggtgaccagcattatcattgattgtcccaaattctaatcccttatgatggctatagtgtaaagttaataagtcatgctatgttgttgtgtttaactattagttttattttcccaaagccatgctagttaaataggagaattcataaagcagaaagaaaaggttgtattctttgcatctcaatttttttctccgctcaaacaatagtaatttcctttcttaactgataacagattgatagtata

SEQ ID NO: 2536 - DNA, 4265 bp, Glycine max
  Intron number 8 from transcript Glyma20g03040.1 (locus Gly ma20g03040) derived from phytozome v7.0 (chr-ID Gm20; pos 2779261 to 2783525 reverse strand)
ttgaacgaactaagaagagttgcaccttccagaaagtatgcaatccactgttttctttctacttttcttgtcccttggtttatatatttcatttttgcttgaatatgtaaactaactatttgttttcttttttgcctttttaatactattaaattgtgggagggcgaaccctggtgcagcggtaaagttgtgccttggtgacttgttggtcatgggttcgaatccggaaacagcctctttgcatatgcaagggtaaggctgcgtataacatccctcccccataccttcgcatagcgaagagcctccgggcaatggggtacgaagttttaatactattaaattgtggcctaattagtctgttctgcaagtatatgttgagtaatagtattaaatttactgtatgatgttgactttaccaattttatttgggatgaaaattttgaaaaagaggaaatatttcattaattatcagattaaatatttcagccggaaactttttcctgttatattctgtgaataatcatcttttttccgttgttatgggcattgaaaatggtctgaaacatattgttctagtgagattgatgttgcgacttgactggaaatgactgcaacctaatttcaaatcgaacaatattcaaccaaatcaaacaatatccatactaggtactagcactgtacccatgtccttgctacttaggctttcaagactgtaattcctcaaatgcctaaaatggtagttgagcaaaaacagtgggacggctgatgggttgttggtgaccagaaggaagttagggaggcagaaaaactaaggcctgtttagggtggtttttagttgtaagtttcaaattttttaaaaattgcaatcagtttttactttttaaaaattagttttagttttctctctctaatttttagcttcaaaataaactcactttaaaagttaactatatttttaaaattagtttaagggtatatttgtgtggtgacacgacaatggcggtgacaacaactatggtgttaacggaagtgacaatggtagtggaggtggtagtggcggtggtgccaatggtggtggtaatggggccgatggtggtggtggttgcgtcaataacgacggtggtcgtgtcgtcaatgatgatggtgttgaaggcgatggtagacatgatggttgtggtggcattgtgtgtgtttgtctgtgccagtgttatcaatggcggatggcggaacatggtggaaggctgaaattctgtcatataaacacgccattgcaccttatggcgggcctcccttcacaaattgcctatggtggttggcaaaaaatccgccacaacattgtgccatggctgctattttacaacactggtctctgccaaacatttacacatacaattcacctaggactaatatttttatcattatttttgttggttaggttttaactgtgaagaaacagtgaattttgcaactggtgattgctttccactaggggctgctgctagcaagtgttatgccaatctcagaatgtctcccatatttgcatacaaggaacttctgagatgggtataagacttgctagctgccgaccctagtggaaagcaatcaccagttgcaaaattcactgcttctccacagttaaaaacctaaccaacaaaaaaatgataaatgttaggtgaattgatgtgtcaatgtttggcagagacaaacacacacacacaaagatagattatcattactgaatccagcatgatatgctctaggaaaggtgatgacaaactcttttggcatgttgccttgtaaacttccacatcattttgtagcaagatatttggaggaaacatggttgttttatgcccaagaagttcaaaagccccatcctctccatgttttggcaagattttatcattactatacacatgatttaagacaacattttcaaattgagaagctgcatgagcaggcatgccataccaatattttttttttttgcaccaaaatgatgatgatttatgctgcaaattaaacataagtgaaaagaaattgtcgaacaatgtagaaaatgatgttgacaatggagcagaaggctaaattttgagaaatacctgtacaaatattgatcttgtacatgccatgcaaacatgctgaacagaatcccgatgtacagcataggatcagttattccctacaaagtttattcatgggttaaaaaaaacaatttaaattcatttttggtttcaagaacttcttgcttactggtatttccttgtcaactaaatgcaatttggattgtggcagctgtgagaaattctgatataaaagaaatcagatataaatatattgagtaagcaataaatacttatgcatagaagaatggcaataccacacatggaaattttttgaggatcacacatgtaaatagaacaaaagaaatggagtcagtataaaatctgaagtcaaccttaaattccatttacttgttccaagcttgtattgggaaaaacccaagtcccacatcagctaaaaataaagccaagttagagtatataagtgagggacaaccctcaccccttaagctagcttttgaggttgagttaggtttaaactcattctaagaatctaagatggtattagagtatatctaagcttaatccaaagggccacccacaatagttatccacgcaccacgcctaagaagtgctgggcgtgacggagtgtattgggaaaaatctaagtcacacatcaactaaaaataaagtcaagttagagtatataagtgaggggcaaccctcatcccttgagctagcttttggagtcgagttaggtctaaattcacattctaagaatctaagagcttgtcattaggatcacatgaaaaggcattatcctcaatatttatcatactgttccctttccttcatgtgccatctcgcgcaaaaactctttccctctaaatctcttttccataatgtatgggcattgaaaatggtctgaaatgtatctttctagtgagattgtttttctgagttgactggaaatgatttcaacctagtttcaaataaaatgatattcgaccaaatcttattgtacccgtatgcataacagatactagtactgtacccatatccttgctacttaggctttaaagattgtaattcctcaaatgccaaaaatggcagttgagcaaagacagtggcatggctgattggttgttggtgactggaagggaggcaggaaaactaagtgatcggaggcttgggaataaatgtgttggtgtacctgtggaagaacctgttctgatttaaaattgatgtagattgtagaatatgtaggcagaaagggagagatcagaaatagaaaatattgttttcaccatttcctttacggaagtttgaaaaataggaaattcataaaaataaggtgggcagaaagggagagatcagaaatagaaaatattgtcaccatttcctttatggaagtttgaaaaataggaaattcataaaataaggtggtatttttgtaattgtcattgaacacatatagattgaaaatgaaaacagaaaacaaacaaaacgtatcctaaggagaaaacaagaaaatgaagaaaacaggggagtgacagagtagaccaagattggaatagaacagaaagtgccaaaaaaatattgatacttaattcaacctcaaattaaaatgtatgttagtacagcactacagcgcagcaatccttgaatgtgcaaatttcaacttgattctaaattactgaacaatcaaatgacctaatttattaaagattttctaataaccccaaattactaaaagttccaaaaatacaataatttccttcccaatatatgtcatatacctaataatcctacaattctatttctattcctcattctttactctgatctcatactccatgacttggtatcatgaattcatgatgcttatgttaagcttcagtccaagttttattgtgttagttttaatttgcatgtaggttctagatatgtttactacaaaaacaaatacgggtgaattacacaggtaaaatgatatcattgggctgtattaaggagaataaagaaagatattctttttttggcttcatgaacatcaaatacataacttttatatctaatgagtctcttattttttgcttttgatatatattagatgttctttatgtcaaaatatcttttgtagcatctatgatgttcaggtgaaagtgcattataattgcaggtggagacttgtggaaattg

SEQ ID NO: 2537 - DNA, 935 bp, Glycine max
  Intron number 1 from transcript Glyma02g18380.3 (locus Gly ma02g18380) derived from phytozome v7.0 (chr-ID Gm02; pos 17173216 to 17174150 reverse strand)
tggctataccgttcgagccaccgtactcgacccaggtctgattcttaatttcatcaacttaatttcttcttattctctaaattcacctgtttaaattatcaagataatatacatcaggagtgctctttgctctttattacgaaaatatttagtatgaatttgcacatgaataaattataagatttgatttagtgattgaaaagataatttaagagtttaagagagagtcatagaagaagaagattctaagttcgaatttatccactaacacaatcaagtttctttacgaaatccgaattcgtactattcagtgtctttgaatatataatataacgtgttatatgtagtttatagcaatgaaatgataattatacgggagatgtgggaaattagttttatatataattagttatattatgaaggtggatgaaaggaataaaattaattgtatattagaataatttaggaataaaaaatatatataataaaatggataattgttataaatgaatacttatttttcttttagttatatgcatacaattgaatatatgcgaaattattaagggtaaaataggcaaaaataacatgaaatcaaatggggttataagattattgattttattataagtatagaagcgtaaattattaataatatacatgattagtatagaactatagaatattacagagtcaatcaccaattttgaaaatataataaccagtcatcaagttggttcttaaaattaatatagtggaaaaatggtctttaaaattatatattattaatcaatttagtttttgagattgtaataaacagtcaaattggtgtctaaaatataataaaattaaaaaataattcctaaagttgtaaattattatttgtatagattattacattacattaatgcttatgcatgtgccctgcagctgat

SEQ ID NO: 2538 - DNA, 1869 bp, Glycine max
  Intron number 2 from transcript Glyma12g07130.2 (locus Gly ma12g07130) derived from phytozome v7.0 (chr-ID Gm12; pos 4875498 to 4877366 reverse strand)
gctaagaattccaaattcgttaaggcgcacaaaaggtaaaccctatgtgggtgtatttttcatttttagttttcgctgtttgatagtatttgatatgagagtgtttgtattggttccgattgttgaaaattgaggcggtggagcttgtagatttgtcttgtgtagtttctgaattttcatgtattggaaaatgatgagttctctttgatattttgttgtacgtaataaaatgatacttcgttattgttgaaaattcactgagttttttcaacaataacccctctcctcagttctctcaatttattcaatatgtactgtttacactgtgaatgctggatagatatcctaacagaattctgtctacattgcatatccttattcctaacagaattgataaccagcaattacatccctaactattctctaaatctagttggtttcttaactccctgcctttctatggtcttagcaattgaaacttcttcctcagtttgttgttgagcccaactatggtagcatcttggtctgggttgatgctcatatcaatgttcctcccttacacttcaacattgtcctcaaggttgagatcaggataagtagtaccaatggtatcttcatcttctcatgtagcttctttgaactttgaagcacaatgtttgcggtgctgtaatactggttaatgcatgcaaactcatctgcaatttttttttttggtgccaaatctggaccaatttcctccaactcctggcaagtaacaggttgcctctcaagctaatgcactataaacaacatgcacctttttcatggtaaaaacgcaagcctttttcacacattgcttgaatctcagcctgtgtcaatctctgaatagtttgcttgggttggctaggtgtgttggaaatgtgtgtgttgtgcgtagtcagcgtagaggataaatggtctccaattgtagtcacaggtttagtgacagtaaaatcgggtggagtaggtagaataggtggatatggtgaaactagcttcggtggattgctaatctgttgtaatttaacttcctgaaatttggctgaagccatggctttggttagtggtaggttgaaaggaggcaagtggcaacctactgcttttaaaaattcagaaagtcttaacattttgtcgtcattctcaatgtggggaatctgccattagcatccttcaccagaaaagcagaagaaacacttggatttcttcgttgttgttcaagattggcattccttgtagtaatgttgagcacaagctgatccaaccactcaagaactcctgtcatacttgatcccagatccgatcaaacttgtggcaatccctcctgtagttgattgatggtcttctcttgctgatccaattgatcatccacagaataaaagacaaatgaaagatatgaaaattcacttatttattccaataatccctctcctctcaagtctccatcctatttatactgtttagcgtttacactgcataccctataacagaattggcatccaacaattacatacctaaatattctcgaaatgttctggatggagaaaataacttttgagttgatggaagcaaattgttaatacttggcacctttggattatcacaaatgaaacttgcgtaaaagtcaaataatgataatcatttggcttgaattgaggaattatgagtaataactcattattgtcttcaattttacattttattttattactatacctgattgtttgtatgctttatctgcttatcacatgttcttaggcatgcatctaaatttatggattctgataataggacattgtgttgttaatatttattccaggtgatttctgaatcgtgacatctgcctggctttgc

SEQ ID NO: 2539 - DNA, 1805 bp, Glycine max
  Intron number 3 from transcript Glyma13g30460.1 (locus Gly ma13g30460) derived from phytozome v7.0 (chr-ID Gm13; pos 33099449 to 33101253 reverse strand)
ggaactgcttccttctctctgcaattcttccgcaggtaacttcatcatcctctccttcagattttcaacttaacttttacaggtttatatttagaaattggattttatatattttcaaaatagattcgcctgtactttggattcttccaactctgtctcaacttcaatatttttttttaaatagttgtatgttattaatattttttacttaataagtaaattttatataacagaatattatatttatattaatatttatttttcttgaaatatatatcgtaaaatatactttaattgtagttacaaattttcttaatttataatttaactgtacgtatgtttatttattacgttcacaaattttgttctaaatatttcgaatctttctcgggtcaattgttttttttgttttgttttgaaaggaggtcaattttaattttaaaaatagaaatagataatcctgacaataagataaacaaggataagtccgttcacgaacactacaccaacacatccaccttttttaagtatttttttttaattcttttttcatttagtagcttttgtgattgatatttttcaaccaagcatgaaaaaacaagggcctaaaaatcaaagaagcatggaaccatcatcgattactgagcagcctgacactgactgctttttttattttataaattaaaatgcgtcattataatattttggtaaaaagcaaagttcgatgatatttaaacttataatcataattttttatatacattatgtaaaaaaatattttattatttcaattatatataaatgatgtaaatgtaatatttttttattctggattaaatataacatattttaattttcttaaaaaacattaattttttttataaaaatgaaaaaaaatgcattttttaattttatgagataaataatatatttaagctaaagtttttattttggtgattcccactcatgaaatgtcgcattccaggcccggctatggcgaattcctgtctttattcaattttggaaatatttaactgccgaaacaactttgctcatctttatctataatctataaatatataaaaatcttgtctaacgttttgccgtggcaatctgtcaagtccatataatttaaaataatgttagagtaaataatactgttttttttttaattatacaaatatttctgcctttttatataagttgcagcaatttcccttatagatgaatttagcctaatgttttaaacaaataaagaggtcaatataatactgtaaaaaaaagtaataatatatatatatatatatatatatatatatatatatatatatataagatgttagtgtagtattttataacaattaagaaaagttagtgtagaaacagaaaattaaaaaaaaaattgctgtaacttcacgaaaatgtatagataattactgtaatttactcataatattattatccatcaatataataaaacgatcaaaattattgaaatcctggtggacgggacaatttctccggctgtttatatcacaaaaatattcataatgaatatagaatctcattcaatttatccagacctatcatctttaagccgatttggattaattaataataaagaatgtgttaaataaaatgttagtaatacttttcataattttatattcttatattcaacgtgaagacaaacattattttatagaaagtgaagacaaagttacgttcccatgccttaaaaatccaacaataatccagcttgataatgctgatatttcaattaaggtttaaacttgcagactgcc

SEQ ID NO: 2540 - DNA, 2619 bp, Glycine max
  Intron number 1 from transcript Glyma02g42030.1 (locus Gly ma02g42030) derived from phytozome v7.0 (chr-ID Gm02; pos 47127145 to 47129763 reverse strand)
gcttgacccttgcttgaaacgcaagcccttcactggtaattaattaatctccgtgtttcacactgataacactgattttaagtcaattgttctagaattaggttataaggttagaaatgtatgagtgtgtgtgtttttaatttaaagatatataagataatagatatggtgctctttatttgtatagcttttggttttagttatttgtttgtttattttggattgaatgattctagtagcttgtgcttttgcagtctttttgtttatttccatttggagttggggatgatatgtttatatccgtttatcaagagatattcaaggaaaattgaggggggggagggtgtcaaataactattgttctgtttagtataatcatttgatcaaaacagtgaagtctcgctctcagtctcactatctttatttgagtcaatgtggtaagtttgattgaaaaaaatgctattatccacacaagttgtagaggagagacgttatggatcatagaatgacttttaaggggattgacaaatagaataaactggtagcaatatactaatatatcatttgcattgtatgctaaaataccatgatatgttttaaatatagtaacagaatgtgtttgtggaaaggagatatctaatgcatttttgtctctttaaagttgtcctatttacaattgagaattttatgtatattagtgcaactattaagtatgatataatctcggagccaatgtctgtttgtcatatatttttcatttaatgtttgatttatgatagtttcaaaagtgctgagaagtcagaagagaaattgatagtggcagctgaaaatgctgtatgttattcctggtgttgaggttgatcttctgtttttctccttgttgttcgggcatgttcattgtttgcaactatatttcaaccagcttatgcaataagaagaaattaaaatagttccagaaactggcagagtggtgtcagtgtcatatcagttttagcttcatcactactttgatacctattggtatttctttaaccactttgtatgtatattatcatctcatgatgtgagaccttttccagctccatactatctccttaacctgtatagtgaccattttagttactatttctgatagccacgcttcttagtacattatgtcttacctttacatacatgttggtaaactatggtagtttggtcagtggacacagtttatctatataatgaccgtgccttttgccttgagctagcttgcaaattgctagatgttggctatatttttgggtaaactatggttagtagctacagtttatcatgttggatttttttttatttagcattttttatttggtaaggctgatagttttctaaaggattgttgaagttgaatgttgttatttagttcattttacttgttaaatattcatttaatgtgactcttgccatctttatatttacttgattttggtcacgaatagaatcataagataaatgttctccagcacgcagttgagtgttatactgcttatgtaacttgttattgtggttattaggctataaattatattatctattttaaccactgatattatattgaatattcaactactataaactgacggagtggggaaagtgcagggttgtaagttataaccactgatcagaaaatcaagggagaagattttaataaccttgtagtttattatacaaaatgcatgtattttttcataatatcaaatgttgattttccaatcaacgattgtaaattaaatccatacttttccatccaaagtttacaattctgtcacttgcggtcagaacaccaatgaactctagactcctaacttcttgaagtttatgtctggtaacacttcttagtaagatccattgtcaaagaactcaatggaccttcctcttttctttgctgttcttagagtttgccatttatttctgaaaaggataacattagtaacatttttgtcatatactcctaatttcctacctgagaactactaattatagagatgaataataaaataaaattaaaagaaatgctcaagagttatcacttatcagtgacaccttgtggtcttggcaataaatagggaggaggaagtgaaccaaagatccacatgccatgcactaggtcgggaataaaaatcaactaacatattaatatggaaatcaggaacatgaatacacgatgaaacgatattttgtggtctctgaaaattaatgcttggtttagaatacccgtgaaacttttttaaagaaaaagaaaaagaaattgtattatttatgcttaagcttgcaggcatccatgttgttgtgttgatgtgcgagtgtgtgacaaacttgaatttaatgaaagaaaatcttgaaagttgctgctgcatactctggaaagttcatatcagaccttgtgtaacacttgtattttcctttccaccagtgaattttcctattgtatgctatatattctattgaactaaacttgttgtcatttaattgacagattagccggtcattacaaatatcttgactgtcaattatcaatatctaacagtaatgagaattcaatttctgcagaggaagaggataacatcatagtttcagccc

SEQ ID NO: 2541 - DNA, 9363 bp, Glycine max
  Intron number 2 from transcript Glyma18g46520.1 (locus Gly ma18g46520) derived from phytozome v7.0 (chr-ID Gm18; pos 56236190 to 56245552 reverse strand)
ggattttgtcttcgaatactcttttatcctacttggttagtacttgagcgacgaaaaattgtactaggtgatgaggatggtttgaaacctgaacgtttgatacatactgtgtttaatgttggtgcgagttatctggattttcgatctgattggtcggataaactggagaatgatctagtggtgcttcaacttggttgttggcaagatttacctttacatcacattgaggtggggagtgaagaatttctaaatgagttgaggaatttaatgcagttgaagtatcttggtcttcgtgggatatcaagaatatccaagcttccaccctccattttttcaagctaccactcttgcaaaagtgatgttcaaatttttagacgatccaattattaacgagactatgattgtaattttactgaaataaggtttggtgtatgcaggaaaaagattaggttttaggagaaaaaaaagaaaaaaaaattgagaggaagagaaaacataaaaatataatatattgtaaatgtaaaaattgacttaatatatttttatttataggtaaagtattttgagtttattatttactatattatattttattttattattttataaaaataaactttattttactcttttattaaaaaaataatcaattaaaatatccctttattttttaaaactatcatttttttctatttattttttaatattatgaaaccattattttaatttaaaaaaatcattttctttcatttatttaatttctaaaaactttatgaatttttaaataaaattctgtttttatttattttacgaaaaacgggatattatatcggtggcatgttgcaagaattgaaatttcctatttcatattgctaagtgagaattttttcagagtatgctactatgtttcttagagcagtttagactctatcaaatttaatgcgtcacttcatggctccaatgattacttcttaatatcctcccgttctcccatagccctaactaacaaggtgttggaacatacttttgtttgagcagtttatatttatgcttgctgtcttattgtttggatgatggcatgtgaaacattcttgctgtaggcaaaattacgagtttcttgattttgaatagtgccaagaagttagtcaaaataattatcaataaataacttgcatggccatggccgctaatccatattaaaatgaccaaacccttaaagaaactagattgataaacataataagaacaaagttgcagtctccataagaaatcaaataaaatattcaacagactagctaggagagtatgtgattatgtttcttagagcagtttagactctatcaaatttaatgcgtcatttcatagctccaatggttactacttaatatcctccagttctcccataaccctaactaacaaggtattggaacatactttttgagcaaaataaatttatgcaagattttcaaattaatttcaaattgtattattgtgttatgtagctctctgtttatcccatgaatttgaacatgctgaaaagctattctaaaattaataaagcttggctgtccgtggcatatataatatatgattgcaagattacaaagaatttcggggtttatatactcccgtattaatatcatggtggcaagctaggagaggagcgggttgttgaatgaaaaaaggttggtcgggttctacccaaatcatacaaggcccaactcaaatagaaacttcagcattgttggaccaagatccaaaacttgtattaattgaagacttaaatatttttttagtctttataatattatatttcttttgttcttataaattgtgtttgttttgtttttcatctttaatttatgcttgttttgatgtgactacacatgggtggtgaacattcgtatgtgggatacactttattttcctggcacacacaagacaaatcaccctctatattgcagtgccctgaatgggtcttttcacctttaacttggccactatataggccgacatttttgagcttcaatgttcaaacagtttgttaatgaagaagagaaattaatcttcattttctacgcaccttgtttggaactattgtcttcttttgagtgcttgatgcaacaaggggaagttagttagtttaatgagaggatgtttagcaaaaaggacaaccaacaggatcaagtagttgattcttataggaactaggggctttagaaaaatattaataaaatatggcatgggttttatgtataaaggttccactacaccaaaatttactattagccgcaattattatgctttttaaagattataaaaattgccactaaaatgtttacgggcaattatacattagccagtgtcagcgtcagtaaatgtgttcccggcaatcaaaagaaatgcgggtaaaagtacattttatggccggtaaaaaacaagtgtatagcagcaatattaattaacggcaattcaaataagaaggcaagctcaattgttaccaatggtacacctgatgatgatacgccaaggaagataagatctccaccatagtgaactttgtcattgcctctatacaggataagatctccacgatgcaggtccatcactttcagtttccagttgcgggtccatctatgtcaagaaaaagggaaagggaatggggttcagtgaggtcatattcttcaatgtcaccccatgaaagatcttctctcactccaatacaaaacctacaacaaacaaacattcatagtaactatggtataaaggattcaacagtacatgcatttgcaattaaagtgtattcgaattttaaattttatatataaaagcaaatcaagccaaatgcaaaatcagaaaatcgataagaacatattactacacagtgatttggaaaatgaatagaactcacacatatgaagttgtttccctattcttggctctcagctagtgtccaacactacgaaaatccccattacatttttactgtcgcaagaattttcgtgcactagagagtgaatgagggagagtaccatcggaagtgtcaacatcaatggagcaaaccttgggagaaagcaagtgctagaactagcaagggtcaccacaacgccgttggaacttcgttgcagaaacgaagtgggattccaattaagagagaaagagatgcttggtttattcactcagaaaaaaccctaaaatgtgaaatctaagtgtttgatgatttattctctcaaagagaaaccctaaagaacaaagggtgttgctaggtgtacccagcattattgttggtgctgtgcacccaacatttttttaaaaatgttaaaattgtccctgcttcgcatttgtggtgggtgtgcgtgaaggtggtccgtaaatcgtacggatcaagttgatttgcaaggttgatacgaatcaagttgatccatatgttgatattaagcatacggatcaagttgatccgtaaaaaggcttatggatcaagttgatccgtaaaaggcttacggatcaactttattcgtaaaagacttacgaatgcttacggatcaagttgaaagacttacagatcagaaatatttcagtcttttttccttaagtgttgggtgcactagcaataatgctgggtgcacctagcaacacccaagaacaaattcaaagaaaacgaatggactgggagaagaaaagtgagagactgagagagagaaagcaaaggacggaaaagaagaaaaaaagtattaaataaaatagggttaggtacaagtgtctaggtgaaagctatgtcagctttgttaaaataataaaaaaaaaagcattaaatgtattattgtgcttcaaaatcttttatcaaaactttcagttactttcaaatgaaactttttataaccagctttgtaaggttaggattgcttttacttagtcacatttagattcttgcaattttgatgaaccttcaatatgaattttatcattcttcaattttcagtagaaaaatgaaatttgaatcaagatcctattaaactggataaaccaaaagcattagtgcataaaagttaatatattacaaaaggatgatcacctcacaatcacactctcacagcatatacaagatagatgatgcacacagaacgaaaactaaaaacttaatttacccaatcacttgctatatagaaacgaaaacattacttgaaaacaatacttttacaatatcaagcatcagaccaggtaatatccaacccaccccattcatttaggggcactcctaaggctttccaaacagcctttgatgcatcaacaatgttgttgggacatggaggttgatagtcatgctctgcatcacatccctttctagagtcacactgatcaaccaccatggccaccacacttctaccattgccgctaatggtgatgttgtggaggcacctgctcttgtggttgaaccatcccgtggacagtgccacaaccggtgtgtcgtcagaatggtactggttatcacattctgaagggccaccaccatctccacccttctgaaaactgttgagagtgagataggccttggtgttgcttgacattggtggtgaacattcatatgttgtgtacattttgccttctttgcaacagtcagaatcattctcttggttgcattgtcctggaggggccttctttcctctaattcttccacttgggcggcacttttgagcttcagagtaaaaacaacttgtcaagatgagagtggctaataaaatgaaggatgcatttgggataaacctcttcattttttgtatgaacttctttgtttctactctttgttgttctttcaagtgtttgatgcattgatatggatatttttatttgtatatatagaaaactcttgatcaggtacatgatttggcttcaaaatataggtttattttggggtcatcaagcaatgagttttaaattgtcgtaatttgccaaaatgacaagtacaacattcttaaaacatcaataactccaattccaattcccatcatacaaactttatagtttgattttgaacacatacttgtcctagttacaataaataataagtcagacttatgtaacctcttacattatgaaatttattccttgttactgtgcagcacaaacaacaaaataagtttcttttacttaatttttcattattacagcacttaaaatatacatattgaataaaattggaataattatcacagtaccgattttgaaggtaatatatgtttagaaactaaaaatctagaatacgtatatgcttggattaaggattatatttatgcttcttgtcttattaattggatgataacatgtaaaacattcttcttgtaggtgaaataactagtttcttgattttgaatagcgccaagaagttagtcttaattaataataataaataaataacacgtatggccatggctgctgctaatctatatgaaaatgatcaaatccttaaagaaacaagatggataaacataatatataagaacgaagttgcagtctccataagaaaacaaataaaatattcaacagactacgtgtaaaatatttatttgcccgccgtatctgcaacctctggatccatacctcatgcagccaagtatgtctttatttatttatttgtgtctgtgttgatgttagttatgttagggaagtattatttaaggattattggatctcatgttatacatcacagggtagtaagataatttgtctttatgttattgtaattaccaaaaatttatttagtaagtatttgatgttgtagattattgtaaacttggaacgaaccaaaacaaaatgtaacaggagatgtcagttaaagttaacactgctagctaggtggcttttagctagcaagaagcaaaatttccaattgcgtactgctaagtgaggattttttcagagtatgtgactatgtttcttagggcagtttagactctgataacttaataaaaagttgaaccgtaattcaatagataagttaatattggatttcttagggcgtcagatggtttctttggattgttctgtaaggcagttttgggtttggtaacccttgtactctttacaagtaatataatctttgccttttcaaaaataatacaaaaataaaattgcacagacaagaattagaggatcgagcaaatacaagctacttgaataattcatttttaagaattgagtaattgcaaaattagctatttgaagatttggtactctttcaaactgccgagtaatggattccactagtgaaagaaaggatagatcacagtaccttttcataggagaaaatattttatttgggttctctttcaaattgccaagaaaataattgacatgaaccttcggttgttgttgctttttgattccttccttgcatgaaaagcttaaattgatgccatgattaactaaatcttatatacaagtacatcaaagatttctttcattcatttttcatcagcttctcctgaaactacgtaaaacaagcctcatcctatcaaggttcgcttttaccgccattttacactcattatttctattatgcactatgttgatttggtagcttcttgtttttacttatttttctcaatttagcttctctcaacatgagttacatttcttttaaactatcttaattgtttgagttactatttgaattgtttaagttttcttaattatttgagttactatatttaaattgtttcccattataacctacctgcataaccaataacggtagaaaaactataaaaagaaaatatcaaaaagtagtttcagctggcttacaagttaattttatcaaacacatcatgaataaaaatataagaatcatatattttattataaagattttaccaaaacatttatatttacagtacacaactaatcactatattttttacactagtgtacacatttaacaaaatatagtgtgcacaactaatcactatattttttactataatatatatagagtctgaagggggagttaactaattggcatgtcaacatacaattctcttcgatcaataattacatcatatactatatgttgttctgttagctttcggtttatttacttactattattcttcaacatgagttacatttactttaaactaccttaaatatttaagttactatttgaattgtttatgttatatatttgagttacgttgtttcacattacaacttaactttgtattcccatcttaccaaaaaaaaaaacattacaacttaactccatatgctaaccaagaatgttagaacaagtatcccaagagaagattagagttttttaggttttgcctatctaatccatcatcatcactgttacaagtcttaacaatatttagtcattactgattaattagaaataactttgaacatactaccttaaaggttcaccaattacagatataagaattaatcatatattttctaagggttaattatgtttatgtatctattttttttacaaatttcacttttactccttaaataattttttttttgtgtttttgattgttatatttttcctttgttaatagttttatgtcaaataacaacgtcaattaattcatgacaattaataatcatgttagtagtaatgtgacttgtcacaacatcagcgaatatgataagataatcacgtgtaattcttttaattcttttttataaactactgtgtttaaatttctgatgttcagacgagttgatgacattagcaatcaaactagttgatgtgagattaaaatccgattaaccaaaaaagttacacgtgagtgtctcatcaattccttaatgacatggcatgtgatcactaggctgccaaagggattgtcatgacatcaatattaacaaagaaaaaatatagggactaaaaatgctaaaaaaattgtttaggaactaaaaaataattaaaagtttaagaataaaaatataattaaccctattttttattataaagatttctccagatcatttttactatgatatttaaagtctttaaagggtcagttatttaattaacaagttaaaatgtatatattgtatataagatgaataatatatatatatatatatatatatatatatatatatatatatataaaataattaatcaacaattcttgaaaccaatgatatatcaaattaactaaaattaaaataaattgtaattaaatagtttactatgattaacactaaatttttatatacactctttttacattctgcaaacttcaatttctatgatacagtacattcttttattttattaattttttatgttgcatttattttgtatttttttttagtaattgaatttttgtttctttggaaataatcttgtttgaggtatgttttaactctaaatttctatgattttactatgaaatattaatgaaaactactaatacaaattatttccataaggtcattatttaatatataaataaattgctaattatgaattatatggataatcttgtcaatttattactgtatttagatgtcattttaatttttaatattagttttattataatatgaaggaaattaactgaagcatgagcattgaagtgtaatccttcattttatcaaggttcatttttgttttttattttcctatctctttcgtcaaagcatcatttttgtaatgcttgacacattagaagaggtggatggccattttcgcaagttggataagaagaggttggaccaagagatggatggcatttgcaagagaataggggaatgtgctcacaagttgctcccaatggatgattatgatgaggaggatcacaagagtagtgaaatactacactcatcttcaacccaacacaacaatcacttgttgctggaaaggtattgcatgctaagacagcaaagaagtgtttgcttgttgtctctcttagttttccctgaacatgctattataaagaatttaagtacaatttattggtggattggagagagttatgttgaaaatacagaagataaaacagcagaggaagtgggtgaggatgtgattgatgagcttttgaaattaaatttgattgtaccctatggtaatgccaagtatccccttgtcaataaatttcaaattcatcctcacatccttcctctcttggagtcatcagatctgtatgaaaaaagacaactgcatcttggatattatctccaacaatccatgcttgcatgtctagtacttgagcaacaaaaagttatacaagtagatggggttagttctattcttgatgattatttgatattgactgtttttaacgttggtgtgactaatctgaattttggatctcaatggctggataaaaatatgaaggattttat

SEQ ID NO: 2542 - DNA, 2403 bp, Glycine max
  Intron number 1 from transcript Glyma19g06740.1 (locus Gly ma19g06740) derived from phytozome v7.0 (chr-ID Gm19; pos 7902856 to 7905258 reverse strand)
agaagtggggtggtgatcttcccttcttgtttaaggtatgaatatgatcatatatatatagtcttgcttttggtgcatgttggttgatgttggaacaactattttgcaccacagcatctttattttctcaattaggagtttttgttctatgagaataatgtagggattattcaattttttaaatctttctattttttatccttattttaaatattatttaatgttcaaatccaaaccgatctaaaataaaaatttaaaacctctaaaaaaaatttgaaaatcaaaccaaattgattctttttgaatttgtttggaatttttttttctcaaattgattagttcaattcaatttggggtttgtgtttttgaaatcgatcaaaatccaatcaaactgtaatatttgaaactaacatttatattactttagtgttatacattttatgtctgtaccacttgagttttacactgttttgtatgaaatttatacaatgtatattattttcttttttagacgattttcttaagataagtttggtttaaaatagatgaaattttgcatattttttattatagaaagtttagcatattaataagttccatagattgttatcaataattttttatgtatttttatttaaaatatgaaaataaagtatataaattttaatgaaatagtattttagtaaaaatcacaaaaattgaaccgcatatatttttaaagtttgattaaggtgacttttcgatgaaaaattgaaccatatcgagccgcaaacacctctagtgctagccaaggtatcctcacaactttcgatccttgggacagattatgagactaatccttcgttcggacctaatcacacttaaagcttttcgtcttctctgagaatgaattccacaagaatcgaactcagttcttctctcacatatttaatatgtattgctacctgaactatactcattagatactttaaattaagttttaatattttaaaataaattattaataactaagaaaatgtatctaaatgtaaattgattatcataaatataagtatattccaaaaaagatcataaatatacatataatttctatatatgtttaaacgtttatctaggactaatttaattatgatataatttatattaaaaatatttatttattataaattttagggttataaaataaatatttataatactattttttataggaaatatttatcatactaaaatactagttatcatttaatttacttatgatatgtatctagactagataaaatgtacatgattttaaaagtgacataatgtaacatatgtacttttattctgtatattagaatctttaatttgataaatgaaactctctctctttccattttcttagtaaagagttttttttttttttttaagaaatagccaagaggttcttaatactctctcttttctccttgaggatatcaatgcattttaaacattatcctttcatttaaccaaaatatctctctctggctttttacccaaaaaatatctcttaatcattgtgaatcatcatctttttatctttatttatataatatttaacaagtagttatttatctaaataatactaaatttttctttaaataaaatattgaatttgagtcttataaataaaaaaatatttaaataatatttattgaaagatattaactatttcaataaatctcattaaatgaatctctcgatggagagatactttttgttcgcccaaagtaaataaattaatatgaatgccactaaatggatgtctcgggtgagagatacttcatgttcatcaaaatgcgtcttaatgatttagaccaggggaaacatagacacttgtgcctctctgtatctttgataaaatgaaagaagaagaggatagaggtaaaaaaaaaaaaagaaactgagagtgttaaaaagtagttggtacttggtagttttagtcaaatagttttgagaatagttagtaaaattgtcttgacaaaacgtagagatgattaagggaaggttttcttttttatatattgttatagatgaattaaaaacatatttaaatctaaatctttataattttgaaatgatatcatgtatagtatagcctttacaactaagtggctttctggagttcaatccttaacgacttctgttacaagttgaattttaaaattgagagtccgtgcgtgcaccttcattttgtagtcattgatttggtaattaatattgaaaaccatttaattcccaatacattaaaatagaagatgaaaaagttaggtgcatgatgcatcaatttatggtggaatcactcatcaatcaagtatgctcaagattgagtttttgttttaaggtgctgtccgtggacaaggccttgtctatacaggc

SEQ ID NO: 2543 - DNA, 2037 bp, Glycine max
  Intron number 2 from transcript Glyma13g17340.1 (locus Gly ma13g17340) derived from phytozome v7.0 (chr-ID Gm13; pos 21124643 to 21126679)
tgcccaggcaaaccaaggtaataataatccactctcacgtacgtaattcgtttactaatttataatttatatattgcttttaatcatacagctagagtaactcagaataaaattaattcaaatagttgctgttttaattttgaaaacaaaaaatgctgtttgtgaaaaacattctgtaaaagttgcagaaactaatgattggttgaatgtatctgaaatagtactatgaatctttttgcgaaacaagatgtgaagtataaaatgaaaaattattatcttttatgaattgcttatttattgtttaaatttttgttccccctcaaattatgatcggttaagaaatatttataatagaaatttccaagcaaaataatattattatttgaaaattaatttttctttgaccacctagctactgttattttattttatattgtggttcttttttaaaagatttttttatgaactacttatttataattgtttaaatttttgttcccctcaaattatgattggttaagaaataattgtaataaagatgtacaagccaaataatattattatatgaaaattactttttgcttgatcacgtaatggtattttattatatgttatggttcttttttaaaagaataaatatatgtaaaaacacattgctgatgaatcaatgtgaaagcaattattttagagctgtattattcatataacaacccatatagtaacattttgtacaataatattttttttatgtttatttatttccatcgcatcatttatgttatctcatgtttctctcacttaattgtataattactgtacaagtaacacctctcgttatttttgtgcatgtgtataactcgattttcttgtgcacatcttctaacttatttcctgttttggcttgtcataaaggttgcgttcaatggccccaattgaacatgttgcctttatttgtcatctgtcactcatgtgctgtggaaaatacacaattttttctctctctctctagaagctcattttcatattcggactattgcttgttgttttccgttctctctcttttattttttctatcaaaatgtcattttcagttcttgtagtgcttatatagccatataggcacataccaacggtgacgacattaattttcaatagattttttggttggtgtctaattaattgttattggtttttattgaatgttaatactaagttggcgctttattttccaagtctacttgcatggtttgagtgcacactactgttctttttattttatgtatcaaggtgttttgacttgcgtactgttcttttcattttatttaatatttaatataataataataattgacgtgaagctgatatgggacgaatttataggtcacagaagtcatataaaatagaattccacacatcagttttgactttcatagtttcataaatgtttggaatgcctttcaacgacggattccaaccttcatcttcacctacagacatgaaagcgagccacgtgtgacagttttataccatcatatgaaaagtccactgaaatttcaacacctcatgccatcgaccaatcactagaataagtaattaaaaattgtagattctcttttatttttccttataagtaacaagaaacttctttttcccttttatttttatttggatttggttgtctcatcgtttttcatcctgttacaaaaaagacataaacataattataatatcacatactattattttgtgtggtatttaataattttaatattatatatttatttcttataataacattcaattaagagaatcttccaaaaaaaaatattaattaagagttatgggtaacctgtagggcctaagttctaaatgcaaattaaaaggcaaggattatataagtaattacatcatttttactatgcgtatattgcagtgttgtacaatcacatctcttcttttactgtttcttaaatttcaacatgcataagaaagttgttggtgtcttgttctgaaggacctgaaggacaaccttgcacc

SEQ ID NO: 2544 - DNA, 2877 bp, Glycine max
  Intron number 4 from transcript Glyma07g23190.1 (locus Gly ma07g23190) derived from phytozome v7.0 (chr-ID Gm07; pos 24912360 to 24915236)
agtgggattgcaactttaactaaggtaatttgttgtttacttaaatcttttctttttgttgaatttctgtaatatgcttatgctaacaactacctaacaatttgtgatgaaaatcatgttgaacttagttatctaacattatatgttgttttaaagatctctataaggctattgaaaatattgtgtcaattattgacaatgttgggagtattgtatcacaattgaaaaatggcagaattggtaagatttaagatgctttacttgggtttttagctattaattttgttaagaaccaagaattgaaatgagaaagaaaataaaagattttattgactagtaagaaaagaacagaaaataggagagaaaactctcctccaagggtttccctttcacaaaggatttctcctttcacaaagagctaatgctcaatctacaaatgataagatccccttctctcctatccttcttcctctatttatatctaataaatctctctaactaactaactcattagtagtttaactatattaactaactcttcttctccttatatcctaacaatacactcctcttaaaactcaactgaggtccgatgcatgcaaattgaggtccgatggcttcgatggtgggagggacaagggtggactccatataactttaatcagcttgactggctcggtacattccttctgccttagttccatggctaagctttcaaccatagatgcaacaaaatttaatgctaaaggctcacccaacaagttgacactccaaggtttcaacaccattgttgttccaaccaccttcatgaatgatttttgtttcaccataacaatctttgtatggaaatctgaatgttgaaaacaatgtggcttggttgaatcaccagcttcgagttccttcttgattaaatttgtaattgggttatcaagaaaatcatcttcgcaatccacattcgtcactttgttttccttgtgcttctccctttttatcggtggatcaacttcttcctccataaccttttcaatcttcttttttatcttgctaactttgcttcatcatttttggtttcttctccaccacaaaggatgtggttcttgattactgaaccttctttatttttgttttctgatttcaagaattgcaatgggtcattgtcacactcaaaactgctatccttcaaatcagttcccccttatatgcttctatcaaagttgggtagttccacctttcttgcccaagaactagcctttgcttcactgaattttgtcccatttccctccatgctatttttgtcttgttgagaggcatgggaatcaacttcttcattcaatatcttgcacaacatgtgtttccactctgaaatgtcggtcctccctttcaagaactttgtggaagtctcccattttttgatgtgggtttttgtcttagttgaattttcttgcttcaagatactcaatctttcaaagatgtggttaccatggtgatcttcgaatctttttatcaaagctgtggaaaatgactcccaatgtgaatctggattgttttggctccaaatgtagaaccaatgtgtcgcaacacccttcatgctcatgaatgcatattgcagcttatggaatgaaggaattaatttcttttacctcaaataatttttcagccccagcaatccaaccaattgggtctgtccccatgaatgctggcagctccaccttcttatcccaaatttgcgcttcctccatctctaacactgacttcccctcgaagatccgacaggccggaccaatttgttaggaaccaagaattgaaatgagaaagaaaataaaagattttattgactagtaagaaaagaataggaaataggagagaaaactctcctccaagggttttcccttcacaaaggatttctcctttcacaaagagctaatgctcaatctacaaatgataagattcccttctctcctatccttcttcctctatttatatttaataaacccctctaactaaccaactaactcattagtagtttaactatattaactaactcttccttctccttatatcctaacatattttgtctagagcatcgttgttaatatcacgccatagctactgctattgtgttcaatggcttatcataggttcttgcactatgctaaatgtatagcatggcaccatgctacatgaataacaatttactttaaacattatactccagaactatctaggacgaaacaaggttttcacttgttggagatgagttctttctagtttaggagaataaacacagaagaataattactaaaaattccattagttgttttaggtgtgcatagttttaggtttgaatggtattacaaatatcagttttttaagtaagatgttattttaaattatatgcattatggttagtgttatgaactacctattgtggcaatggcaagtgctctatttgagaaaactatggtctaggatactgtgtaggcttctcatatatcttaacccaatgttttggtaaaactttgcaatttgcagcctgttagaaaccacaaacacaaatgagagaaaacagtcgtgtcaaacaatcactaccgatggaatatgatatattatgaatgcataaaaggaaatatagagaaatctcaattcctactgcccaaagctcagctccttcaaaggcacaaaatgcttcttacaatgatgttcgtaaacgtaatgaacatattattgtcacaaatctgcaaataagttgacttatgaagtcagattgaatgtaaaagatgataatgtgttacatcttacttgaccctgtaattagtgaaacctttattatcttataattcttgactgcgttgtagatttagtgttattccacaagca

SEQ ID NO: 2545 - DNA, 1170 bp, Glycine max
  Intron number 1 from transcript Glyma03g17950.1 (locus Gly ma03g17950) derived from phytozome v7.0 (chr-ID Gm03; pos 22773459 to 22774628)
caggctcttcacattgccttggactctgatccacggtgggcccctcttatttatttatttatttatttattgaggagatatctggtgagagcatgataggtgataacagcaaaatcttgatcatatatattcataaaatgatgatcacgattgctttaattttaaccatccatttcaatttatatagctaaaattccctactttccgggtctcatgtggtgtcatctttctccttatttgtttcatgtatttatttatgtagtttttttcctaatcctatatgtgtagatactcacacgaggaaatcttattcgctgtacttgttttattagttttggtgtgcatcagttgcattgttttctctgttagtctggaaggcgattggagttccaactgtggaatccataaaaaaaaaaaaagtcaagagtgggagaccgagggggaaagaaacattggattgtaatatctaacatcattccaagaaactttcaattccttgagtttttttattttgagttcaatactttattttagattaggggcttctgttaaggaagtgattatttaggttctatgtaggattcaatagtgaaggctacaaatagtttcgggtaactcccaagtctcaagtcccttgcttagaacattattttgagatttaatggaattgtgaattataatataaaccaagctttgttcacaaaagttgatgttggaagctttgtattcagcacttgagtaaacaaagtctattaaactataatttagatattatatatctcaatggagcctaagcatgtttgaaatgttgtatgattctttttcttttgttattaattcaattgacaaactgaaattgatataaagtttgtgttacaacttacaagtcccactttaaagttctattcattgcactctgtatttcagcatctaaataaacaaactctattgaagtattattcatataccatatatctcaatggagcttcagcatgtttgaaaagttgtatgattctgtttcttttaatattaacttaattgacaaactgagtttttgtgttacatgtataactttaaggttctatccgttgcactattatgagttgtttttggataacataaatatcttttgtacatccttatcttctctttcacatcatcgcagttctt

SEQ ID NO: 2546 - DNA, 1102 bp, Glycine max
  Intron number 2 from transcript Glyma19g32680.1 (locus Gly ma19g32680) derived from phytozome v7.0 (chr-ID Gm19; pos 40400955 to 40402056)
tcacatcactaccaggaaatcaccctgtggtgaaggtattttttttttcactctttgcttacttgttattactatggttgttgttttgttcgcttatcccttttattctctgatttttatattgcccttttgattgctgtttatttgcaattgttcattccgcgtttcataagtttggtgtgccccaatgtatgtggctgtcctttatgtaaggtgaagttttagaagtgaggatgattcaatgaaagtagtgacaaaaaaaaggaacctcagaaaataactttcttgtgcaaaataaggtcctaaagtagattgaaatttaaacacaaatcagaagtgatatcaattgtggctcatatgataaaaatataattttgtctagtcgtatgttttaagtgatcatagacttgtcttgctttttgagtttggcaatgtagctattagttgccaaagtctggactgtgcttaagcgaaagttttgaaggaaaagggaagagttgttttttttttgtggggggggggggggggggatcatgacagtgatattgtgattataaaaatgaatcagggatgattggaaggtttcatttataatgtattatttctttctttcacattttgagaaagtattaagtgcgagataaaaaaaatggtttgtttcgattttcattcttgtagttgaagtgcatctgcaaggtaaatagtttaagttatgtttacattttcttgaataatagttggtgctaaaaatcagaatgttcttcaactaattgtgatggttgtctgaaataaaatgaccttcctatgtcaatggcttgccgggttgccttttttgtcaattgttatcatgcgattgattttatttgtgagcatgagcagcccgtaaattggaaagactgctgagctgttgggactaaaagcttgaaaagttttgcgctttctcatctttctctgaactcctgaattgtgtgctgtcatatgtttttacagaacagaaatattgttgtgttacttagcttgctgacttgaatgttttttgtttgtgaaaatgatattctgcattgtgttcatgaaactgctgcttgtttttaggtaccaacac

SEQ ID NO: 2547 - DNA, 5871 bp, Glycine max
  Intron number 7 from transcript Glyma08g22840.1 (locus Gly ma08g22840) derived from phytozome v7.0 (chr-ID Gm08; pos 17321397 to 17327267)
attattgctgagcggtttattgaaggaggtagcccgtatgtatccaaaaattgtacatgactattggccggtaattttataaattgaaattgtaaactgcaacttattatgtcattttcaaagcgctgaaaataccttgtgtagagttgcacagattgaagtgaacaattcaattagcttaggaatacaaactaccaattttgcatctctatctagcccttcctatgacttgctttataaatatattgctcctaaactataaaccaaggaatgttcatactaggttttagcacctcgttaagtaataagggttagacttatgcaaacgtcctggtccttcatttaatgcattgctcaagacatggaagtgatattgttactttagtgcatggagcgtacagcatacacaatattgttgttttcaatgacttactggagctaacaattttcttgttaaagcattaaatgaattaagaatatagatacttcctcaaattatagttttattaagaggtgctttgttagatctcaagatagaccagttatctggagggtctattatagaaggaagaaagcccctacacgggagataggatcgaattagttattagtttaatctttagggccatctatctttattattctatctttatctttattattctatctttatcaattagttggattaggatattataaataagagtattctcattagaggaaggggggagaagaattagaaattgtaaagggttttcccttggaagaaggtttccttcttgaataaattcagtttgctcccagtattttccgtatattcttctactttatgtttctcttgttttctctgctgttagggatattcaataccctaacaattggtccgacctgctctttcctctaccattccagatggattcacgtctagacaccttagaccgcaccttgatgacccatggagaagacatagctgatctcagaggcggcatccagagggtagaaggcatcatgaatcacgtactgcagcagctggaatgactacagaaagacccctccgataccaagtcggagagcaataccgaatctgaggtggtttttgaaccacgcttttggaccaagaaggtggaactaccggtcttcgatggaacagatcctctgtcttggatagctagagctgaaatttttttcgaagtacatcaagtgaaagaagaagaaaagattcgattgacattcattagcatggaaggggaggcggtacactggtatcgtttcattcgaaaacgcaatccatctctttcttggcaatctttaacaccactcatgcttcagcgttttggtgaaggtagtaagggcaatgttttcgagcgtttaaaaactctcaaacaggaggagtccgtggacgtttatttgagggaattcgaaattttggtggctcaaatccctgatccatcagaagaacagatgctgggatacttcttgggcggtctccagtcggagattcgatgtagggtgcgatcttttcggccaacagaggtcctgcgtgccatggaaattgcacgagatgtggatgaagaactccgccttgctcgtggtcaacctccttctcaaagggtttttttcctccgcgttttcaacataagggaagcgtcgtgattagcaacccagcgagttcagcagccactacagcaggcaattatagcgcatcccaggcacgcccagctactacgggagcacggaacatcatgacagctccaaaaggggtttcttcgtgtggctcaaataacccgcattccggcagtgctggcaccttttcaagaaacaagggagctagacaattgccatacgttgaatttttaaaacgacaagaggagggccgctgttttagatgtggtttagcctttggttttggacataagtgtccagaagggagtctgcggatcactatccttggggaggacgaaggcgacaacatagaagagaatgacaaacaggaaccagaggagaccaatgatgtagtgggggatcaataccactgccaacggatggaattatctgaactggtccagaggaacattacgcctccaaaaaccatgaaactatggggagaaatggctggtgttggggttaccattctgattgatagtggcgctagtcacaactttgtagcaagggacctaatctcaaggatgaactggccgattcaacctactagaagttttggggttcagctgggaaatggacaccaacaggaatctcagggatattgccagaatctgatcctaaagatgcagggttatgtttacactggagactttttcttgtttgatcttggtggtgtggatgtcatcctcgagatgacctggttggcttcattaggtgaggtacaacacaattggaagactcttaccatgtcttttcgctatcaagggtcacccacccaaatcaagggagactatagcatgcagaagaagggattttcagcgaaggtctttgggagggcttcagatgttgaggctgctgccatgatacttttctattcagacctgctccgagatcaagagggagcaactcaaggtgaggagcaaaagcttgaccatcttcagttgacccaattacaacatgtgacagagcgttttcaagcggttttttccaaacccataggcttacctccaaacagacttgtagatcacaagattgtcctcaaagatgggacgggtcctataaatgtccatccttatcgatatccacacttacagaagaatgagatcgagaaacaggttgcagaaatgttacaagaaggcataatccggcccagtaatagcccgtattctagcccggtaattttagcaaaaaagaaagatggcagttggcggttctgtattgactatagagcactgaataaagcgacaattccggacaagtttcccattcctgtgatcgaagaattactggacgaactatttgaggctgcatacttttccaaaatcgatttgaagtcaggctatcaccaaattcgaatgagtgaagaagacgttcctaaaacagcctttcggactcatcaaggtcattatgagtcccttgtgatgccttttggcctcaccaacgcccctgccactttccaacgagctatgaattctgtgttgcagccctttctacggaaatttgtgttggtcttctttgatgacatcttagtatatagcagtgattgggagagccatctacaacacttgagtgaggtcctacacactctctctcatcataatttctttgcaaacagcaagaaatgcagtttgggcaggaccaccatcgattatttagggcatctgatttcgagagagggagtctctatggatccaaaaaaagtagatgcagtccttcattggcctataccgaaatccattaaagctttgaggggatttttgggcttagctggttactacaggaaatttgtgaaagattatgggaagattgctaaaccactcactgatttgttgaagaaaggagcttttaattggagtgcagcggcaactgagtcctttaatgcacttaagaacgcattaacccactatccagttttgactttaccagactctaaggaacctttttccattgaatgtgatgcttgcggaacagggataggagctgtgttaacacaagggaaacgtccaattgcatatttcagcaaagggttagctacttcagttttaagtaaatctatgtacgagaaggagttaatggctttggtcttagcagtccagcattggaggccttacctattgggaagacgattcactgtattcactgaccaaaaaagcttgaagtacttgctagaacaacggataaccactccaaatcaacagaattggatggcaaaattattaggatatgatttcgacattgtatacaagatgggggctacaaataaggttgccgatgcattatcaagatcgcatgaggagaaagagctgagggttttgtctcggcccttttggcaggatacccactagattgatgtggaggttcaggccgaccccgtattgaaaaagattatagaggagctgcaacaagatcctgactctcacccttcttacactatagaaaatggtaagctgcactataaagggaggttggtgttgtcctctacctcggtgtggattccaaaactcttacaagaattccataccaccccaattgggggtcattcaggcatcttcaaaactcatagaaggttagctcaatccattttttggctaggaatgaaaaagtcagtaacagattttgtggcagcctgtcacacctgtcaacgcaacaaataccaggcatcatcaccaatgggtttgttgcaacccttaccgatccctaatgctgtttgggaggagattagcatggatttcattgtgggactcccgaagtcgaagggatatgacgcacttttggtggtgattgacagactcagcaagtatgggcacttcattttgattaaacatccatactcagcccgctccattgcagaagtattcacaaaggaagtggttagactacacggcattcctatttccattgtgagcgatagagacccgaccttcttaagtaatttctggcaggagcttttcaaattgcaaggaactaaattgaagatgagcacagtttaccatccagaaacagacggacaaacggaggtgttgaatcgcacggttgaaacttacctacggtgctttagctctgagcaaccaaagacatgggtcgatttcattccgtgggcagaatattggtataacactagtttccacactgctgcccagagcactccattcgagattgtttatggcagacctcctccaaccataaccaggttcatacccggggaaaccttggtggaggccgtggcacaagacttgatggatagagatgaagctttgaagcagttgaagcatcatttggaaagagcacagagtctcatggtgaaacatgcaaacaatcacaggcgccctcatgatatcaacgttggagattgggtttatctaaaaatcagaccacatcgccaaggatcaatgcctccgcgattgcatcccaaattaacagctaggttttacggtccgtatttggtaatgagacaggttggggcagtagcttttcaattacaacttccttcggaggcacgaatacacccagtgttccatgtttcacaattgaaaagagccctcggaaatcatcaagcacaagaagaattaccccctgacttggaacatcaggctgaactatactttccagttcaaattttgaagattagagaagttcaaaaacagcatgaagtcgaacgtcaagttttgattcgttggcatggcaaatctgaggaagaggcaacttgggagaatgtggatgtgattcagactctatttcctgaatttaaccttgaggacaaggttcattctttggaggggagtattgttagatctcaagatagaccagttatctggagggtctattatagaaggaagaaagcccctacacgggagataggatcgaattagttattagtttaatctttagggccatctatctttattattctatctttatctttattattctatcatctaatctttattattctatctttatcaattagttggattaggatattataaataagagtattctcattagaggaaggggggagaagaattagaaattgtaaagggttttcccttggaagaaggtttccttcttgaataaattcagtttgctcctagtatttttcgtatattcttctactttctgtttctcttgttttctctgctgttagggatattcaataccctaacatgcttgctcttatagatgcattattttgcagttacgttctgaaaa

SEQ ID NO: 2548 - DNA, 1934 bp, Glycine max
  Intron number 1 from transcript Glyma14g04140.1 (locus Gly ma14g04140) derived from phytozome v7.0 (chr-ID Gm14; pos 2780499 to 2782432 reverse strand)
tgacagtaaagaattcagcttaggagatttcctcagtaagtttcttcatcatgatgtttttctgcttacaatccttgtttgtgtgttttgttgttgtctttgaaagaagtggctaagtagagcttgaggaattttattgttaatgttttggccttttgtcaatgattttagacaatttcttatggcatggttgttctagttttatttccttgatctgatctccaatttgccttgatctgtttttatttgactgaaactcaacacaccactatgatatctaatcagatttagaaaaaatactggattggaaagacagatcatattacatcagtcatcccataacttttcaatgtttttattttttttatctttgcttttaaagcaatcaaattatctattttctcttcacaatttctctacccgtcacttgtatgatggaggagaagcaaaactactatatcatttacttatatttttattttggaatttgttttagcataacatacttctgagagtgtcacaaaaaataggttggcttcaatcatggtactattgtgtgttgtttccctctgcagcatatatgctgttttttgggtactttgtgtcatattcttaatatattaatattagtcgatttagaaaaagttaggcttaaattggaagtactaagagaaaggcatcactactcttgttggtatttttctggagtctgccacacgatccacaaacgttagtctcaactaaagtattcaatcttccatttgacgcagcacaatagctaacaaagaaaattactgttagttaccatttgtccctttttgggtagaagggaaaaagaaaaatacgatacccaaaatgacttaaaacaactactagtagtactttttgttattcttttcttttggtacaaatattctgttttgatactctggttgagtggccactcaattctactagtttaattttgcttttatgtaaaaattgtaataataatattctgagacgaaggaaaaactgaggaaaaggacttgctttaaagctattagtcaaattgaagctaaccataaaccgttacacttataattggcgatgattaagctatcatttaataaagccatacgttttatgaagcataaattaagaaaaagaaacattgacttggaccaaacacttagaataaaccatttccacgtgtagcaggggaacattcagttgggcagaaaagtaggtaactctttgaacaacagaccattccaatgttttacagtttccgtctattaaattttctgctcataatcctattgaatactttgaacatggaggttttgttggctgtttggtattaatatttatgatatccttttttcacctcgcaataacatgctttgaaattaggttgtaattcttgcaagcatcttgcaatacaattttagtataatttctatatgttgtcggtttaacaaattttatactattgaacaataaaaaaaattgccttatacgacttttaagatatattattataagaatcatcaaaattattgtataccagttgaaagagagatactttgtgtctttatttttattttttaaaataaaaagtaaaaaagcaaaaaaccagttgaagaaaatagtgacaataattatattttaaagatttatgaaagaaatacaaataattatatattaaaaaataatccaagaatatgaaatctgtataccaaatagaataattatccttaatagttatagattatcatttgtgattgattaatagtatagatactttactatatggttgcatatattactcataccattttctctataatgctctattattatgatatcaaataatcttaccaaacaacttttgatttttgggtattgttgctgcagttttcaacacggatactaaccactcagtggttcaa

SEQ ID NO: 2549 - DNA, 605 bp, Glycine max
  Intron number 9 from transcript Glyma08g01800.1 (locus Gly ma08g01800) derived from phytozome v7.0 (chr-ID Gm08; pos 1149940 to 1150544 reverse strand)
tacaggttgttacaagttgggttcagcagttgaaggtgcaaaactatttcaagccctatctttgagttcaagataatggaacaaactatcaatatagatccttgttttatatatatatatatataaaggagggattgaattattccttgctaaaattactcccttcaataattctgtatatattaacttttattaatccaactgttgatttagatgaatcagactcttgtagttatctaatcttatagtcaaaatttacttatattttaaaaaaagtatattatactttaaattgaatttatttaataaaatatcaaataatttttaaattttataagaaggtatgagcttgatctactaaatgtaaaagggagtaattttaacaagggttattcttggagtagcttgatcttctgtgtgtgtgtgtgagagagagagagagatagaggttttcccttttatcacagtggataaataaataaaattgatttgatatttatttaaatgtttttttagcttttaaaaattgcaaaataagtagcttttccaattataaatatgatttatgttggctgctaacttgctcagtcatttgtatgttcagt

SEQ ID NO: 2550 - DNA, 981 bp, Glycine max
  Intron number 1 from transcript Glyma15g29900.1 (locus Gly ma15g29900) derived from phytozome v7.0 (chr-ID Gm15; pos 32813111 to 32814091 reverse strand)
tcctttcaacgttttgattactggctcaaccaaaggttaatttactcttatactagcaaggttttaaatatctgtcacggtcgtgttccggtttcgtcgcctttgttgatatcgctgcaaatgaggccatgcagttcgaattattgtcgcgtttcggttgcagacagttaaaaaaagcttggtgttgcgtccaaatcacggagacagatttttacaaccttggcgacttttagtataaattagaatcaacaacttagaatcctcaactttaacctcactctctttgttggacattcttagtattctcttttcttttctcgatgtgcatttcacacactgtccacacaattgactaaaaatatctcactcaattacttttttttttttacaaacgaaaatcgaactcaaacctaatgcatctgccattatagattctacactaacttttcactactaagccaacctagtaggttatctcactcaattacctcatactaccttcttttttatctgtacttgtatatttatttatttaatttttataaccgagtattgtttcaatttaaaaatagcttgtaatttaaattattcattatcatttaaattattatttgtatatttgaaatatttatttactatgaatttgataaatatttatcccatgctaaaatactaatttatttatttatttttggagtagaatgatgttcttgtaagtagctcgcaatttagtggctaatttacttgaaaatgaaactacattgttacgtgcctccatctaagaatttagttgaaaatgtaattttcttgaactttattttgagtttcgaatttatgaattggagctctgctaagtagcctgtgtctctcaaatacatgtatcaacatgtacatgaacatcataatttatatattttttgtagatattttctaacttattctctgttggtgttataattttatatgattcaggaatagggt

SEQ ID NO: 2551 - DNA, 1298 bp, Glycine max
  Intron number 7 from transcript Glyma16g29600.1 (locus Gly ma16g29600) derived from phytozome v7.0 (chr-ID Gm16; pos 33368292 to 33369589)
ttactgcagcagaaacaagtagaacaattattgaggtactcagttgtattaattttgctaatcaatgatgtaatgtaacctcacagaacgaggaaattttttttggcaaacatttaggttttctcattttagtgctatatttttacaacagagagaaagaagagcttactgtttggattaaatgattgctagagaatatcctatgttccaaaatctgcaatgttcttatatgaagaaattaatgatggtaaatatagatgtaaaaacaaatatccagtgtttccatttcacttcagaaaagtgttctgttctcttcttgtttaaaattgatttagcatgacttgtttagttgtttttcaaaatgtatacaaaatataaaattaaggaagatatggttgatttttttgttgttttttgttgaggaattacccactctgtgcttagatgcaatcagctttggtaatgtcaatatatatcatgtcggctgatatatatttaattaccttagcaggtttgtggtcagtaagtttgggatgtttatatgtaagtacctctggtccttttatatttatataatacatacatagttttgttcataaaaaaaaataaaaattaaggaagacaattttttttaggtttacggttcagtgtgtagttacctaccatataataagagaataaattatcttgtgatgtatcattctttgttttcggacccaagtgttaatttaaccttcggagagaactgctccataattttcctttgcctgtgtttgttttgacatatggtgcagaagttgacaaggtttcttgcaatcctacggaagaatagctggaaatttttgttacgaaaaaatatttaaaatttgttgggatttgccaagtgtaagtcaaaatgatccactaagtttcttttaaaaaattatcgaagttatataactttaataacggaattatggtctcattctagtaataagcattgaactcatcattcctgaatttatattcatctttgaaaacttaatgccaaaaatatcttaatattctgttatattaaattctttaattatagaacaaactgtttggtagtacttatgtgttatcttaagttttaacagactgtgagccttggatcctttatccacaggcttaactcatgtaatgaaaactgtgaacttgagagggaagattatatcaagcagcttatcagttgcatttattcttatcattgcaactacgaatgctagctaatgaggattgtggtatatcatttttaggttaacagcaaagcaactctg

SEQ ID NO: 2552 - DNA, 894 bp, Glycine max
  Intron number 1 from transcript Glyma06g04980.1 (locus Gly ma06g04980) derived from phytozome v7.0 (chr-ID Gm06; pos 3518229 to 3519122)
ccaccactgcaaaggaacactcaaggtctctctctctctctctctctctcttatgcactctttggatttgtatctacagatatatataataataatgataattcttcatggttatgtagcgtttgactctagttgttcagatctttctgtacctggatctggtgtctctagttgatcatctgaacaaaccagtggcatcaattttagcacttgctttgattgattgttctgtgtttttaaaattaagcattttcattacaagacacttcctgtgaggactcttacctgttcttgatattgttgtaattttttttctcttaattttctttccaaaaactcgcctggatttcattttgtcgaattatgaaccagcttttgaaattaaaaagtgaaaaaacatgtattatacctcagaatacaatccatccaaatttagattggcaaatctatctacttgtgctcatttattttcttttattttttgattgatgaggtggatggatctaactctgcctcctcccttttacgagaaattacagtcttggccaattaccacgtgatgcattattaactccttttcataaattaaaaattgattatactaataatttaggacaacataattctgaactatacaataatttttttcccttttactgtttttccactaaaactgaaattggtttggcaatctttagtttttggttgatatggtttaatttgtagatgttctgttagttttcaaaaactggctatggcaaataatattggtacctctttgccttcttgtgtattgaggtgtgtaactggatttaattttataaagtttactcacagagtattgtacttttaattgcagcttagcaactataactcttttgagggggttcttta

SEQ ID NO: 2553 - DNA, 6344 bp, Glycine max
  Intron number 4 from transcript Glyma17g24400.1 (locus Gly ma17g24400) derived from phytozome v7.0 (chr-ID Gm17; pos 24722924 to 24729267)
tacattaaatagtcttgagggaattgtgggaaaaggtacttgttgcaattcatgaaaaattttgggagactttttcatttttttttaatatttttttggtaaaataatcactttttcttagataacagttaatattttattgaaagggagataacagttaatatttttttgaaagggatcttggttaatttgaaaatcaagatgatactggataaatctgaagtcgtgtataacactttcaaattgaatcaaatttcggggttcaaccaaaattgttcaatcggataaaatcagaagattataattcaagagttttgttttggtcttgtatgttttgtcacccgttatgctttctgaaccagaatgattatttatgatcaaagaaaaggtggttttttggcggttgatggaagttatttctttttaaaaattgttgttgatggaagttttagtaacttccatgtaacttccaaccgttgatggaagttttagtaacttccatgtaacttccaaaatttgcctaaaccgaacatctcgttattacattaaaacaagcgtgcactcttattttaacataataaagagatcaattacactaaaatgtccaacaaacctcccccattttagtgtaattaccaatcaaatcaccaaagtcataacataccacaaactactgcatagatgaaatatcgtgacgattgaatttcatcttagcaaattacacgtttcaaatattcgaatatcagggtgtcactaaggattgaaccctttctattcataatgaatacatgaagataatctgcacaatagtttataacattactcttgctcgacactagtttactagcctgtgtccctatccttcataagcatatcaaagccaagtcccagcttcttgaagcggctaaacttcattcttatatagatagttattttctttcttgcacctgcaaatgcaatttttcaaaagaaccattgaggagttatactccaacctccttaacttacagaaccgaacacataccttttgggatactttcgatgatgtgttccaatctctatatgttaagctttccacattgaattcagcacctaatgtcatattagatgggaattgggtatcttaacataagagatttcagatggactttaatcctaatcccacagccgaccttttcacgagatctctacttaaccctttggttaaatgatcggccaaattatgctgagttctcacaaactccactgatatcacaccatgcatgattaactcccaaaccatgttgtgtctaacacccaagtgtctagacttcccattatacacttgactatatgccttagccaaagtagcctgactatcgcacctgatagacaagggaggtataggtttgggccataatggaatctcatagatcagatttcttagccactcagcttctttaccagctgctgctaaagctacaaattcagattccattgttgaatttgtaatgcaggtttgtttcttggatgcccaagagatagcacctcctccaaggaggaatacccaaccacttgtggatgaataatcttccatattggttatccaacttgcatcagagtaaccttcaataactgaaggaaatccagtatatgtcaaaccatagtcaatggttccctttaagtacttgaatactctattcatagcttgccaatgatgagaactaggattacttgtaaacctactaagtttagcaacaacataagctatatcaggcctagtactaatcattgcatacatgagtgatcctatcgcccttgagtattcaagttgagacactgctacacctttattaggtaatagcttcaggttaggatcaatgggagtacttaccggagaacaatctttaaaattaaatttctccaatatcttctcaatataatgtgattgagagatggaaatgccattgtttccacgtttgatctttattcctaagatcacatccgcctcccccatatctttcatatcaaacttagaagacaaaaatgccttagtttcatcaacttgatcttggtcggtaccaaagatcaacatgtcgtctacatacagacaaatgataactcctttgccatgagtatcaaacttgctgtatagacatttatctgcttggtttagaacaaaaccactagacaacacaacctcatcaaattttttatgccattgtttaggcgcttgtttcaagccataaagagatttcatcagtttacacaccttatttttatttcttggcataacaaacccttcaggttgtttcatgtatatctcttcgtccaattcaccatttaagaatgcagttttcacatccatttggtgaatcaccagattgtggatagcagcaagtgctaacaacagtctaatagtggatatcctaacaacaggagcatatgtttcgaaaaaatcaataccctccttttgcctaaagccttggataaccaatctggctttgtacttgtcaacagtaccatccactttcatctttctcctaaagatcatcttacatcctaatggcttacatccaggaggtaagtcaaccaatttccaggtattattttgcatgatggaatccatctcactttggattgcttctttccagaatacaacatccattgaagccattgcttcactaaaagtctttgggtcttcctcaacattaaggcaatattgatattgaaattcaatatcattccttgacccttcaaccaaatagagttgaaagtcatcaccaaatgacttagcctttcttactctcgtactctttctagtttcagtactagttgaaggtatatcctcaatattaactgagactttcaacatggaattcatgtcctttggcctaggtatagatgtaaatctttgttcatcaaagatagcatcccgtgactctataaccgatttcacagcaacagaatcattagattctagcacatagaatctatatgctttagaatgttcagcatatccaataaatatgcaatctatacctctttcacctatggttttccttttaggttctgtaagcctgactacagccctacatccccaaattttgagataactcaaatttggtgtctttttgtgccaaatttcatatggggtaaccttattccttttgttaggaattcggttcaacaagtaacaggctgtcaacatagccttaccccaaaatccttcacttaaacccgaataggataacatggaattcacaatttctttcaaggttctattcttcctttcggctacaccattctgttgtggtgtatagggagctgtagtttgatgtattattccagtagattgaaaataaaccggatcataatactcacctcccctatccgtacgaagagttttgattagcccattttgatgaagttctacctctttcttataaattttaaatttatcaagagcttcatcttttgtatttaataaatatacataacaataccttgatgcatcatcaataaaagtaacaagatattttttatgacctaatgatggagtagcatgcaaatcacacaaatcactatgaataaggtctaagactttagtctcacttttaacatccttaaaaggtttcctagtgatctaggtcaacatgcaagttttgcatttttcaatgttcatatcaaaaaggaggaatcatacttgtttttgacatatcttttaatcttttgtaatgaacatatcctaatctagcatgccaaatttctgattttgtcatattagttatagaactacacgaggccatacaaacagattcatgaacaaaaggaacatcaatgtttaatttaaacattccattacaacgataaccaaatccaacaaacgaaccatgtcttgacaagatgtacttgtcactttcaagtacttgcttgaaaccacaattatttaaaaccataccagacaataagttcttacgaataccaagtacaaataagacattatccaaatacaaactttttccggaagtaaaaactaaattcacacaacctaatcctaggattggttcagttgcaacattgcccatcttcacaatagagccatcatcgattggtctaaattccttgaaccaacaacgatctttgcacacatggcttgttgctcccaaatcaaactgatgcaagctccattggagcttgtaggcctaggatcttcttcatcaatggattcctttgcttcttggaagatgaatggcagcggaatggagaaagggagagagagaggagacgccacttcaaggagaagatgagtctagaagaagctcaccaccataggaggccatggataagagcttggaggaagaaggagatgaatgaggggagagggagagaagagcacgaaattttgtgctccaaatgagctttgaaatctgaagtttaatattcaaattatcaaagttcaaaaaaaatgcacacacatgacctctatttatagcctaagtgtcacacaaaattggagggaaattcaaatttcacttgaatttgaaattgaatttgtggagccaaactttggagccaaaatttcactaattatgattagtgaattttagttatggttcagcccactaatccaagatcaattccaagattctccactaagtgtgcttaggtgtcatgaggcatgaaaagcatgaaggacatgcacaaagtgtgactatatgatgtggcaatggggtgtagtaagcaaatgctcacctccccctctaaaatttaattggattgggcttctaccaattcaattaaatttatttccaaccacacacatcaaatatccacttagtgcatgtgaaattacaaaactacccctaatacaaaaactagtctaggtgccctaaaatacaagggctgaaaaatcctatatttctagggtaccctacctacattatggagccctaaatacaagtcccaaaaataatgaaaccttaatctaatatttacaaagataagtgggctcgtacttagcccatgggcccgaaatctaccctaaggctcataagaatcctagggccttctcttgaatctctggcccaatctacttggagttttctatccaatgcctttgcggggtaggattgcatcacaaaccaccaagcaacatcatcatcctgcacatagaatgcatcatatattagtgatacataatttgaattcgtattcgaattaaaattattcactacaatctgaccttgttgcttttcaggatcattagacccacttggaccagccttgttctttcctttgaacacccggcaatccctctttaaatgaccaggtttcccacacttccaacatgacaattttgtctgtttgtttggatctttgttcttatttccttgaaattttcgtttgttacctttagcattgtaattttgcttaactgttccactttcctctaccatattaacggaagaggaacctgctacgtttttatcattgactttgtcaatttcctgagccctcagcaactcctcaatcatgaaatgactaccgagttgaaccagagtcaactcttccttcttatgtttcaaggtatgcttgaagtctttccaagaagaagacattttatcaattatatatgaaactgcaatagattcatccattttcaaatcatgttgagtaaactgacccaaaatccgcagcagttcattatattgttccataacaggcctcgaatcaatcattttgtaattaaagaaattactaactaagaatttgttacttgaggcatcttctgccatatacttggattcaagagagtcccataattccttagcagactcaacattttgataaatatcaaagagagagtcagacataccgttcagaatgtgtccacgacaaatgtaatcgtcgttctcccatttcgaacgcttccttgtttgatccagagtttcgtcttccatatacaccggcatcagtgtactcagcacatacaccacattcaatgttgtcaagagaaagtgcatcttcttctgccatcttctgaaatcctgcccttcaaacttgtccaacttcgcaaacttgcttgtcatcttcaaactatcattcgtcatctcgaaagatttgattcaatcttttgttggttaatttgaaaatcgagatgatactggataaatctgaagtcgtgtataacactttcagattgaatcaaatttcggggttcaaccaaaattgttcaatcggataaaatcagaagattataattcaagagttttgttttagtcttgtatgttttgtcacccgttatgctttctgaaccagaatgattatttatgatcaaagaaaaggtggttttttggcggttg

SEQ ID NO: 2554 - DNA, 4749 bp, Glycine max
  Intron number 10 from transcript Glyma19g00460.1 (locus Gl yma19g00460) derived from phytozome v7.0 (chr-ID Gm19; pos 250192 to 254940 reverse strand)
ctttcataggtcggtatgcatatccactttgtcatttgtgtaaaaattatgcatctttaattgtttttaagtggttcttatttttatctatgtataatcttccttttattcccttttgtgtcattactggttgaaaatgctataatatagacatcctgaatatttttattttcctatttctaaattgtcgatatgcttaacatgtgttctacaaataagacttccgtttctgaaccaaagttcccttgtgtttgtaaatatttccttgtttctttttcattgtccctttttgtgtgtatgtatatatacacatgcaagcacaaacatattatatgaaatctaatagatttgtgcaacactttggtagtatggtgcttttggttggagtgtacctcccattgcacaatacttggctttggataagattaggtatttggcttctatttggttatgtaaataatagtttagttattgactgtttatcttttctaaggcatcttaggatcagttctaaaaattatgtcaagttcttctgatccgcttaaatcctatttaatcagtttctgttggtgtctggttgatattcagtgtcagaagttcagacatttattggttaaatgcatgcataacccatgtaattacatgcatatttgggaataaatggtggtttattattttattattaacatgaattatttcatgataacgaattattagaaaaaagacaagaaacaaatctccttcgacattgtaaccaggcgtaacaaatctagactcttttaccttggagtgcaaccttggatttctctggagataatttcattcattggttcactaacaacatccaaagcatgtaacatccttaattttcaacttcttgacggctcttataccacgacacttcacgcggtgacacttcaacatctttgcattttctgctctgctatgcgtcacttgttcactagggtaggataatctctaagctccaagatgctgataaaactctgtaactctggtttcaagcctcttcaaacttgatagccttccaatcatcttgaggattatccttcaaataatgagtaaacctcgctaggctctcaaacttagccaagtactcggcaacagtcatctctccttgccgaatttggaggaacttgatctccttttggatatgaatactatgaggaaagtaattctctaggaaaacttccttgaactcgtccctagtgataggagctccaagagttgtcaaactccgttgagtgttgttccaccaatgctctgcatcaaactccagcatgtaggtggcaaagtccaccttctatgcatcatcatatctgatgactctaaaaattttctctaacttttggagccattcttctacttccacaggatttgcactgccatggaaaaatggtagatcgttccttcgaaattcagataaccccacgtgttgagggttcgaaggtgcaattgagttggtgacaactttgcttccattcccattcatttgacggatagcctctgtctgcgcttgcataactttggtcatctgagccacggtcgttacaagtgcatcatttgcgtttgcccttcacctattaggtgccataaatcttcatatcaccaatcaaacattgggttgatcaggtccaatatctaaaagaatagcatgccatttataactctaataagcagtcctatgtgcccatatttgatcttttgaaaacaatccactactgcagtctgattttaggatcaaactgctttggtaccatttgtaacattcctaatttttaacttctttgtggctctcacactacgacacttcactcaacatccttgtctccatcggtcagaaccctccgtaggtagtcatttccgaaaccttgaaaatcggtttgtctgcttctaggatcaatgattaaccccacaaaccaacacaagactttttagcttgttttgtccttattcacatgttttttgggaaacttcccacaaggtcacctatcccataactactctaagtcaaacacgtttaattatgaagttcttaagtaatgagcagctgaaaagtagacacatctttttagtatagatagtatcaattaattcctttaagtcattctctattgtatagtctcatacctgcatagcctttggatccctcattctggtgggatttgatcggggtgttatagaacagcgacggtgttcgattttccattgcttgctggttcatttggtgtgcgagaaatgatgaagtattcaacaataaatcttggatgacatgttctctttaagtcagttccattctgcgtatcacatgctccttgatacatcttcagctaagaagcatcaacagcgtgaaattctagttcattggcttcctccgaattcagacttcttgaaattaaataccgatggcaatccaggcttatccggtttgggaggagttatgcatgacagttgtggagcttggattacgggttactatggtttttgtggctacactacgtcgctacatgcggaattgtttggcatttataatggtttgcaaattgcatggcagcaaggctttaaaaagatcatctgcaaatctgattcacagttagctattgatctcattcttggggatgtaaattcgtttcatctttatcatcccttgatcttgaagattcagaatttcataaacttgcagtgggatctaagttttaatcatctttatagggaaggaaaccagattgcagattggttggctaaagagggatcctcctccctgcaagatttgactatcttgcttcaatgtccaacttctcttttctctgattattttgctgattttatggtacactcttatgtgaggtcgtagtcttggttttgttgtctctcttctgtacttccccactcaaaaaaaagaaaacaagaaacaagtaaaatgaaggttaaaaaattctgcttgggaatgaataagtaaaaaataaataaaaacagatgatttgggtatctctacccattctatttgcacattgacaatggtgttcccttaagaagccatggacaaaattgcattccatccaaatacaccaagagtgtgtttggatagggtaatttaactaggtaatgtattttttatagggaattaaattcttttttattaaaagtaactgtttggatattttagtaaaagaaattcaaaattttagaattttaaaaggaattttaggtagttgaaagaatagaatttcaaattctatctttaagagagtgaattttaaattctcacactccgacggcgttgtggattgcgtctccgtagtcaagaaccaacgcggcaagatctgcgacctcacgcatcaggcagccagcactgcgagttgccgcaccacggcaggcttcggcagagggccgattcagcggtcgcagattccggcaaattcgctgatcttaatcaacagcaccgcccagtccaccacagacggaggactaaagttaacaacaatagcgtttcttccaccgttgggcatgtattcgacgacgagtaatttgttgtcgtttggatcagtgctgaagccgatgaggttgacgaggcgggggctggggatttgggagaggatcttgatctcattttcggtggggctggtgcagttgccgcagtcggtgcatttggtggcgtggtttttagaggtgctggtggcgacaagtttggtcgtttggatggcggcgaggagcttgacggcgtccagggtggctctatagactctgccgtggctgccttggcccaggaaggtgtcggaggagaagccattggcggcggcgatgatgttggaaatggatagcttcgacttttaataaaggaatccaaacacagaattttaaaaataaaggaatttaaattggaggatttgaaattctcaaaatttgaaattcagaattttaaattgcctcatccaaacatactctaaagaactgctgaaacagtaaaccatatatatcttttctttcttattccttcctaaacctgcaaaattaattattaagaactcttccagattttaaaatcatatccagaaattcgataaaaactccaatcaatttattcctatcaaaagtggcagcagtatgatgcaagtacaagtaagcaactctttctcaaccataaaagcacacgcttagggagcttttttagtgtgaatactgaagatttaacctgttattagtttctatcatgttatgttccattgtccgagcaaaaagtcttgtactttggaggagattttgacttgtagcttctaatgaataaatagaaacatctttttgtacaattaaaattgtgcttctgaccatttgagaaaccattatcaagatttcatattggtttccttcaaatacattatcaaatatatttagaagttgtaattgctaatatgttaagattatatattattctattatttatgataagatagtaataagtgatttagtcattattacttattattagattgatcctatataatcaatactgatcttatttgctcattataaataaaggcttagttagtgtggtcattcttgacacacaacattacacaataaaacagttataaatattaaggataattcgtttttagtttatattgttaaattccacattgtaattggaaaatcaatgatctctttttgtgttgataaaattaacagtatcatatatttactcgttttgacagagtttgaggacaaacggtc

SEQ ID NO: 2555 - DNA, 1497 bp, Glycine max
  Intron number 1 from transcript Glyma20g22270.2 (locus Gly ma20g22270) derived from phytozome v7.0 (chr-ID Gm20; pos 32305520 to 32307016)
aggtttgttcatattttaattttctcagtttcaaatctctttgtatatgatcttgaacttctttctatagaactatctgtgtgactgtgtgctcaattctaagctgaagcagcttatatatctttactcagtggataagtatcaacagattttgctgatattttttttttgaaacatgctacacacatggatttattttcataaaaaaattcatggatatagagaaaagtaagaaaaaaaaaaagaaggtttgttctgttttgtcacttcatttttttactttttttttcatcaacaaccataatttattagtaaggatttttttgtcatagattattaaggattcataataactttcgtattcattaaaaatgttactcatttatgttttattttttaatttgtagaggacctagtgagagtacatatatatcaaaatattgtaaaaatgaaaaacgaaatgaatttgatcatcatttgtcctcgttcaagaaaaatatacctgtagtatactaaagacggatctagaaaataagtatgatgaagcaaaaataactaattaaaaattaattatatttattcttaatttgattttcctcaattaaatgtataaatctcttagcaatttattcttatacataaaaggtttagaaatttcacgtaaaactaatgcaagtttaagaccataatgtcgtagagttttatgagtaatgttttcttagtaataactaataaggctcacaaataataataaagttaatcttgatcatcttaaataatgagaaagttttgttaatttatagtataacctaaagggacaaactggattcaaatttgttgttatttttcaaactcttttaaagttatggtattcctcaaataactctagacactatttcattttatttttgtatataaaaatttgtgaatccaacatattctttatctaaatgaaaaaatgtaaggggggcaagataaaaaatgaagagtatcaaacataaatcaaataaaactgtgtgcaataaaagaattttgcaacgtgccttccctctttttccgtcattgccagtagtaagtagagtgttatgtaagataaatagatacccttttgataaagagatgcaagatcaacgtaccacccactgttttcattgcatttgcaacagaaatagttgtgtcccttgaatatgaatatgaatttggtgcaaaccaaggttctagtagtacctatatctttgtattttttggtacctgtacgagtattgttaattatggagaataatttttttgctctcacctgccttgttatatgagcaaatgctctcgtatcaattttccattattgttgattggacatgacgggaaaagctgtgatttctgtgccatgtctttctaacgtaccctactagttccaaattctaccgtgtttcgtactttgttttttgttcctacattcattgtttgttaatgttttgttcatctttattgtatagcaat

SEQ ID NO: 2556 - DNA, 2169 bp, Glycine max
  Intron number 2 from transcript Glyma13g07250.1 (locus Gly ma13g07250) derived from phytozome v7.0 (chr-ID Gm13; pos 7399115 to 7401283 reverse strand)
tgtcaccccgtcacaggttctttattttactctctcactcaatccttctttatttggctccaacaatatagaatttatttttgtgtgcttttattgaaaattgctacctactctatccagtctcaaatataagaaaaaatgatttattctaactataaaagttagttaatcgtataaatcttaattaaaaatttattctttttcaacttatatcctttacgggaactcggtattaagaataaaaaggagtatttaaattaaaatcttaattaaatgaaggttattttaaagacaataacattaaataagataaaattagttgaaattgttttatatttgagattaaatgaggtaaagttagttgattttttttattatatttgagaccaagattttttttatatttaagatcagagtagtacttgtatcggcacggggcaaataggtaactttgttccttgcttatcttctgtgaatgatctttcttcttctctaaatgatacttggtcagccaaagagtggaatacctataaaagatgtttcaatgtttaagtaagatctcgattaagagtaataaaagaggacaataaatgagaatcaacagtgttttatctcaatattcacgtaactatatttatacatattttagtggaccttctacctatggctctttccaaggttgcctctttagaaaatgtatatataattgtcattagggaattgatctcatccctaatgatacattctcaaataacatgagtaacctatctttatatatatataaatcatcataggttggatgagacatgtttggtatttaattggactgagtacttagtaaaggggtattaggtatttggataggccaagtatccaacactatagggggtatgaggtattaggttaggccgaatacctatctggtatagtacaaaaaagatttataaccacatgtttagattggataatgttggaggcaaagaaaattggacaaagtatgatttattgatttttgcctgtttgcttggtagaaaaaagaggggtgtggattcagtgactttgtggaggaaaaatcactcattttacataatcagattaatttggtggttctgattttatcacttgttttaatagatcttttttacttatattattaatttaatgcttatatttttatatactttaaaatcataaacaatattattaagcgtgtagattaactattaaaataggattatctctaataaaagatattgatgatgtgcataaaaaaattgaaaaaaaaatgttgtagttcttaaactgtaaaaattttcattctcggtaaaagatttcttacaaataaataattgtcagaaatttttagacaatttgaataatactatagacgacttgttaaactaaaataactctggattaattaatttacgcgctcatcgctaagtagtattttttataattttaaagtataataaatatacaaaccaagtcaataattaaattaaaagtatttttaaaataaatgcatggtaaaatctagaccataaaaattaatctaatggcttaaatgggaggaaagtgaaggtgattttcccgctttaaagtcactgaatttgattacaaaaatgagaggtaggggttacgaaatttcgtggatactaccattagggaaatctgtccaatttgccttgagcgggagatgatttgttggtgcaaatgtatatctcttttaatttcttaaaattaaatatttatatatataaagaataacaattcaaaacggattcaaagttggcctagttgagctagttgtaagagttagagtaattaatataaggtattagatttgaagctcattgttgtcattatacaataataaatcattgttactattatataataaataattgtgtcgtgaaaaaaaaggatgaagtaaatatatatttttaattagtatatataatattttcattaatttttttcactctctttatgatcatctaataaattagtcaagaaaaaattatatactttatttctcctctatttttatcattcttcaattctttctatttggctttaaattcagatatagaatgagcttgatatcctatctttaacattcattaagttggactttttttcttcataggcaaataataaaggaat

SEQ ID NO: 2557 - DNA, 2803 bp, Glycine max
  Intron number 1 from transcript Glyma20g16610.1 (locus Gly ma20g16610) derived from phytozome v7.0 (chr-ID Gm20; pos 23239982 to 23242784)
cgtcgcttcttccgaatcttccttctctaactcaggtcaaatcccccctctcgttattattattattattattttttatcgtgatgtgtaataattcgcgaaatttgattcaatctttcgtctttacgatggtgttccttttggttgttttaagatgaatctggttaatgatgtagcagattttttttttttttttagtttttaagctttgctggtttcagaatcaatatcaaattagtttgttgctgtttgtgctgtattgaatgttattattggggctttttttaatatataaatggattcagttcaataatttcaataaattttataggaaacggtgaatatcatcatacctacgttgtgaatgaaacgcaatcagtgagagacataagctttatgacttaaatagacaattcgtggtgattttatttttagagattgtagagtttgattttttttttttttgggggggggggggctgacttgagttgatggaagttttctacttgaatgtagaaaactggaccaaaagggggcactgtcttggtttgagagtgccactttttgggtcgcgggttgtgtgatcctggagattagaggaggttgagcttgttgaatttcaagaggaaatgtagtggggttggggttggttgcgtctcatgagtgacaacaaaggtagtaatgcttcaaacaaaggagctggacagtggagatcatgtaaccttgaactgtgggtccttcttgtgtttgattatgtgtccctttcacagcaaagaagtggtgatgattgttggggtagaaggagtcttagttcctgttgcgtgtttgctgtatttttgctctcctgaatgtgggggctatgactatgtagtgcatatatctaccctccaatccatagacctctctaagtgggagcttcatgcactggattgcccttttttagctgcaaaatgtagaatattggattggaagatttcagctatgcgttaatttatatagtatcagtggaaatgttggctttgtttcattaaatggagaggcatagttaaatctttgttagtggagttttttatgcaagaaattgggagtgctttaatttgtttcttgtgaattactttattttctttgcatatctgagattttagtacaagtgtttttaaactattaaactcacattttaataatcaggttttaagttccaaatccggtatccactaccaaatttatagggcatttagttttttgtctgtttgagagttgatatgagaaggaatcaaaagcaaatgaaagggaagagaagagaatgggatggggaattaacagtaacattactttgatgtgttaaattgtttgtgattacttacaatcttccaagttgatgttcaaaaagtatccgtggaaatgcataaagcagaagtcttggataattacatgataatccttcactttcttcctcttttctccaaacactcccaaacaagggaccttctctatccaaatttacccttaaaatatatattgggtatgtagttttttgaacagtttttaaattttttttgaaaagatattgggtctttaatgtgtactgtttcttggaccttggtccagttgctgcctaaatatttactatatttacaaggttgtgatttgaattttgtctacaactttcattttttacatgattgaaaatctggctgtatatctcactggtgagatagaaaattgttataagcatagagataaattaagcttgtcaacccacctagtgtgataaggcatagttattgtggagatagattaagcttggactttggacttattaattagcagtatctattgaataattaattagttatcatgccagtgcagctaatgcatataacattttattatagtattactcatttagttatactatttatcaataagggatatgttgtaagtgtatcttgcagctataatggtttgctcaacttcattccagtgcagttaatgcaggttttgcgacaattctccttccaaacccctagaaatatttgtaaaagagttatggcatagagtagctggccccataaaagctataccagggatggctgctatatgaaaatggtatagcataaactatgtaatttatactacacaaatctaaatgctcaaaattttaaaaataccagctaaagacttatcattgttaaaaatcaaaagtaatggtctagatacacaattaccatcaatgtaaggaataatttgactagccaataataatgagaggctgaagctgaggctgagtgctctgttggcggcttgtgacttgagacgatgccatggctgccccaaagagaagccgcaccagaaaatatatgacctgccagagatgggtgatgcaaggggacagtattgggtcattctttgaagtgaaaggttgtgaaatgtgcacatggggggaagggtatgaaatttaaagtcgaacaaaagggcacaaaatggggatttaatcatctgtaaccatagcagccacaatggtgagatgagttgtctgttttctcccagtgattcagactgttattgccgaatcacaaaaactggcgtcttttaaatttacatattcttggagacattttttaagtaaaatattattaatttttttataatcatcatttattgatatctgagtgcgtatatgtattgcttatcaatacccttttagatccttgaaaagtcactgttttcatcggagcattcaaccttcttacttgaaaacaatattatgttgacagtgagcagaggttttcattcaactggc

SEQ ID NO: 2558 - DNA, 2718 bp, Glycine max
  Intron number 1 from transcript Glyma04g37560.1 (locus Gly ma04g37560) derived from phytozome v7.0 (chr-ID Gm04; pos 43958603 to 43961320)
ttcctcatcactggggatattcaatattgatcgttgttattcttcacagtgtttgtaagtccttctattctgtaaccgtgatttgtttaatatgcccactcattaattgttcttgtcccctaatagaagaggttttccatggcctagcttttccatttaagttttgcagaatcataatgtttctggttttacatgtgaagcgctattgctatatatcttgcttcgagatgcaaattgttgaagggaaaaccttgcacaatttcacaatttttggtaactgtttttagacttagacctcataggcctacctaaactttaacctacaaaatacagaagcagaacttcaagactttcacatttagaaatagcttctctcttgaaaatcctacaacgaatcttggatgacttgacatttagaaataggcttgaaaccatccagaaagactcattttgccatcttcatccattagtactatgtttacattaccactatcacactgtatattttacaaagcctgcatcggattattgtagtgcttgccatcatgagaatttttgttctaaccttgtcgattaacttgtcatcattggacattgtcatttatagctatttcaaatattttatacaagagaatggctgaagaggcctaatgaactaatcattgcttaattttatattggaattgcagcgttgaattccaattgttatcacgtatggttctgacattgacagcttccatattttctctatataaataatatttataggcattatatctggattatgctaagagtcctaaatgattttataaactttgtgaatttcttatattaaaattatactgctgccctgtcacataaataccaattgctgacagaatttggtatttatttgtgaggtagacggaaggagggtgggaattggaaggaaaaggaatgggaggccggaggaggcagccaatttgaagtgaagcaaaacctgttgggttctgatataatcatagttgaataaagttataccaacttaaaagggcagtagaaaatccaagtggttggataagttgggatgctcatggtttgattatttaaataaccataattaataaataactagattataaatggttataataattataactataatcatatctaattttatataactaattataatttgatataattgattattatttttaaagatcgatttaatacaactagttataactagttataattatggatgaataaaattaagttatttgaaatgactatttttataaaactagttaaagtttcataattataattattttttaaataaaaataaattatttaaaataattatttttataaaattgattatgattttataattacttttttatataactagttattgttagttatggttatttttttcaaaactagttttttttaaacacccctataccaggtggtgatgggttggagtcccttaattaagcaagtagtgaagggttcaagaataataatagacttgaatagtttacctttaagtgtctttagatcttttgaaagaaattattcttaataattttaatataatgttctatggtccaaataataatagacttgaatcaaggaaggagtcaagaatttgaattttgtatataaaaaaaaaatcttattagaagaaaaaaaaaaccacctttaactttaagtctcttcgaatctcataaaaaatatcagtcttaataatatttaagataatattttactccttccaatcatacgcataaaaaagaaaaaagaaatagtagaaaacaactaagggtaacataagatggcctaaatctttttaagagcattctacccgtaatcctaaccaaggtgagatatctttatacatcccccttatgtccaagatcggatattttggtgctttcggaatagacatttgcaaatagcccaacattaaaaatagatggataaattactatattaaaaacggacctagctggttggcttaacccattcttaaaaactagttcaaagaagaagaattacccaagtcctttaagaagtcttttgaccatatttttaattaacgtgggaagtcttaacaaagaggattacataacttatttttttcagctgagcaaccatttcatacatggtcgacctaacatttcatttaagcaataatattatattgtagaagaaatcgttgcatgacataaaagatggtccaaaattgtacagtcattctcattactctctggaacaagattgtggaactactctaatgagactctgcttttattaaaacatgtaatgtaattcggatttgatttatttattagcatgaatagtgaaaatattactttttatgtagtttgccatgtatagtgaaggaatagggttatggatcaaaaccaaattaaaaaagagaattaaaataagagataatttgtggtgtctatttagtgaattctatagaattggcttttagagaaaaaaatgattaagcagttgtaccaatatagttccttgtttgcaactctggtacataattttacacagtattctaatctagtgcaatgcttctgattttgatgtagattacattttgaatacaattattctaatctttttcattcacccctgtactcctaaagtcttaaaaacgtattcccaggttctgatcacccttctactgacctcaggaagaga

SEQ ID NO: 2559 - DNA, 1832 bp, Glycine max
  Intron number 1 from transcript Glyma17g32220.1 (locus Gly ma17g32220) derived from phytozome v7.0 (chr-ID Gm17; pos 35553820 to 35555651 reverse strand)
tcattcgttcttcatcgttcttcgatcttcaacaggtaagtacctcgaaccaagcttttcgattcattctatgtacccgtagtggtccacattgtgtttcgtgcatttttattctcgttttgtttactttttataccccctcttgacatgcttaagccattttacttaagtcatttctcgcttaacttaaaaataaaataaatttccaccgaacgtttgaattgtattatccgttaacttcggttaaaatgaattccgaccgttcggtcgtgccgtaaccacgttggaaataaaaaaagaggtaaaaataatataataataataaaaaaaaagcatcttttagtaaaataaagcggaaaatcaatcggacgttttctctttgggatttctcattcttaatcgaattgattaataactaaagtgaaactaaggctaaaatcaactcgcctagtcaagctcgtccataaaaataggctttcgaagtttgttatttcattttctcactaagtaaaatggatcatttttaaggtccaacgccttaaaatgatcacctcttaaagtaaaaagaatcacttgataagaaagaactacgtaggtctgattttctcatcccaaattgaggaatacgtaggagcaaaggaaaacacctttgtcgaccacaaaaaaggaaaaatataaaaaggatataaggacataaaagggaacgtaaaaatcaaagtcatgtttgcacattcgattaaaggctgccgtcccttgggacggacgtgtggggtgctaataccttccccgcgcgtaaatacaactcccgaacctttcacttaagagttcgtagatcgcatcttttccggtttttccgacgttttcctcaaataaacgttggtggcgactccgcgcgtattcctttcgtggaacacgcatcccgcgagtcacgcgtcgccctcccgccgaagggtaggttgcgacagttggcgactccactggggactgtttttagagagttaggccatttaatcttgtgcaaattttgccatgacttactcctttgttggcttccccttattatgttcttgtatatataactctttgatgcttttagtgcattttttttgtatgcatgaggtaaatatttattcatttgatgcacacaaacactaacactatttgcacacacggtgagttgaaaaagggccctatacccgggttcgtgggaacataaggagtagaggtgaatccgtgatcatgctaggtctctgacttgcttgattacagtgaaccctcatctagagtttttctctttgaaaacatattgttgctagtagtccctactgctgcagtatgttcttcgaaggggatgatacctctagaaaccatcaagagagatatgactaccttgggggttatcactaaaagcctagttagctctctcccgtataggtcccttaaataggggcacggagcaaacacactgcgtgccatttttcacactgccatgcataagtatcatatacccttttgcttatatttgtttgtgaatattgtcgtactatgtacatccccgtgttgtgcctttcgcatatgcatcatgcgtgggtttcgtctttgatcccctcactttagcaaaccgacgaagggtccgtgtcgccttcttaaaaaacatacgttgggtgccatgctgcccaaacattgtatccaagaaggaaacaatttctcgggctcccgtattcgtaaattgcatctgtgtcatatgcattttttcatgcattcatccattccacccatgatagatgtcggagttttgattcggactagattttatttcactttagtaaaac

SEQ ID NO: 2560 - DNA, 3603 bp, Glycine max
  Intron number 1 from transcript Glyma08g46880.1 (locus Gly ma08g46880) derived from phytozome v7.0 (chr-ID Gm08; pos 45844499 to 45848101)
cgacgtcgtcggccaccgtcacgtctcgccgtcaggtgcctccctctgtttctttggggttctgggcatctttgtttatttgccacgaatctctctttaccaactcttaactaaaacttgctgattcaaaacaagattgagcttctgtattctatggcagcatcagcattagtcctttgccaaatggaattagtttgttaaagtgaaaatgagctgctattagccctagtttactttctgcgcctctgttttcattgctactttatgctgaagtgaaaatgctgatctttatggttttatctctttgacctaggtctgttagtgccttggaagtgatcaagtttggcttttagaaaactgactttggattttggagctgagatttttattgtttctatcatttgtgaatttcgcttgagttgtttgattgttctgtcttcttcgttttcttcgctgcctgatatgagcttatctacactttccctgtttcatgattaacctcgtctctgtaatgtatgccaagtttatattgaagtagttcttgtcttttgagttgcgtaatttatgttttgtgatattatcattgtgcaaattcttgaacaaagaagcttcttgttatatgaattactattaattttagttttacacttttgataatctataattcaggctatatgttggtacgtcgtgtgtgggcaagagtatatttaaactcttctttatgagtaatgtctggattaattcctattttagcaaaagctagttaagtgaaatcttgctctacgctgagggcttgtcattcaacgtggacatcagggtggaatacttttgccagttgcactacagtatgtttgtccacattttacatacatgcagcaatatacaatgtttgggcgagcatagctcatgtaacatgcttcctgtggcttgtgaatatatgatattcttgtattttggtacatattgacatgtttcataatctgaagtgattatttaaattagcttgcttattctcccttttgcccaatgcttcctaagctcttcagagaggaaaatgtcactatttgaataaattaataattctgcgcacagatggatgcatctgtatttcctcttccttcttactagtaaattaataatgtgatatgtttttgtttgactttagtcagtgtgtttcatttggatatatttatctggtttaatttttaatagtaactaaatcttagtcttgaagcagaacaaattatcaaatttcttggttgaagttatttttcactttttgatctattttatgtgataatattatttccacatattattaatatttgttggctatagttgtattagtaatactataagttgtagtttaaatacttaagtctgttgaatcttgtgtaggctgtggacctgtttatgctaatatacttgttggcctacttaaactgataggcttgttgttctatttattatccttatgataggtaaacatactatactcaagcctaagaaaacccggcctagcccatatccacctctacattgtttgtctctatttgttttgattaaaaaagtgtctaattaatgtctatgcctattgctattaactttgtgtcatcttccctcttcctattgaccaccatcagatgccacagtcatttcttgtgtagatcattagtttaagtatgtgtctcagcccaaagagggtgaagccctaagcattgaaactcctctctctcacccctttcatttcaacagtggaactcaacttctcaggttcttccttgaactcttctttacccagttgcattttttgccactactcttccctttttgtctttgttactggtcctcttggctcttagtgtgtgtttggttatggatcagcaacgtgggttttcatgttcatctgaaagcttcctattgtagcttttacatcatcctttcattggatgtgatttattcactgcagaatgtgtttccaaacaggctgttaatgtgctattgtgtgacaatccctacccaaacccaagaaaaatgtacaatctttggacccattcaattcttgagatgccatgttgcctttttgattgctgaacctaatcatataataaattagattattcatgcttttcagtctgttttttgttttttctcttttggtaagtgattggttgacaagtgttaagacttaagaatatacaaatattcagcaatttatagtggtccatcaaataggactattatttttttggagacattttactttttttcatcatgtatggggtggaaagaaatgtttgtattcagctatgtattgcaatgctgtcaaaattgtctttaagatgagatcataatatcgcacgatctttaagatccaagctgaaatggagttgggattgtaaattggtgtgataggagtgaaatcaccatcttgctcataggatcttgggattggagattttttacaagccaattttggcttatgcagatgggttgtgcatgttgggttttgcaacctgataatcttatgattcccttgttcgtaccctactctctcagtctctccctcttcacactcaaatctctcccactccttgttctctctctactgctctgtcttgtgtttgtgcattcttgactttggccttctctctactctcttccttctctttgtgcattgtgactttggccacttgcattctgatctctgccttgggttcgggttgttcggtcatctgcgtctcttccatgtgttctgattctggccatctgcaactgcaatctggtctcttccttgggttctaaacttgtgatttcagccacactcatctctgccttgtgttctaattttatccttttcttgtctctactttactctgttgtctatctctgttctatgttttagtactttcagttcgtattatgacttagatgtgaactcaagggtatgcaatttcaatttaagtttactagtttaattaaatggttgttatttagaagttattttttatttttattcaccaaataaaagttagtttttattatctgttattttttatgcatttgcatataagtataattttgcattttcagtaagatcttacaatctgagttacaatcctacaatttacgatcttccacccccttcccaacccttggtaggatttcaatgttgacaatattggtggcttgctttttgttgatttatataatataattttgatcatgcttcacattggtaaggtggtttccctcatcatgaatcatatgctaaacttctacatagttacactaaaaatttacttgcatccaccatttggtcatgaatgaacaaattgaattttaggtcatctttattctgaattaaatataatatttattggatgtgccttcgtatgtggtttagatgttcttgtaggagttgaatcttgattagcaagtgcagaataaaatattttctccttttgcttgtatatgcatgctgtgatgctataatatgatgctatgtatattcttcatctgtcttctcaaatatgtgatgcttaaaaaaggccaaatgtttgtgcagtttctttaaataattgatatctggaactgtacaag

SEQ ID NO: 2561 - DNA, 9978 bp, Glycine max
  Intron number 7 from transcript Glyma19g26470.1 (locus Gly ma19g26470) derived from phytozome v7.0 (chr-ID Gm19; pos 33267640 to 33277617)
aacctcttgcaggacttggtaaaatgcaatccttgatttcttgattctgttttgctgtttgatattgaactcaatgacttgctgatttcttcccattgaactcttccattaagtggtattaaaatccagcttttgcaacaattttacaaacctttattcctttgtaaagtaattgttattagggagggtgagccttggcacaacattaaagttgttgccttgtgacttggagatcatgatttcaaatcccgtgaataatcaacaggggtaaaactacatgcatttaccctccctgaatcccaataggtgggagtctcatgcactaggttgcccttttaatttaatttttattaggattcttatagttttgagaatcttaattatgttagtgttaatgggttgggcttgtatacactatttacttatcgcagataaatagtagatatttttcatagtttttcttgttcaaaattattaaactacagatgaatataagggtgtgaacatggaaacaaacccgccattcattttttcctttttaacggactaaccatgtgatgtactctcctcattggtgtctttgatggtcttctttgcatatgtccacaccaccttaaccaatttttctttaattttttccttgatagttgtcataaatatatctcctagtatgcaaacattttgtatcttgtcatttcttgtgtggccacacatctatcctagaataaatcaacaaactacaattataaatatcgtagatattttaggatatgaaaagatgtctttgtatcttaatatttttttttttatatattgtttccttatttccctttttagctgtttaccctataaaagggagattagagcttgtattaaaatatatactagttaagactgtgaacttaatattttggagagcttaacttgtcccactcagctgagacttgcatataaaaagaggaaataattacatgacaagatgtgaaaagatagggtctagactgcagcccttgtacagcagagaaagagtgtaaaataagaaagataataaaacatacacaaaaacacataaaaatacatattagtctaacaacacatggaaatgcttatatacttctcaacaaagtcttctcatctgtgacccaggatgaagtgtttaaagcaatatggaaattaaaaatctcaagtaaagcctcaatctatgcttggagattaattcgggatagattcctacaaggaataatttaagaagaggcgtggaaatcaatgatgctagtgccctttttgcagaagtcatgaggaggatgcatctcatttatttttcagttgtgatgaagtcttgccgttgaggtgggagtcaatgtcgtggataaatactgtgggggtattttcagaaactccgaaaaaccatttccttcaattttctaattgtaattctaatggttttaggggtcaacgatggcagagttggtggatcgcactcacgtggtgtacttggcatcataggaataaattgtattcctaaatgaaagctttaatggtcataaattgatggaggatgcattattcttctgctggacctggtttaaaaaaaaggatttgatatcccatttcactcatggtctagtagtattagggaggttttttgtactcgggggaatagtatataaaatgtacagttttgatggtgggtggttacctagctaatagccagatctttggttctctaatacttattctgtatattgtattagctaaccataggtctgctctcgttgatgctaggctgtttgtatatcagtaccacttgtactgctttcattaatatatatatctacttttgccgatcaaaacaaagaaaaaaaagaaaaagtctaacaacacatattaatctaacatcccccctcaagctggagcatataaattatatgctccaagcttggaacatataaactgaatccaaggcctcctcaatgatttggtttaaatatcagtaagttgatcatttgcattgacaaactctgtactaatctctttggtcagcagcttctctctgacaaaatgacagtcaatctctatatgtttagttctctcatgaaacactggattagaggcaatatggagagctgcctaattatcacaatacaactacattggctgaacttcgctcttaaataagttgtttgatccacactaatttacatgtgattgaagtgatagccctatattccgcttctgcactagatctagcaacattattttgcttcttgctcttccaagagataaaatttccttcaatagacacacaatatcctgtactagagtgtctaactatagggcacccataatcaagaccatatatttgggtgtagcctttggctaccaagtgaaccttaagatgatcaacttcaccattaggaccaaccttgatagcatatacccactgacaaccaactgccttctttctaggtggaagagaaactagctcccatgaaccactatgttcaagagtctacatttcaacaatcatggattgtcgccatctagggtgagcaagtgcctcacaaacattcttctgtcatctacagatccagcatagtcagcatctgtataggcctccaaagtcattttctcccctttttaaaataaaattgcctttccaggaatacctttcaagtactgcagaatgcggtaaactgctctaagatgattgtctttgggattatgcatgaactgacttatcactcctactgcataagctatgtctcgcctggtatgagacaaatagattaattttccaactaatttttgataggattctgtccatggttgcatcttcaacatattcactcagtttgtgattttgctcaataggagtttctactggtttgcatcctaatttaccagtttcagataataaatccagcacatatttctgttgggagatgaaaataccatgacgagaatgtgccacttcaaggccaagaaagtattttaatctgcctagctctttaatctcaaactctcttatcaaacacccttttaggatgtttatttctgcttggtcattccctgttacaactatatcatccacatagacaattagtgcagtaactccccctgaagctgaatgcttaatgaacaaagtgtgatctccttgactttttttatagctcattgccttcatcaccatagcaaacctgccaaaccaggccctagggtactgtttcaatccatagagagccttccttagcttacaaacctttcctttctcaaagttaaacccaggtgggacctccatgtaaatttcctcttcaaagttgccatgtaggaaaacattcttgacatcaaattgctgcaaactccatccatagttatctgctaaagataacaatattctaatagtgttcatttttgcaacaggagaaaaaatctcaaggtagtcaatcccatatgtttgagtaccccttagctactaaccttgccttatacctttctagtgtcccatctgccttatatttaacagtaaatacctacttacagccaacaagtttcttttctttaggaagttctaccaactcccaagtttcttttttctctagtgcatccatttcaactttcatagcttctctccactctttgctatccagtgcttcattagcggtttttgggatagtgatcgtgtttaaatgagtaagaaaacttctatgattgctggacagtttatcataggacattaagtgagataatggataccttggcctttgtgtacatgttctaattcctttccttattgcaatcagaaaatcctcagcatcagtggacatattttgctcctccaaaacaatcccatcagtttcagtttcagggagtatattctgctctttcaagacagtctcattagttttagtttcaggtattagttcagaatctggaaattgcacaggttggataataggtttttccttttgtgtgtaaacttgtagtggacaggcagcacttgtagtttgtgttccggttgtctttggactcaaagcaggggcagggggagtgtgtgtagaactggaagaaatgtgtattggacttgactcaagtatgttggatttgcttggggagatgaatgaaagattcttgaacaaatcatccttatcttccatgcatgagttctccccttgaagataaggttgggaaaagaaacattcagtttcaacaaaagtgacatcaatagacacaaagaccttttttgtggcaggatgacaacacttgcatcctttttgggtaggggagtaaccaaaatatattcatttaataactcggatcaattttcctcgatgaggagaatgaacgtggacaaaggacacacacccaaagattctaggaacaaggttatttgaagttttaaagtgtgagtaaaacttggaaaacaattgaatggggctgctattttgaagagtctgaaagggttaatgattaaccaagtaggcagtaataatatggtggtggctagcactgacatggagtatttggaagcaaaggaataatatgatcttctccaatgggacttttaatgccaacagaatactagatgaagctattttcttgacatggacatggctcacgcagttggagaaagattttagtattcactacaaccactggtcttctaatattagtgcagctttttccagcagtcatgtatagaatttttatttaagcatacggatgtagcttgtaactctttatcagttactggttcagagatcgttaatctcgagcctaacactgattattatattgtatcttttagtacccctggtactcaattaatataattactatttttgctgaaaaaaaaaaaaaaaaagtaggcagtaataaggacaatttccccccaatactgttttggaatgcttgtgtggaataaagatgctcgggtaacagctagaagatgcccaattttccattcagcctccccattttgttgtggggtgtggacacatgatgattcatgaataattccatgttcattgaagaaggaagacaatgtttggttaaaataatctttagcattatcataacggaattgcttgatggctgtcccaaactgatttcttatcatctgaaaaaaaatttggaatatttgactgactttgcttttctgtttcaagagatacacctaggatacccgagtacagtcatcaatataaatgaataaccagcggaccccagatatatttggaatgttggatggaccccaaacatcactatgtaccaaggaaaaaggaattgacattcttttattactgataggaaagctaacacatttgtgttttgcaaattcacaatcatcacaatgaaacactcctatgcctagtctttgaaacaagctaggaaacataatttttagagtactaaatgaagggtgacctaaacgatagtgacacaatcagatgtctttattgtgggaaggaggtgactctgacagcaaagacaatggaagttgactcttattgctacatgtcccacgagcttcctcaagaaggtagagcccatttttctccctaacaagtccaatcatctttcccgttccctgatcctgaaatttgtaaagtgtgggagagaatatcactaaacattataaatcctgaacaaaaagcagtttggcagataatttgggcacatgtaaaacatctctcaaaattaaatcctgacacaagagaatgtctccctttccaacaactataataaatgtgccatctgcagttgcaatttttttattgttgggacaaggtctatatgagataaattcagtagaggaatgggtcatgcaatctgtagctccagtatcaacaacccatgtcccttgtgcagtagattgtagaacgctgagagcataggcttgggaagtacctgagaatgccaaggaagaactacttgtgtttgtgggtttgactaaagtctctaggtgaactggtgaatgtatatctatcatttccagcttgcaagtaaggtcttgaagctgctccgtgggaagtcccttggtgaacatatctgccaactgaagctttgaagggatgtattcgatggctataagatcactgtccaatttctccttaatgaatgtcgatcaatctctgtgtgctttgtttgttcatattgaactggattgtgtgcaatgctgatggcggacttattatcgcaaatcagtcccataggagcttcatattttattttgaggtcatcaagtatgaacttcatccataacaactcacaaacaccttgagccatagctctgaattctgcttctgcacttgatcctgcaaccacattttgcttcctactcctccatgttactaaatttccacccaagaacatgcagtatcatgtggtagatctcttatcaacaattgatcctgcatagtcagcatcaatacatactttcatagataaatttttctcctttttaaacaacaacccctttcctggagaagacttcaagtactgaatgatcctatttactgcctacaagcgtctctcccttgggtcatgcataaattgactaaccacactaattgcataggctatatcaggcctagtgtgggataagtagataagttttcccacaagtctctggtattgtgtcttctctacctctgggctttcttcatcatttccaatcctgtgattttgctctatgggcactccagtggttttacaacccaacttgtcaacttctttgaggagatcaagtatatattttctctgagaaataaagataccctgcctagagtatgcaacctctatcccgaggaagtactttagcttcctgagatccttcatctcaaattggacaactaacctctccctcaaggtttgtttttcaagctcatcatcgcttgcaataattatatcatcggcatagaccaagagcaaagtaagtttaccatcttgggagtgttttataaagagagtatggtcaccttgactttgcttgtaccccaaagataccatagcttgagtgaacctaccgaaccaagcccaaggagactacttgagaccatatagggccatctttagtctgcaaacttaatttcctccattagtggcaccatatccaggtggaatctccatgtacacttcttcttccaagcttccatgtaagaaggcatttttaacatcaaattgatgcatctcccaaccaaagtgcgctgctaaggaaatgatgatcctaactatattcatttttgccactggagcaaatgtctcctcataatcaatcccatagggatgtatccctttgcaaccaacatcgccttataccggtccaatgtgtcatcagtctgatatttaatccacctacaatccactgcctttttgtctttctgtctctctacaatctcccaagtctcattcctttccaatgcacccatttcttcattcatggctcgaactcagttctcatcctttaaggcttcttgtactgatgtagggattctgatagaatcaatagctgaaataaaactccggtgctgtacagaaagatatttagtagacacaaattgggatatagaatatttggcacaagatctttttccttttcttaaggcaattgtcaaatcatctaggttagattcataagaggcatctaaggtgtcctcaagagtatgggttcttacctccggttcggatgattgaagttgttgttggaccaggttgggtttttttcttcgctggtattgattcccaaagcgtctatcccccttatgttgaatggtgatgatgctggttcaaggtctttgtcatcctctgtaggagtggaatcctataacaagaaaaaacatgacaacttggggatctcagcttctagactattctccccctgaagcggagtactagtgaagaaagactctgtttcatgaaaagtgacatctttgaaaatatagacacaacaactttgagggtgataacatttgtacccctttttgtttgaggcataacctatgaaaacacatttgatagctcgaagatctaactttccctgatggggaccatgaacaaagacaaaacatccaaagacacgactttgaagactagtcataatgggaacagacggataaaatgtggtcatgagttgagtaggactaacaccatttaaaacacgagaaggtaacctatttatcaagtaagtagcggttagaacaacttccccccaataagacttaggaataaacatttggaagagtaaagctctggcaacctcaaggagatgtcgatttttcctttctacaaccccattttgttgaggggtgtccacacaagttaactcacgaacaacaccattatctttgaggaaattggaaaggttttgaatcacatactctcctattatcagaatgcaatattttaatcgggctcccaaattgtgtttgaattatacggtaaaagtttgcaaacaattggaaaatttcattcatatttgtctttcatgagaaatatccagataacccgagtgcagtcatcaataaaagaaacaaaccactttgcaccagaaatattactgataggtgcaggtccccacacatccgaatgaacaagatcaaaaggtttagaacttttattagtactgggaagaaaagttgttcgatggtgtttagcaaactcacaaacatcacaatgaaaagactcgactgacctttttgtaaacaaaaaagaaaataaagacttaaggacactaaacggaggatgacccagacacctgtgctgaagccatatttgggaggatgaccaggttctgaacttgtctgatgattggaagtgagagccttctgtctggtacactctttattgtcctcatgctgcaagtagtataacccgccctgctctttagcaattccagtcgtcctccctatggcaagatcttggaaaacacaatgggagtggaaaaatgtcacaacacagtttaagtcctgggtgatttcatggatagacaagaggatattagatagtttgagaacatggagctcattgttcaaatgaagggaagattgaagttgaatgttaccacaaccagtagtgggggtatgagaaccattagcaacagtgatgtgttggttaccagttaaaaagctataggatgaaaaataagaagagtgaggtgtcatatgattagtagcaccaaagtctataatccagatattttcagtaccagaagcattaaaggataggaagctagaactcttaccagccatggttagggaacaagagctagatgtcttactgaaagggtccataaaggctcgtagacgttccaatgacgacggcggaaggtggttgatgacgaaggacagcgtcaaatggcgactagtggtatacgcagtgactgggcattgaaacagtatcaactgcagcaatgaagactgcttggaagaatgtagaaatggagccccttggatcggaggctctaataccaacttgaaagataataatctgaatattattgtaattctgtctttcaaagagtgaatacaagacttatttataagctgtcagcgacctaattaaggaaagaaataaaatggaacaaaacctgtacaaataaaaaaaaaatcaaatctgtactaattacagaataaaatctgtgctaattatggaatgtatcacaacaggatgtatttaatttttttaaccagttcctgtaggaaacttgttagcaagaccctttacttttattttgattgtacaaaggagttttatgaggtgtgaggatgggaggggagagtaaggtagagttggggcaaagtggcatcaatgggaaccgcttgagctaaggctagggggcatgtttatagttgttttaatttgaaggatgtgaatattaattccttcaagaaatatataacttttttcaaatgaactatactatattttttaagctgtatctaatactttcccactggtcagattggaaagcacgtgcag

SEQ ID NO: 2562 - DNA, 677 bp, Glycine max
  Intron number 3 from transcript Glyma06g06070.1 (locus Gly ma06g06070) derived from phytozome v7.0 (chr-ID Gm06; pos 4335127 to 4335803 reverse strand)
actgggttggtttgtggatagtgtcaggaaaactggtaattgagttcaactgttttcaattgacatgttttatattttggttagctttcttggtgattatgattcatccctcatgttatagagatacaggaacctgatacgactttcatattttgcatcttttcaccacatgttgaagcgctcgaagtattagtctaattgtatttaacaaactagacattcttgttgtgattactgtcagcagtgctgtttttggtgattatctgtctacacactgctgctcattcagagaacgagtaattaagcttaaattgttacacataccttttcattttattttattttttaaatcaaaagaatccattgggtttgtcttatcaatagcatatttttgcacttgatcaaaatatcataaataatctagtaaggaacacacatcctgtggtctctaaggtcatacaaattttcatttttgctgagtaattttctctctcaacatctttagctctctctgatttgattatgataattaaacagcatagttgaactgttgtagccggagtgatgtatgaatgtaaattatgcttgttgatatttttgtagttgttataacctgaatacattttcttgtatctgctgcagtgaggttgagtgaatcacattatagagtgaagagt

SEQ ID NO: 2563 - DNA, 786 bp, Glycine max
  Intron number 1 from transcript Glyma15g09720.1 (locus Gly ma15g09720) derived from phytozome v7.0 (chr-ID Gm15; pos 6951597 to 6952382)
gaaatgtaagtttttttgctttctcagctttccaatttttagttcatttcaaataatttctcctaatttaattatctcaattctgaaagtgtatgatctttctttgcccaatgaatttcaatttgttctaaaactttgctgattatagtttatgaaacccgttttttatccttgaatagtaccaactaccaaccattggctggaagaaaataacagaaagattgcaccttacattgattttattgtctcattcttattttcagatttgttttccacgtgggattttggacccacgagttcatgttcatgaagaacatctatctttcagtgaatgacaacttcagatgccattgctccatggtagactaccatctgtaatggttgaatctgccatcaattcatagatatataggttaaacatctatgattgtgttcacttaactcagtggtttgttttaccatgtggcttatcagtagtaatcaatttcctgaattagaaccacaaaattctaaacttctataataattacagtactggtttttaattatcgatttaagtacccaatttattttttgattgttggcttcaggtaaaacaatgcagtccttgttttcagtaaatatagtggtttcattccatctgtcccactagtactgttctattctgtgttagtgctaatctcttgggttgatcttcttttcactgggcatatcataaaccattgttctttatctttcttgatttattaacttaatatgaatatttctgctgtgtaatcagatcat

SEQ ID NO: 2564 - DNA, 742 bp, Glycine max
  Intron number 2 from transcript Glyma04g42950.1 (locus Gly ma04g42950) derived from phytozome v7.0 (chr-ID Gm04; pos 48563155 to 48563896)
cttgctcaaggtactttttttcgctcttaattcgaatccctaatttcaacctagttagtatgtgtaagtggaagctactagggcatcacaccaaaatcagtttttttttttttttttttttttttctgctttatagcgtttttgtttttcgctagtgaatgcattcggtaaccaaccctaagtcatgaacgagtaacctctttagcaaaacaattattcgcgctctgaattcgcagaattaaatcttatggttcgaagtcacgtgtactgtttgtttaacatttagtagctgaataaattgatttcagtaagcacaactgtcattacttggattttatgaggggcagttgttctctttatttaaccaggacctcagtgtattatgtttaaccagatttatgtatgattggtattagttttagtacagttgacaagtgtatggtggatccggatttttcagaaccctataatgtggcatttttcaatccctccgccacaagcagtctgtgaagggaagcccgctatagtggtaccataggctgcactggcgtgtttatttggtggaattttagctttctaccatattccgccattggcaaccttgataacgtatttgtgttgcatttggtttaattttatcaattctgatgtcattgaagaatgcttggatttttttcataagtcttcttatcaatgtgtgtttttttacctcattgctggtagtgcttagaaggggtaggag

SEQ ID NO: 2565 - DNA, 2833 bp, Glycine max
  Intron number 5 from transcript Glyma13g26420.1 (locus Gly ma13g26420) derived from phytozome v7.0 (chr-ID Gm13; pos 29593362 to 29596194 reverse strand)
agtagtacagctggtgttcaatgtaagtttgcttgttgcttttttttttcctgtgttgtactaactactagtactattaacaagaaaatgttaaaactgattatttgtaatatatgatttgacaaatatgtttgaaacttccttttttgaaatatcttattcaaaacaagttaatcaattgcatagagaaaggtaacttacgttagaaagttcaaaagtggttttggattctgttgtgtttgtgtagattgctagtgatggaggcaagtaattgttggcattaatttctccttttgttatgaattacttggtaagtttatggagattgagtttttcaccataagatccacactgagggggcttttggtagggggagaagtttttagtttgatgagaaccatagattagaaatcttcgtttcctatgtttggtatgtattttaaaaaaaggcattcctggtaaagaagttttcccgggaatgatttttagttaagtttctcacaaaaactttcccatgggagaggtgggaatcttttgagttaattttttttctgggaatcttttgagttaattttttttcttatactatagtaaaaattatcatgttactcttattagattatttaatgtggttaataattaaagtaattgacaaaaatatcacataactctttggttctcaggaaacttaaatatttccaaaaatatttattttcaactaaacaaattttattcatacccagaaatcatgactcaccggcatgaaaaaacttttcacataccaaagcccccaagtatctgctttcgatgcttgaattaaaaattaaagcaaggagatcaattaaaatgtctatttcacttgcactttgtttgttttgagtgattttgtttgttttgagtgattttggagggagtattttagtggaaaggatgtatatacaacagtaccacttgtactgtttttaatattctatataatatatctatacttttgctgataaaaaaaaaggagggagtggttttagtggaaaggatttaggaaggatattaatcatatcctttgtttgatgataagttaggaaagtaatgaaaattcatggtccccaccttattacaaatcattccaacttttctgtgattctcaagggaaattgaagattgaaagtgcagtttttttttttaatggctgcgaccggatactgtaaaagaaaagcatactttgccactatttaataaatttatacttaccactggagattaaaaaaaaaacacgtagtagccataattttgtattaaattagatcattggattgaaattatgttttaaattttaaattttgttttaattaaaaattgaatttaattatatgggtaaaatcatcgttttgtaatatttctcatttctttcccttcgctttttcatataatcaaccaactgaaaataaatcacttcattttattccttcctaattccatcaatccaaagagtacacaattccatccaaaaatcaattcaattaatatcatttctatttctttcctctctcattctttccactcaatttcatttcctatccaaacaaagtgttaatattaaaaagtcttgacagtacctcaccctagatgcctagatagttgcctaaatttgtgttttgcagttattatatagggaaatttgataactatacattactgtaaaagtaaaataatttactcaaatgaatattacaggttatgtagacaagtaaactagtcaaacttataatttcaatatctcaccatctgaataaattctcgttttgcaagtgtaccattacttctgtttttttttctttcatttattatttatttttatttttatttttatttttaatcttttgtcttctggatgtggttgaatataccattcttacgttctaaactcatgctaagttgtcatgtcttagattcatattttatagaaccactaaaatgtaaaaatgtcaagcaagtttctaaactctcttttttaatttacatacaaagaataatatgcaatatggctgggaaaaggtatgatggattcctttatttttaaaaaattgtaaaagggatatatcagatctgcttatggtaataataggtaacagcttcccatagttgacgaagctcttttaccaaatagattattattagaacaaaagaaaacagagcaccttctgggaatccttgcctttttccttggataattccttggatgtgtgggcctttgagatgtttaaaaaacttttaaccgttttctctatgccgtagcttattattctctattaggaaaagatatttccctttctttgactaggatatttaatgaatttcagacaacggaaacgcctttgcggtaaattgaacttttcttgttctgacaagatctattcatttggaaattatcatttgtgttactataaagtttggtataaaatatggtagaatttgaggatgagtttatttacatatataacaaagttcttacttaaaatatttgtccttattgctcattttcatccttagaattcgggtttgtttagttttagttagcaacttagtgctcatttggttacatctttcttcacactgagtatgttccaatgtaaaacatgtgactgagattaatttacacatctttcaacagttcaaaaatcaattctaccaaactataaaactgagtccctactccctagtctactaaacattgaagtttatacaagaaaataaagatgaaaagtaagttataataagtcttaatgccttttgaatttcaggtctgcgagaacaacaattaccttctatcatccaa

SEQ ID NO: 2566 - DNA, 772 bp, Glycine max
  Intron number 3 from transcript Glyma05g32650.1 (locus Gly ma05g32650) derived from phytozome v7.0 (chr-ID Gm05; pos 37522973 to 37523744 reverse strand)
tcttcttccagaagtaaaggtagattctttttgttctgttcttaaattcattaacaattaatttttgctgctactctatgaaggcattctctattatcatcattgttatgctatacctgttttttattggacaattatctttataaagttgttttagagaatgtggttgaacagctcatttggcccacaagtttctgctgctagcctgctgcactgtacccacaaagaaaagacagaattttgctatttaatggttgttgttaataagacaaagtgatggggcccctcatccaccctacagttagtaagcaattaagcatgctaatggattctggttcccctgctttcaaactgataagcactcaagcacttggggagccctccctttaaagctagccatcaaggggggagatccaagccacttaaatactctactcaactgagcatcccgtactacatggtgtgggacttagacaccccataatacccaaatctctatcatactagaagggtgatcttggtttcttagtctggggagtaccatcgtctttgtagctacatgtttattagtacaatctagacttactaactggtgaccttgacatggacattggccttattactccaattaatgccccagaaaattaacaaatagtctgcagattatgccttttcctggttcaatattcttaaaacttatatctttattcttcaacgaagttcactggttggaattagtactgattggatttctcctgtgcagtttgtaatt

SEQ ID NO: 2567 - DNA, 1451 bp, Glycine max
  Intron number 1 from transcript Glyma18g50040.1 (locus Gly ma18g50040) derived from phytozome v7.0 (chr-ID Gm18; pos 59292396 to 59293846 reverse strand)
cgccacgcgccaccatcaaccgcacctctcgccggtaactccttatccccgacgccacgcttcaatattttatgttcaattcttaggtttttcgtctttgttgacttgatttagcgttctaatcgtttcgttttcaaatcgtggtttcttcatttttccttctaactcgacttctcgttgctagagatatactttgtaaactactaggtttacttttataatttcaactccttttttttctttctttcatgcctgcactgttaatggatgtaattgaaactttatttcatttttttggtgtatgacgaaggacccaaaactgtaagagatccttgttgattacattgtctgaaagcttttgaagttgcttaaacgaagaggaaaaagccaaaaaaatgtagaaaaaaaaaagaatttgcaaatatattttccacttttaaatctgcatgttcagcttacagatttcatgttaatccaaaacacaatatattcattttttggttggtaattgtttttcaacttatgttttctacctgaacaccttgtatctggaaagaacattttggatagattttatataccgaaggagcataatcttttcaaggattaaatagctctaaattgttgcaagagttgcttgtcctttggtatgcttaagctctaaattctgtatctatttatttgttcattttattcttgcattatcatgaagtttgtgaggatgagtatagccaaagacatgaacatttttatgcagaaagcatccagttttctttttttcctttcttggtgataggaaagaatttgtttgagtccttaatttttctaactaataaattctcattacctgtggagaaatgagatcctgtccctcaatattaggtataggatttgggtgactggctgaggtgggacgacagttgagttagttttagtgttcaggtcagggactagttcaacatgaatcctgctcaaatgttatagatttgtgaaaccagcattaacttaaaacagtcaatttttttcttcttctaatctgccaaactcttccttaggaactttgaaagaaggaggggtaattgttatgtggattgagaaatatttggtttgctttgatgccttgagatagaatggagcattttgaaaattcaaattttccagcctaaattgcattaagaggaaattctgttatagtgtgtgtggattgatttttatgcatttcaatgtgctgctaattgtgaattattatgaattctatttgatctgggaattatgttttatcagcaaagtgtttatgttgagtcctgcttttgaaagggcttgataaattttttttcacatcttctatttcatttttcttgagattcttaagatttatacatttttggatttttcattgcagtgaatgatcaataatatattcaatattttattgcaacttggaactagca

SEQ ID NO: 2568 - DNA, 1517 bp, Glycine max
  Intron number 2 from transcript Glyma17g24130.1 (locus Gly ma17g24130) derived from phytozome v7.0 (chr-ID Gm17; pos 24392800 to 24394316 reverse strand)
ggttgagcttcattcatccactggttagtttcttagttcatttcgctagcgtttgtttacacagcttggtattgtatagctttgtttttttttttttttgagtttgaattttaattatgagttgatgcatcgctgccatattaagactttataggatgtgattgtgatggttggattcgtttttaacgacttggcagtgagttattagtatcagcataaaatcttttgttgttttttgttattttttcctttttgttttggttttctaacaaatttatgttaagtgaattttttttcaactgtctgattgcaatcggccataatttaatatgattttttgttggccactcatatatttgcttatgcttaaaggagctagttttcacaggtaggttattcttctctgtgttttcattaaggtaatttgtgactttggtttgagacttggagtgtatatcaagtccattaggcaagttaataacttgcttgacagtaatgttatttcatggatgcatgttgttaatttaatattttaatatttggttctcaacccctgaaactggattgaatcataatcttagaaagtttggttcaatcccaactccattgcctatatgtggagaggtctaataagtggacctagcatgccttgataagagaaggaatttggatactcttctgttgttaactaacatgatgtggttctgttgggagagaaagaaacaattttttattttcattcaactatgacctaccatgattagttgtaggaccacaaattatatattctttttatgtctttctttctccaacctgaccctatcctgttaacaacaagagaagatcccaaatcccatttgagaacaacattagttaaactgaattgtgcccacttctgccagttataagtttagttgcatggtctcttgaatcaagaggagataacaatggcagttgcatgtgggtgtttttttagcatccttaaaagcaagttcaatcatgctgactatttacatgttggtacatggtatggtatacttgaaagcaatagcttaggtttaatgatattttctgtatcatgttgataccttttcattcttgtaattttagatgaaccagggttatggattcaatgagccttgttgaaagtcttttgatgcatgaaggggtaaatcattttcaaaggggtaaatgctatttttggcattgaaatcttgttagaaataacttttggttgtttgatagccttctacatctaagtcctgcttttctagcaattaaatctccatagaataactttttatagtcttattttgttttgcattagtaatctctatcccttgtgtgcgtgtgtgtgtgtatgcaggcgtattgatggaattttcttataattttgattatcttttgttctgtggagatgtttttattttatcatccttctctatctttttgtgttaatctattattaatttattattccaggaaaagctatctgttttgaattttgttgatacaaa

SEQ ID NO: 2569 - DNA, 1339 bp, Glycine max
  Intron number 3 from transcript Glyma19g37090.1 (locus Gly ma19g37090) derived from phytozome v7.0 (chr-ID Gm19; pos 44332499 to 44333837)
gcaaagaccagtcagatttccctgtgggactgaaggtaatactatcgatttcatttgttggaaacttggaactatttgagtatgattacttctgtagcacctgttgctgcaaattccagcttcattccttttttaccaactctatttttttaattctttgaatttaatggtgcatgtctttttagtgtctatttgttatttttgtttcttggagttcagttccaataagaggcataatgattggtgcaatttttcttttttttggtgccttttgcaatgaatgtgaaggctgattgtggctgggtagttcaagtgaaatttgtcattatcattttgtggagatgttctttgtctgtggggttggtatatttttctagaatttaatgttagcatttatagcctgcataacttgtctctgattttaagacagagttgtcttctttgacttcctgatgggttagaaggaaaaactcctgtaaggaaggaatggtgtatccacccttaaaattttagtggattaagagcacaatgtgttttatattaaaatcaagggtgggtggatacacccgtacttgctcactttagaggatacttatcaggattagatgttgtggtttctccatggatttgctttttgacacttgcaaagagggtttggactctagagagtcttttgagatgataattgttccttttgttcatgttttttgcggatgtcattggaggtttttctttggctttgtgctagtagtttctattcctttgattttcttttggataaggatcttctaatgtgaggttatctctaaagtgaataagggtgtcttagaatgtgggttagaatctaactcaaccctaaaaaactggcttgtaaggggtgggttgcccctgcttatacactttacttggcactatctatagctaatatatgacttgcatttttcccaatgcaccccctcatgctcaacacttttgggtttggtgcatggataatatggtaggtagcccgttaatggatctagaattgactttgatatcatcctagaatgtggatttgaacctaactcaaccgtacataatttggtttgtaagttgagggctgactcccacttatatactttatcttgacactagttgtagccaatgtgagatttaggttttttccaatagggtgtatgtacctataatttaatgtgtatcagaatcttaaactactaagatttaagggttgatgctcctttatttgctcactttgagactatcaatttagaagagctttttccttttccattatccagagtaaaaagttacatttaatttgttcaattatgtatgacag

SEQ ID NO: 2570 - DNA, 6502 bp, Glycine max
  Intron number 5 from transcript Glyma10g11570.1 (locus Gly ma10g11570) derived from phytozome v7.0 (chr-ID Gm10; pos 11754136 to 11760637 reverse strand)
aattgtgtaaggttctttttcaacaacattatttgtctattcacattgaaaggatggaaaattaggacatttgtattgagttcatccctggggaggaaggttgcaccattcaaaggtcaaggcacgccccaagccttagctatagggcttatagtggtatttacaaatgacccaccatgactaattaagaatcactggctggaatgacatccaagacctttgagtcaacacattttaatcctccaattgagcctacccttgtggcaaaatagtgtgcttgccagataatcataactaagatatattttaagtatggctgcatggctcccatctgccatatttccgaagttttttctactaagctgcttgcaaagaatgtctttctttaaaatgcactagatgtgttacctaatggattaggcactatgtgggttctacttctagtcatctctaaacccttggtttttttttaccatactcaaaattactacttactaaatgaaaccaaattgcaacctgctgataagaacctgtaatttgtatacaataaattattattcttgttcttagtactagaagggttgaatttggtagctaaccgttaatgaaaatgaatatcatactgatagattattaaagtgtttagaactaggaagcatgaatagaatggcatgtacacaaggatatgaaaatttttgaaaatgaaaggatacaacatgactatagaacataaaaattttgtaccaagttgtcataaaaacaaaaatcttatagttcaagaacaaatcaatgttttaaaatctagcaggagacatggtaaattatatcatttatctaattattctggtaatctcatctatattattgtataaatataaatttaaaacataatcatagaatgcacatctaagagtattcaaagtgtgcatgaattgtttgatatagataattgtccaacacatgtactttagaatctaaaagtaaataataaaacatttttttttgtttgccattggatgagaccagtgagaataaaaattgaagttgtcatctatttcagtcccttgtatgtcattcttccaatgacattttcctttaacgtaaaaaatgtatttttttagaaagaagagagaaagaggacagctaagtggcaaacaagaaatcctccaaagccaaaagagaaaacaaatctaatataaaagtggtaaaataacagcaagctgcctgttatctacaaatgtgaatggggaaactccgtttgaacatcctttagcaaagcaccatggggggtctaataaaactgtcgtatcctatcttaaaagtaaattgaatccattattccatattaacatgtgtgcactcgactctaaccaaatgctcccaatggttgctgtatttcaaaattttcacaaaactttttgcttccatatttgccaaaacctttaaacttatgtgctactctagcttagaatcaagggaacaacatgatctatttgggatacttgtaaaacattgggtttgtgtattagaaactggatcaggaaatagtggaaaacagatacaaagagatgaatttttattgaatgtcagtatgtcacacatctccttaattctaaattaaggtttattgcagaatcaagagggaacatggaagaaaatgattacagagaattactcttactgccctaagaaattcaagagtcttgtatttaccatgaagaattccctggatttgggagctataataccaaataataaaattgagtagaaaataaaagaagactgatagaaagagataaaaatttattgaatatcactatacttcctcattctggctgggatcaagttgattgcagagtccttggataattatacagagccttccctcccacctattatttataacctgttatttctctctttttaactagcagttcagagactgctaactttggctgtggaacttatccctgcttaagcattggctttgccttggtaaagttttgcctaaactggtcttcatgtggatgagttaacctagtgtttgggtccaagatccacttgaaacactgaccagggcaaagctgatgccgtggcggggtttagtcaaagggtcttacaacaaaaagaaagtgtgcatagtaaaagacaaaagaaaagctcaccaaggatcccaaacaggttatcctgtacaaattctaagctagattagtgcttaacaaacgtatctgtagaaacagaaatttgaggtttgtgaacttttaacaagccaataatttgataataatccactttctgacatggtattagaacctattttagatgggtcagttcagaaacagatttgataataatgcttaagtgtctcaccactcagctgaaacttcccatacctatataataggaccaaaggtcaacaagtacatgaaatgagagggtgcacagactgcaaccccctgatgaaacagttacagcaagtggaaagggaaaagagtactacaaacatataaaataataacacaaaggtacatgtgaaacacataaaacatataatagactaacaccaccccaccactccctcaagccagagcatataaactgtatgctccaggcttggaacaaataaattaaattcagtcaaattatctgcaagttgatcatctgagctgacaaactctgtattaatccttggacaataacttctctcagaaaatgatggtcaatctctatatgtttagtcctctcatgaaacagtggattagaggcaatatggagaactacctgattatcacaatacaacttcttggctgaactttacaaaactttaattcttaaagagattgtttgatccacattagctcacaagtggttgtggccatagctttatattctgcttctgcactagactgagcaacaatgttctgtttcttgctcttctaagagataatgttgcctccaatggatacacgatatccagtggtggaccttttgtctatggggcatccaacccaattagcatcaaaatacccaataatttggatatttcctttatcctcataacaatacttgtcttggagcctttttaatatacctggtaatgcgaatcccagcctttcagtgatcagcatgaggatcctgcatgaattgactaaccatactaactgcaaaagagatgtcaggccttgtaattgtgagattaattagctttccaactaactagtcttctatatctttttggatctgagtatggttcaccttggtctgccattaacttttgatttggatccatatgactatcaatgggtctacaattagtcatgcctgattcttctaaaatatcaagagcatacttcctttgtgagattacaatgccttcctttgattgagctaccccaataccaagaaagtatttaagagacccaaggtctttagtctgaaaatgacaggacaagtgctttttcagctgggtgattttagcaacatcattatcgatgataactatgtcatccacatagaccacaaggtagacacacttcccaggagatgtatgacaataaaaaactgaatgatttccttcacaaagttccaatccaaaagcctccacaatgtgactaaattttccaaaccaggctcgtggagactatttgagcccatagagagatctatgcaatttgtaaactaaactagactccccttgagccacaaacctaggaggttgcttgatgtaaatcttctcatccataatcaccataaagaaaagcatttttaatatccaattgatgtagaggccaatggcgaatggtagacatggcaaagaaaagacgcattgtggtaattttggccataggagaaaatgtgtcattgtaatcaaggccgtatatctgattgtttcctttggccgctaatcttgctttaagacgatcaacctcaccatcagggccaaccttaatggcatagacccattggtatccaactgtcttcttgcctaggggaagaggaactagcttccatgtgccactgcttttaagagccttcatttcaagaatcatggtttgttgtcatccaaggtgatcaagtgtttcacgaatatttttgggaatagcaatagaagacatggaaaatacaatggagacatgatgaagacaaacaatgataactcaaataaatgggatgaggatttcaagtagactgaataccttttctaagagcaataggccaacctaggctttcatcatgaggatctgtcgtaggtgtgactaatggagaagaacatgaatcaagtgactcatcctgtaatgtatcatttccttgtgacatttgtcgagatgtgacgggaggagatggacttttagttggagaatgattttgagtagatgaactttcagttggagaatggttttgatttccttcttggttgggagtttcataggtaggagacactattggactgaaggatgggataggtaatacttgttgtaagtcttgcatggaagatgagaagaaaggggtttcttcaaagaaggtaacatcagtagacatgtataacctcttagtgtctagagaataacatcgataccctttttgaaggtgggagtacccaaggaaaacacatttaattgccttggctggaagcttgtccaaccccatagagatgtcatggacaaaacaagtacaaccaaaaacacaaggagacacatgatataagggttcatttggagagataatggaaaaaagaatcttattatcaagtgtcgaagagggaattctatttatgacaaagctagcaatgagaaccgcaaaacaccaataatgaacaggatgatttgcattgagcaataaggtgcgagcagtctcaaccaaatgcctacttttcctttctattagtccattttgttgtggtgtatggagacaagtagattgatgcaaaatgccctgtgaggataaaaaagaagaaagaagaaatggcagaagagaaatattctttggcattatcacttcaaagaactttaataacttttccaaattggttcttgatttcattgaagaagatgcaaaaatagacaaaatttcagatctatccttcattaagtacacccaagtacatctagaatgttcatcaataaaggtgacaaaatatctgaacccaaaagagataacacgagttagaccccaaatatctaaatgaatggtggaaaagggagaaatgcattgtggttcagtttgctttggaaaagaagacctggcatgtctgcctaattgagatgactcacattctaatctttgtagtttactaagaccaggaaccattttcttcaattttgacatattcggatgacctaaacgatcatgaatgagtttgggagatggggctgctaaacaggacacagaagaattggtttctagatagtagagtcctcttgattcatgtcctaccccaattgtttgacccttaccatgttcatgtataacaaacaaatcaacatagaatgttatagaacaatttgaagacttggttaattgtcttaaagagatcaaattaaagggacaattaagaacaaaaaggacaaattccaagtttagcgaaggagacactgaaatttgaccaacacctttagaagctaccttagcaccattagctaaggttatgagatgaggaaactttggggaagacaaagagctaaacaaagaagcattaacataaatatgatctgaagcccctgaatcgattacccgtggaccttgattgtccaataattgagaaatacatgttgttgaaacatttggcacttaacataatggagcttggctactggatttcagcctcaaatattcttgatattcctcagtagaaaatcttggcttggtccctcatggacctagatagagggggtgtgttgaaggtcgcacatggcggagatataaggttgacttggtgctaaagagcgaagggagggagggataagtcttgggtttgaatcctcccactaacaaaaaccaacaaattaacaactaacatttgccgatccaaaaaaaaaataaaataaagtctcacatagcgggtagccgtggacaaatggagacatcttgaagtcccacatcgattaaagatagtgtcgaaataatctatataagtcgggagtaatcctcacctaacaagccgattttgtagggttgagttatactcataacctactttatgacattttcctattttttgtaatagggaggccactattaggatctcagggttgaatggttgttattttactttttactagtgttccgagtttgattgctggtcaataagatagtcacattttgtgaaacaattgtcttaagagtgtattgttattgatatgatttatatgacataattttatgttaggttgcgattctttaaaataattgcgtctttgttgttggggttacatattaacctttatgtcatcacttttgttgtctatcaggtgatttcatttacaaggtttcttctttgtcacct

SEQ ID NO: 2571 - DNA, 9254 bp, Glycine max
  Intron number 1 from transcript Glyma11g20890.1 (locus Gly ma11g20890) derived from phytozome v7.0 (chr-ID Gm11; pos 17726952 to 17736205)
aattctccaatcctccgtttcaaaacttctctgaggtaatcttcgttcctaaacccttctcctagttagttttagttcctcttagtgtctcttgtgtgttgggtactgtattagggtatttttacactttctttgaaaaaccttagagaatgagacattgtaaaagttatctttttataacattgaggttatttttgcgtcattcactgaacctcagtcacgttggcgtgatcgaaatttcaaaatgatgtttcctttttgtagaacccgaaataccccttagccctttatgttttgacaagggtatttgacctcgaatgttgtcattgaccttgcttttgaaatctatattgaatttccttcaatttggaatatagagacttacgttttggacggacgagcgtgaacaagaaagacctctgagtaacgcaaagaggaactgacggagagctcatgataagtgaggggagtttattataaaatttaccatttttgataccatagttagggtcagggaacctaactaagggaatacatgtctgtccctgttgcatgttgagtttttctttagaaaacaatgcttttgacgaatgggatgcgataaatctattgttgatgaataacattattgtccttatttgacttgtgttatttgaagacctaggaagtgtgaatctcatgcatgaaaaatatatgtacatgtgaaatgcgacttattgttgatgttgctattgatgactttaattgatatgtggtgatgttgatatttatgatgacactgatttgagatggcgttgctaatgaagatcgtgtcaacatgaattgatgttattgttgatgattatgtgaatatgaaatgagattgttgttgttgttgataacatcattgagatgagatgatgtttatgttgagaatgatattgaaatggaatgttgatgatgttggaaatgcattgagatatgcatgttgtgtatgtacatgggcagtgcaattaccttgttggatgtcccttgtgggggaaatagagtggttaaagaatctaaacatctctgaaaggggatagttaggagccttaatctgtccatggtttttgcacttgatgtcgccatgtttcatacattggatgttgtgtgtgttcgtgggggagggggggtacattgaccttgtcggatgtcccttgtgtgggaaaataaagtggttagagagtttaaacatctctgaggggatgtttaggatctttaattcatccatggtctttgtacttgatggtgctcacgttcatacatcgtatgttgtgtatgttcatggggggtgcattgaccttgtcggatgtccctggtgggggaaaatagagtagttaaagagtttaaacatctctgaggggatgtttaggatctttaattcatccatggtctttgcacttgatggtgcccatgtttcatgcctcatatgacacggaaaatattataaactatggtagtatgtactttgtactagggggtgcatcacctggtagggaactaccttgtggcccaggctgatcatcgaggggggggggagttatggtgcacgactgggtggcctatacaaatactacatggtttcctaagtgaggtgtcgtgtggacacgcttaggctattttcttggtattagatacgatacgtaccacattgcatctgagagttgaggtcaggtgcatacatcattttgagcagtcttgatttgatccagggatggatgatgaataattgttgaatgtgggtgttgaatgatgaatgttgtgtaagctcatgatgttgacctatgtttcttgctaattgtgattatttggatttagtattagttctttttataatgaactcactcttgcaattttgtatcgtgtggttgatacctgtaatgatcgcgaaccttgttcgtgggagcaaaatgacagcaatagggtgtaggaagtgagattctgttgaggagccgtcgagccgacgtgatgacgttgagattatttgggagagagttgtgccttgttaatcaactcccccatagttagttcatgattccttttgttgaactaaagatgtaaagctcagatttttaattatatgtatgaacaaacttaatttccattatgtgtatgaagtgtactgagttactattcctatatgtatatgtattcacttaagtaatggtgtgttgcttggtgaatgtatatcgagacaaaaaattactttcatttttcataagcaaattaacggatttttcatttaaaatttgaaataatcgcgatttagagtggtggtatcgtagcaacgaggcgggtcgttacagatattgtttaaatatcctaatggtactaaattcattaaaaattagtaaggaaatatcgtttgcttcttttttgaaagaagttatagatgccaccggaggtggaagaagcttacgtgacatttttatcgtaaacttatatatgtaggtgatgattgtgttaagtacgattgtatggagcttaaagacaataatgatatgggaaagatgttattcatctatttggtgtttagttctaaaggaccaatcgagttgtatgcagttgttggccgatctccacaagaaatctttgtcctattgtgtaaaaaaagtaaaattattctaatgcatggattaatggcagcgatgagatctattgaaatagtagttattgttgttgtggccacctctattgggtttcttcatgtgctgctcttaaactaagatacatccaactacaagaccctcatgtgtcatcaacaaaagttattgtatgacctgatgatgattttcttattgaataatgatcaatcatctttatggccacctttacttcctctgttgggtctctttctatattgctcattagctaagctacatccagttgtaagacctttaagtgtcatcaacagaagttattgtatgaccttataactatttgtgcctttaggtatagctttcatgtcctataatctctacatggatgttgacatcatctagaattgatcatacataattatttaacaatataattagtaattatttttattaaaaattaaaacaaaatgatgataatattgtttgcattacttgacacaagtagacaacacctggtacataatttggtatctgaaccaggttgtaattgtggcagaatatataaggactatgtggtgcctctccctcctgtgccagaataaggtatggatgtgaatgcttgtaatatcaatgcaagtagtttgtagtgcaggcccatggagcccatatggaacatccttgcccaatggcaccacctactactcccactcgtcctatcctcactatacttgtcatatgcaagatgttggggtgactctaaaggaatcctttgtatgtaccagaactacctggaaaccttctttgacagatatagggacatgtatgtcccaacttcgatgtagccagagtaatatgtatagtccttcaaaggtctaaggtctctacgtgatgcatatgggaaccagacattatcgttcatatgcaactgatctagcgcttccctggtcgaataagccttgccactacctttcaatgacttctacctagctgtaagcagttgcttgcaatcatactctagcaccttctcataggctggaatggtcgacagatgctcgaacaccatgcctttaaaacataaaaactattaacaaagaaacaattaagtacacaaaaaaatacttatgagtaaccttatataacctgtcatttgcttgctctcatacaagctcgcatgtgacagatggtcataaagataagcttgtgcaactacaggtagctgatgtgtacatgcatcgagctcttgttggaaaatatggtatttctgagcaaatgcagcaaataagccctagtagcccacatataggaataactagcaaggtatgtgtgatgcaacctctctaaccaaccaagcaacaccctattgcttgctgacgttacaaaatctacctcttggtcccccataataccaagctctcagtttaacaaccctctaatctccttcttgttgtagctcatctctgtgtggccatagagctggcctgtgataggaagatgtaaatcaattggaaaaaataaagactttgaagttaaagaaactcgcccaaacgaacaaggtgtagaagcatgaagatcaagtgcagagtccttagttcattagtgtaatttcgttacaatgaattatgctttcgctgtagccaaactcccttgaggcatagaataataatgtgatctcagctctattaaaagagcttgtaacatcattataaaaaatagttcatttgacaattttagaaatagaatcttgaacactttttctctttctcctgttctctctttaagatgaataaaaatagaagatgaatgacccttcattgtcatttgagaataaaaggagggttgagtcttcttcccctagaattggcctattgtgatgcagaagaggacctggacggtcatggtgcaccttggtattatattgtgtgaagggaccagttgtataattaagctaaaaatatatttaaacattaaataaacttaaatatccatttgttgtgtggagggaccaattatgtaattaagctaaaaatatatttaaacattaaataaaaacttaaatacgtttttttatctcttatatatatcttacttttttcgtttgattcctactatatttttttgcctgttagaaaccgctagtattttttgttgactgaattaaatgaaaataaaaacaatctggatgcacaaaattaataatcaaaacatgaatgaaaacaaacaaaattcaactgcaactcaatttaataaacattttttttctcatccactgttgtccctctcgactcaattttcctggcagttccacctttgaagcgatggagcttcatgccaaacaaccaaatctacaaccagatctgagcttcatctttgaagctttgagccacacaaccaaatctatcaaaaaatcaaaaccagatccactacacaatcagatctgaaaaacatgaaacccaaatccgcatctctgtttctgatcggcatctgagatgcttgagagtcatcagagaggttgtcttcggtgacgccaggaactagtggttcctcttcggcgatggcagcagtgttcctttaggcgacagcgagggtggtgttagaggacgaaattagaagaaaattatgcgagagaacgaccaagaaagccctagcaatgccagagcaatgttcgtcgatcgtgaaaatcactacttcgttggcgaaggtgccaaactcctcaacaaaatccggcgaggattgcacaaccttggagaaagagggtgataaagaagatgatgggtcgtttattcaaacttttggcaatccattaatcatacatgaccacgtgtgcttttgattttttttcttgaattcctttttttttttttccctgagccttcccacctttatgttttttttttttttttttatcttttccctaaatccgtatacaaaactctattgctcttttttcatgcgttgaatattcaatattttttattttaattgattcttgtgattttaaatcgtcacagcaaattttaaatttgaaacaaatactgtgagtatttgaattaccacaaatcatattattaaatatttaactatttaactgtatcacctcgctaacaacaaaaatttaaaataaaatttttcaaatattaaaaaaatcgattagaattttttttttatcaaaaatgaaacataaaagtcaaatatgcatgagaaataaaaaaacacatgtaatacaaaaaaatcacagcgagacgacaggcgacgacggtaatttgaatgaacaccgtgacgcaacatgggctataatttccccaaaccaaactgatagtggacttgcacttgtacttgaacagaagttaccccatgaccactgtgtcaaaataactaaatacttgttcgttgcgttttgtcttctttattgtttcgagcgaaacccattgaacttttgatgggtaaatgggatcatcgtccgtggcgaaggttcttccgccgtcgaagatctccggtgcgtcctccgacattctacgacatcaatgcccctcttcctggtattctccgaaattctttcgtttttccatttaattaattgcctatctttcttttttccgtattgcgaattttgacgatgttttgttgaaatccctatattgactcttaagaatagataattatatttgagcaattatggttatatgtaaatctttggaaacggagatatttggtaccattgattgagatcagtgttaactttgtgtgggaggattttggaggaaagacgggtgatagtctaacacactcattttaacgcattttctcgaacacactttatgctggggtaaaatttagacttaaatatattttatctataataaatatttgatttgatttttcatttgttacttaataaatttttgttttctctaataaaatatcaattttatttttaatattgacacttatttttaactcctaataaattaataaattttgtgaatgttccatgataaatatttttcatttgttattaattcatagtaaaataaaatttgttattgatagagattaaaataaatattttttaatttattaagaagaaaatacaaaaattgaaaatttattagggattaaaaatatattaaaatctaaaatttgttgaaacttgagtattcaaatccttgacattgctacttactgataaaattttcctggggtagtagtccactttcatgatgaccaaccattgttgagtgttaaactttgtcatttttaatatatccacttgagggtaagccttgacgcaacattaaagtggtaaccggttggtcatgaattcgaatccagaaaatagtcttttcgcatatataaggggaaatagtaacattcaacatcataagtatataaacccacatgactaaatgaacaaaagctaaagtctgggagaaatttcctagggatagttcaagaggtttaagaaacccctggaaaagaaaaatattttctttagtcgatctgaattgtaatgcacaaagaaatgcaagggaagcaagtagggtttcatgctggatatgatttgtgaatctaataatgaggagaaatatactgtttgctttacaagcatttatgatttcacaataacagaatagatatcgcttatttcattttatcagtacactaatggttactgctcatataagaagctgaccaataaattaatttccagtgagaaaggatcaaatagtgtttagttcgatgaaaagcaaatttatagtttgatgagaagaaaatggcttaagtatttttttgatccctaataaatatccgaattttatgtttgttccctaataaattttcgttttgtgttgagtccttaataaaacaacaattttgtttttggttcttggcacttagtttcctgataaattagtgaattttgtttttggtccctgataaattttttctttgttatacgttggaattaaaacaaaattcgctaatttattaaggactaaaacaaaatatcaaggaccaaaaacaaaagtgttgttttattagggactcaatgttaaacaaaaatttattaggaagtgaagacaaaaatttgatatttattagggatcaaaaacatatatagacagaagaaaatttgatgtctacatgtgttcatatttgttgttatcatttttttagctgtgggcatgctttttgaccagaaaataagaggctttatgaattaccaaacacaattttgttagctgctaaggaggcattgcctgtggattatccttggatggatccagtaactaaattcagtctttactgtttaacataactcacattgatattttacatgtcatgttatgggaaatattctacagcatctaacctagccaaaattagatatccaatgtgaaaaggggtatagacttgtgaactgagtagatcaattattcaatgtagtatgcagtgacttggaactgtctgtgtttttaccaagacactattatcttctttgttgatactctttagtgatttgttgttttagacaattgcttcacatttagaaatgatgtgttaaaatttatcagtatatgaacatttatttaaacttttcgagcaaactttttgcagtctatcacccacgagcaaattttttcaatgaattgtagttttagttttttttttctatttatccatccttatttggtgtggtttctccaatctagaatacttttggcattcaactaactgttaaataaaattctgtggttctaggacagactgactactgccttccacgaatgtagtatataggttgtctgatgcagtgtagtcaaaggtgccaaaatgtgggcctaatgcaaaatgtgatagaagggatttatggtctcttggttgttgactgttgaggtgttaatactctaggaagcatgacacagatatgacacagaaacaaatacagatgtgggaatgttattttgaaaatcattggacattacatggttggttatagcacataatctaaaattaacataaaataaaatcataaattacaagagagagtttgtgttttaaaattgggcatgagctattgtagacataacaaattactgaaatttattttattgttatgtcaatttgtattggaataaaagtttaaaagtaaaaaattataaattacaattgaaagtatttgaagtgtccctgcaacatctgttgtggatatatgtttgacatgactacaacacgacatggctatggctactatttacaagtatgtgtgcttcttagctaacccttcaatgtggcacatgcctctggcatcttagacaggtgccccacaacttagcaccatattaatttctgtaaaagcgcaaactccctagccttctaacttgctaaatgtaatgctaaaagggataggataatcagtgttaaaaaaagcctaattgtaagaatattgcactacagttgtaaaaaaatgtaatgctttggccattcctttttgtctgagaaagtaattactatgatgatttgatgattttattattcattatagccccccttgccaatgctacttaaatattcaatatactgaattccttgcttttcaatcttgtaagaatattggcaggacggaataccctt

SEQ ID NO: 2572 - DNA, 3272 bp, Glycine max
  Intron number 1 from transcript Glyma01g36070.1 (locus Gly ma01g36070) derived from phytozome v7.0 (chr-ID Gm01; pos 48525232 to 48528503)
gaagtataggcaagctattactgctgctggcactggtaagttacagatttgtctatgatgcatagagctgcttattggacattggtgtatgtacatgtgtgtgtataagatccctggttttgaagcatagtagtgtattttgctgttatttagtagggtgcccattgttgactgattatcgtttaatttaaccaagagtctgttggttttaaagtagggtagggctggtttcgagcagttgaataacgtaattgggatatgtgcctaaattaatctcagtcatagtttttatactgttagaatgtgtatcacagtgagaggacttgattttagtagtttgccaaacatgaactaagttgctgagtgcgtgttatttgactgattggtaaaccaagtttgtagacttaaaggaggtggggtcggttcaacagagaccataggtgtaccaacagtgaagtgaactcaccttcaatgcagtataggtttgtaaaaaagtgtcggtgtacaacaaattttctatctagtataggttctttcagaactcagagcatattagtttgttctcctgtttgttgtttctgatttgggggttactgcatgtttggttgggcgtcatcaacacttttcgcatgtccctctgaagtattatactcttgcttgtgcttccttttggaatttgggcgtggtttttttttttttttacctaaatatgtgtataatatgcagttccaaacacacaattaatccttcaattagatgaattacagagataaaataaataagagaaagagttaatgtcctaaggtatcagcttttaacatttgaagctgaaattggattattctctcgcatgtttagctgcaaacttgactgattatttccagctacttaattaatacttcaaaccttggccaaaggtgggggaatcaagcatgtcccattttcatacagacggctgttagttcgtaccagaccagagcaagtttcacatgttcttttttagacttgtgatttgtttgacttgttgcattatatctgataaaatacagaactctgaagagcagaaaatggagaggtgaaaggaacactgaactctatataatttgatcagagcaattaaactcctttcaagcagagaaataactgagaaacagtaggaaaatagttatatagtagacaaaatgaagaagaaaagtggaggatactctggagggtcagagaccttcttccaccctaaaatcctgcaacaagacatactcctgccaaaatcccccttcctctctcccaccatcctttcttagttctgaccaatttcctcctgaatgacacccagtagctctccatgcaactgcagaggatgatctggcccaccatccttcaacccaaccatcaccccttaattctcccagtgtaaacctgattcatgggcctaaattccttccctgataacactcgccatgtcttcaattgaaggtgaaaataaggagatttcttgtgaagggtatagtgttcttcccaatagtattcatgtcctgagatttttgcagcatcataaattcagaatctcgcttgtgccatcagacatctgtgttaagactagaactactgctggttgaacatgcagctcatgctcctctgataacatttggattgatatcatgtttcagctaagatatatggctgatggggtaaataatcgaataagctggtgggaccaacatgtaggtcacggctttcactctgataatcacctcaagaggtccatagatatgtggactgaatttctgattgacctagttgtccaacttaaattcaagttccctatgatgctctgttcttcaattccttgttgagctcaacacaatttttcaaatcatctgtatagcatttctgttttccgaaaatcttctatggaagttgacccccttttgaaatgaattattctagaggacttctcccttaaaagggatcatcccaatgttgacactgatttgtgggaggtattaaaccagaattctccccatggaattagaaacagcaatgggtattttcttgagtaaggtactatggtacctattatcattcccatatttttaaaaattactcatactgatctctatacccatatgggcatctccataccctctaggtacctaggtccccaaacttgtccccattaatgtgatttgggagctcctgaggtaacttaaaattcagaggagcagaaaatggggagatagatgaaaggaatacagaactttatttatgaacagagaagttaaccagcttactaactgttaattaactctcggatacaataagaaaatagtaggatagtgtacaaagtgacgacacttctcttccagcacagactccctgacaaaacccttttcctctcctaattctttttaattccctcctcattcacacctaatagctcccatgtgtgtccagagtatgatctgctcatcacccttcagcccaaccctcctctccctgattccactggagtaaacatgatttttgggcttatcatattcatatcaatattcatcatgaactatattatctgtgtcttgtattgggatttcatttttttttggttgtgtatgttgcatataatgcctctggtgtgctgttatttatgtttgcaataacagccttatgaatatagttccttgtttgattattgtttcaggcgagtttctcttatttcatctgttctagaagcctgaactgagggcttaaatttacattattttgtagtgtgaattgtatagaaagatactaaatgtgtggttgtgcctgatctgctaatgacctttagttatttatggtggaacttcttcctttagaaatattgatatagaagataatacatgttacaaagcattaaatccttgtttaactgtgtatgtagacattttcaagctgatttgttttgttattggagtggtatcaaatatcaatgatgtaagaatcgggaattgctacattgttgtcatacctgttaattatatttgaactgcaagtaatttagaccaatgtaaataaggaatgcactgtgctgtctttggctttgatagttttttttttttttgcacagcaaaaaaatactttatattataaatatgattcagtactagatgtactgaaaagtacaacaaatatcataggcagtgggagacaccattgtagttatcagggttagtgtatgcttcataaacatttttttcttcaaaggataagccaagttgtgttattggtacagg

SEQ ID NO: 2573 - DNA, 1997 bp, Glycine max
  Intron number 2 from transcript Glyma02g30840.1 (locus Gly ma02g30840) derived from phytozome v7.0 (chr-ID Gm02; pos 33122166 to 33124162 reverse strand)
tattttctctgttctctgctctctcggtctgtcaggtaatgtgacatttaataaaatataaaaaaaaggtttaaaaagatcatgtgtaaatataaaaagtctcttacagcaacttttccacaccaaatagtatttaaaaatttatttttgagtgtggaccataatgatataacattatcaaaatcccagtgcgcacaactttttagtggaatcaatcacaatttgttgagaaaaattatgtaaagtgagattgtatatatacatgattattctacacaataattgcacatactttttatcgtaccctttcgctgtatatttatttatacgatgctattatagtttagcttcatcgttattcaattctgagggactgttactatagattttgccctaactttttaccgtacttaaaatttacaaactcaaagaagctaaaaaaagttaaagaaaaaagaaagaagacgtaacaaggcacaagtggactttaatttgtttaggacagttacttcttgcatctccaaattttgctttcagcacttttttaaatttccaaaacactgaatttggaatataaaattacatttcaaaaaggtctttgtttctgaaatataatttacattctaggtggaataggtgaatgaaggaattgcctttgtttagtgttacagcctgaaaagaagccccactttggtaatttccctgggttgccccaaaatcaaagcccatcaacacttcaaaaacgataaatatctgaggataatttattgcaaaactagaagatagttgtcaagtttggggaaagttatcaaaaagggtaatctttttttaattaatcaaatgggtcaaatttcaaattaataccgaaataaggataagttgtaaggtgtattatgacttctgataaagtcataaaaaatatatgattttgatttttttattgaagttgtaaaaaagtaaacgataattgtttttttttttttaattttaatgtgaagtcataaattggtttatcaattcaatgtcttttaattttttttagaattttttgtagtggtaaatcaatgacttcaaaatcatcgtagtttttttaaaattaattattaacgactttaaattagttttaatttttaatttctagcatttttattcaactttttaaatatttttgttactaatattaacttaaaatttatcaaataatattaatttttttaaaaatattttttaattaatttttacgggtaaatgaataattttgtacagtataattaattaattttatttgataaaattattttaatattaacaacaaaaaataatttagtaatagaattagttgttaaaataaaaataatataatgcattaatataaaatgaacaatataaatataaaattaaaaagtagaaacaacatgtcttcacttagttactacaatgatgtcctgtggttctatggaatgaacatttcttatatctatttaaaattggttggtcgatctcattatgtatataactaatgattggattctcaatgtttcaagtttgcaggtaatctatttaagctcttatgtaagtattttttttttattctttaaaattcaattacatactacccaaatttttaagaacacatttatattcatattttcaataaacaatgccctttttaaattttttattcatacatttaaaaataaacagcacataccctcatgctgtatacatgtgactacaactgcttcttattaggattaaattttagctacaatttgctatatatatatatatatatatatcacttttaagttattattggacattttattataggcactcataacaattgattcttttcttttttccatctgcatcaagtgatttatattagctcacaaaacaattattgtacttcgtaaggctacaataaaagaaaagagactgtcttctcgtgcatattgttgtacttatatgatgtatgttttcttggcacagaa

SEQ ID NO: 2574 - DNA, 2946 bp, Glycine max
  Intron number 1 from transcript Glyma15g02930.1 (locus Gly ma15g02930) derived from phytozome v7.0 (chr-ID Gm15; pos 2043260 to 2046205)
gtcacccgctcattgcccgcttgaaggctattaaggtaaatccaaactctcactttttgtctcttttttttttgtcaggtcttctccttctagatgcaatcggacactaaactcactttttgtctttggtttcatggaagaggtacttttttttttattgtgtgtcctaattatttttaaattgtctaattatcttaaatttaattggcacatttttaattaaataattacttttcttttaagaaacacgcataagctgtcttttagttttcaagaaaaattataagaatcttaaaaaaaaatattgagtttcgtttttataatgttttcacgagagtcgcatttcataatcaattttgttatagccaaattcatctcttagtcattttcattagaattgatattttatagcatgatcaattttaacaatatcaagaaaacaactataatgaccgtgaaaaattattttaaaaaattgttaacaatttaacaagtgtaccaaatgttcaaatagtaaaactcacaagtctaagtgtcgaatttcacatgaattttgtgttgtactttttattgtatattttttaatttataagagaagaaataattacagagaggggtagagcaaaagagttaactagggaattcaatggaatacgaatgttaggacctaacatgttttgtttgtctaagatgtatgatttttgggatttttctttatcaattcaagtgaatttattctgcccactattcatttacttgacctttgaaaaaattcaacaaataaaatgcatgaagcttcacttttagatgtgtgcttaaatgcatgggcataaaattattatcctatgtctagcaatgatttccttatgatattttttcttttgttctattagaagttatcctctatcaagagtttaacccctaaaattaatgtatacatatattctttgtatttttattagaagttatcctctgtggaacacctaacccctaaaagaatgtaaagatgaataatgcataggagataaatagaaaagacaataggataggaaacacttgctgcattgataaatagtgagaagtacatcatacatgactttgactttttaggcatgtcaggtcctaactaggggtttagcctctcatgaccattgagggccttacaatagaatggggttataagaactgatggaagaaaatgggtgaaagagaaagaaatggagaaaatggtggaaagtggactgggccttctcgctcagtgtgtgtgctctgatttcgcgcttaatgtgtgttgtgcgcttaacgctggtaactgtttgtgcacttagcgcgtgttgctcgctgagcacactgttggactgagcttggatgttgtaatcttcatttttttttttcttaatttgttgtactttttgctcttagttccttcaattgttatatttgcaaccaacatttagaaaaacatcaattcttaacaatttagaccaaatagctgctaaataattattttttaaagataattttactttatttttcgttattaacaatacaattatttagcagttatcaaagattaagatagcacttgatttgatttgagtatttattttctatttttattttctaaaatcattttcaattttagaaaacactcaaattagtcacctaaaattccgaaacaaacatgtaactaatcttatgaaaggtcatatctctgcagtttgtttcattgatgaaaatctaattttaagaaatttcaaatggacttgctactgggatttgagacagtgtttgattcgatcttgaggcctggaaaattatacaggggggccttcctacgccttctccgcatttcaggagcccaaaaaggatatggaccggtaaccagggttactatgctaaatcttttgttttaaatttgaagacagttttactattattagttcccttaaacatttttattcaaaagtataatgttttcttttgtcaccatacacgtttaaagcatccaccaattttttcgataattaattccggcatggaaaagtataatgtttaatattatcaataaaatcatttttaatgtttaatattccggcatggaaaattatatttactaattctttaactaatctccttaacaaaatcatttttaatataagggtttctattttgtacaagaacaatcttgtggaaagaaggaaaagaactttccgaaggaagattccatatttagggagcaaatattaatgtagtactttttgggagaaaaaatgtacccaaaaaaacaaaagcagaacaaagtccacgtaactcgtaatggaatgaaagttagcttggtccctctcccttaattccctcatttctcttttcatgtctaaatctaaaattatcaaaagcgtgcacacatttttctatatctaaatcaacagcttaattttgctcaaaaaaatcaacatcttaatttcttccatcatgaccgattcttgtttttgaaatataatgcctaaactttgtagctttggactgattctctttcattcccaatttccgcgtgtagccaaaccatttctcaattcacatcattctctttctgcttccaaaaatgttacaaaaacatgtactatatgtggtatatacacattcaaggtaacgcatacgtataatgtgggaacattcaaacccgtcgtgggctcagcaagtcgcaacatcgtttttatttgtttatttttactattcaaaacaactcaattttatggaactagaaagtcacacaacatttcctcttaattaattttcaattcaaaccgaaccaatttgatggcaaccaaattccaaaggtctccatttttctatagtagacgtctcttgcgtatttgtaggtgcctaagcctcttccaaacttgtgcagtatataagaggccgggaagtgccatttcaaagact

SEQ ID NO: 2575 - DNA, 5962 bp, Glycine max
  Intron number 1 from transcript Glyma09g18560.1 (locus Gly ma09g18560) derived from phytozome v7.0 (chr-ID Gm09; pos 23058843 to 23064804 reverse strand)
gaaggagaattcctagtaaggtcagttcttcattcttcaattactattttacatttgcctttgatgaaaatgttctcttggataactgaaatgaagatatgcaaacgttctcttcgggatgtagatttggccttgacatgtaaataagtgacaatttaatctctaaaaatacgaaaattttaatgtgtaaaaattacaataattatgttttgtgtataatttactgataaattggttctgaattttacaacttcatgttaaattagttataaaaaataaaatttattgtcaaattcatctttaaaaatgaacaaaatgattttacttcttaacagcagtaaaaaactatcagtttttttatacattcagcatttaaatcaaaaattttgttctttccaaaataaattgttttcgatttacaggtgactaaaatgttcatttagccaaatgtagatatacaaggtggataattgaaagaacaaataaataaaagtatatccagtgaagagggagaggcggagaataaaacagaacaaaggaaacacaaatagtaggacaaaacactgatgtaacttcttattcttttggtattattgtatgattagaattaaagttttagtttattaatctgaataataaagatttatattaaagataaagagggagaggagagaataaaacacaacaaagttgagagaaacatacaaatatttgaaaacaacttccatgcagtttcttattcttttgatattattctataattagaattagagttttagtttattaatctgaataacaaagatttaaattaaaaaaataagtacacttgaaacttcaattcttatatttgaaaaccgcatagcatacaaaatacctaatatctaattttttatcttaaatataaaagcttcataatacttagcaaagggtattaaaaaaatgacaaaaaagggtatacaaatttccttgccgataaccaagagtcatagtaaaaagtctcttttataagttgttttcccaagttattggaaaacaactactcattataggatagcggggaatgacccgctaccccttgatgcaaagttaagtttggtggctctagtaaagatcgagacgaaagaaaattctaaataatctagacttcgagggtgatgttgcaatctctttccacctttgctctcttaacatgtcatcagttacagatacatccaacaagagaagtataaatccttccactcaattcgaactccaatttctactcctcttttatgaatcacatttctacaacccatttgggcatgacccattatgtaaaaagttggacctcctttgcataattccaaaacttccctttcctctttctcatccttcaaaactgaatcatttacactaataggatatgcctctttggtgtctctccatggggatcaattgtggacccgttggccacttcatacaaattcaggtctggcagcttcggtggtggtagggacgagggtggactccgtataacttgaatcatctcgattgcctctttacttcccttctaccttggctccattgttgatctatcatccatagtcacaacaaagtttaatgctaaaggctcatccaacaagttggcattcctaaattccaacaccattgatgttccaaccaccttcatgatttcattaatgcatattgcaactttatggaatgaacaaatttcttgtaactctgagaatttttcagccctgacaatccaaccaattcggcctgcccccatgaacattgtcagctcctcattcaagcaccaaatttacactttctcaatctctaatgacaactctcccccgaagaaccaacaagttagaccaattattgagaaccacgaattgaaatggtaaagaaaagaaataatttcactagatacaagaaaagaacaaaaatatgagagaaaactctccttaaaagattattccttcataaaggatttcttctctcacaaagagttaatgttcaattaacaacaaatctctcttactcctatccttcttcccctacttatatctaataaatctctctaactaactaattaactaaatcatcaatagtttatgtgttttaactcacttttccttctccttatatcctaacactatactagattgagcaaagagttgtattttatattgggtaaattttgtggtggactaccttaacatgtggtccattaattggtgcaccatcataattactagctattataagtaaacgcgcatctatctggttttgtatagtgtctcaaactttttttagagtgtgtttggatgagggaatttaaaacagaattttaaattctaagaatttcaaatacttcaattaaaatttttttattttcaaaattttgtgtttggataaaaaaaattaaaattttgagggtaaaagaaaatgagtcgagagttcgagaatgagatttcggaaacttttaggtggaagagaggatgaatgttacacaggaaatacgaaaacattttagaaaattcttctataaaaagagaatttcaatttctcacattaaaaggaaattaaaatatcatatttttagttgtttaaaattctattttaaaattttaaattcttcatgaaaaatatccaaacaataaattttagattaaaaaaatttaaattgtttgataaaatatttttttcaattaaaattctttattcaaacacactctaaaaaaaatcataaattaatcatttgtctgcaagatgtggaatacacattgttccaataacttgccacacccattttttttccttaatggacgccatacaccatcacaacccattctgcaagactatgatggcagatcattttaggcattttgcgagttagtgaagtgaaatttcgaagtcctcacagcatccaaaggaaaaaaaaaaaaaacagaatccaaacactcaaagcatattcaaaatcacagctttaccaacataaatttccaaattctttctcttccctcaccaattgtgttatgcacactctcgtttacaatttcaaatgctaattaatcacgttcaatcgatcaaatcgtcgagaatcacttaagaaaaaatatattaaaaagtgattcagaatacccagaaactattcacaaaaccctcgaatcaacaagacttgtggaaaaaatgattcagaccaattagttaacaatcttgaacttatatggatcaacaaaccctatttggtcttacaaaaacccgattaagataattgtgttttagaaatacaaaaagcgtgctcctttttagtgtgaaaatcgtcgagaacaacaaatcgcatgaggcttgttcgcagatggattcgccattgtacgttggaccgagatttggaatgttttagaacagtaatttgcgacggttgtcgcagtcaggactcacggcggtagtcacagtcaggactcgcgacggtaatcgcagccgtgccttgcgatggttgtcgcagtcgtggcacacggtgctgttgtcagacttcgacattggcagcaccaaactcgtcaccatagatggaggtgcggttgccgctggagaagaatcgatggtgttgcttttctgtctctttccttgtgtctctcatctctctgataggtttcaatactcctattgaataaaattttgtacataaatccatagattagtttttattcagggactaaattgcaaaatcctagctaaaatatcactaagtatccggtcttcaatcctaatatttgaactttttactaatatatctatcagttagcaatagtggtccaccggtggattacttcgatggtccaccgtaaaaattacctttatattttaagtaaaaactttcagaatattttctaaaattcatgaactctgtaaatataaaagattctctgtctttgttatttgcttgcaccataatttatttatcattgaaaagttcaaactacccaattgaattgtcatttgcttgcaccacatagcatttaaataggtagcacgggtagagatgaaaatgaggaaagctacttatcaagggtctttaactcaccttagttcgacttgactcatcttggcttatttattataaaggtcaaactcaagctttttaaaaaatttatttagataaaaaggtcaaattcaaattataaaaaaaatttgttaagtttgacaaggcttgttcaaataataataataataataataataactattatctataccatttttatgacattatgaatgacaggatgaagtggtataaagtgtttagagagttcacttcatgtggaaaattaaaaaaaaaaaagttaaaaagataaagcaatcagattaatacttccaaagaaaagaatgttttgtaaagatattttcagacaatttaaatatttttatttgactatattagtataaatcatctctaattcatatattttttaatattatgctcttttttttcattttcttttgatatactttgtgttttaaccacttgaatttaatatgattttgtttattaattatttttggatttgtacattacttatacagaattttataagtttttttttttagttattatttcattagattttaaaacaattattggtaaaagacgtctttaagcaaacttttaaatagactcgtagactaaggcatacttttatgtaagccgagtcgagccttaaaaaaaaatctacaacaagtaatgagttaagctcaagccttacatattcaactcaagtcgaactcaaacctagtaaaacttgcttaatttgactcattttcactcggaaacacgggtatcaaattaagggacgcttttaaatgatgatagctagctgtcacagttcgggtgaaaacattcctaaatccaggatcacccaatttgatattttggacactgctaattattaatgcaaactactgagctccatttcaattcctgcacaagtattcattgaattcctgcatagtatagaggatccatcaacatgtatgtgctacaattaaagcggctccagggagggaccaatcacagtttgcttgctttttttaacaaatcactatagttaaaaaaatgtaatgccacacaaaaaaatgtgtataaaactgaaataaattcattaaatattaaccctttcaataatacaaaaataggtagttttagtctctcaataattttttactcaaattcaatcctcagattttttatgtgctacgatcaagtatttccctcaaatttcctttatttaaagccatccgaaaagcttaatttacacttaagtaattggatcataagagattttaaatatataataatttgaaaatttgatggaatattgataaaatttaacaggtttatagtaattgtatttagagtttagaagaagaagaaaaaataaattataggtgaacatggggttgataagctgatatgattgacccgaaccaaattgaagaaaaaagaattcaaattgaatccaactattataaaatgcttgttttcaataaataaaaaacattgtgcataggaattttaaaataattattataaaaatcaacccaaaaataaaataattaaagcttgttttaggttcattaataaaaatatatttattattggtttttataaaataaaaaaagtcacatgtgttaacaaaaatatcatatatgttgataaaaagatccaacataaaaattttcttttaaaataaaatattttttctttaaatttgttttaagtccccctccttattgtactggcccatgcatatatatatatatatatatatatatatatatatatatatatatatatatatatatatatatataatactttgtaattaaataatagtataaaattacagagtgtaaagttttttttcttcaaaatttaataacatgtcctagtctcataattaatgcagatagtgga

SEQ ID NO: 2576 - DNA, 3624 bp, Glycine max
  Intron number 7 from transcript Glyma10g18620.1 (locus Gly ma10g18620) derived from phytozome v7.0 (chr-ID Gm10; pos 22975802 to 22979425)
caggtgtaaaatcagtacaggagaaaaaacaatttaaagatgagatgaatttaaaataaatttgaatttccaccattttatatcatgtaaaacaggcaaaacatggtacctcttgaaaataattgtatttcactaggaagtaggaatgattgattacaaggcaagcgtattaatagggatttaggtaaatagttgtaaactaatttaggtctaacaatcaggggagatattctcctttaattggcggcgaacttaaaaaagaaagaatatatatgagatcctaaaaaggatattctcctagctgtattaagcagatatcatatgattctgtttttttatttggtacatagatgattctgtttaatgctggaaatttggaataaatctcccaaaatctggaaatctggaataaatctccttaaataaaaatcctgttactgacactccccctcaagctgggtgataaatgtctatcatacccagattggatctgatgttttcattagtgggccttggaagtgctttggtcaaaatgtatgcagtttggatgcatgagggtacatgatcaaaactgatgactccatggtcaatctcctttttttatgaaatgttggtcaatttccatatgtttagttatgtcactatgaactgggttcttggcgattcttatggaagctttattatcacaaaagaactctcatagtgtagtttgtagaaatattgagttcttcaggcatcctttgtagctaagttccttcgcaaatctcatgtgtctttgacctaaattcggcttcagcactacttgctaccacagattgtttcttacttctccatttgaccatatttcccccacacaaatgaataataactggtagttggctttcgtctagtgcccaatctgcatctgtgaatacttcaatgcctctgttcgaattctttttgaaataaattccactacctggagttccttttagttactgtaggattctattgatagccttcatatgaaattcactggcgtctgtcatgtaacgagttgccatgcccacagcaaacataatggcaggtctagtatgaattaggttaattaattttctgattagtctatggtacctcactttgttagttggaggactcctcttttgcgccacctttcttgactgatttcgttggagtgttagctgctttacatccaaacatcttaatttcttgcaataggtctaacatatacttcgcttgagatacaaggatcccatcttttttccaagctacttccattcctagaaagtacatgagcggtcctaggattttaaactcaaactctcttgctaagagtcttttgagatggtttattattattattattggtattggaacaaagaaaaacaacaagcccaacaaaaaattaagaattagcatttttgcttaatcttggggtcagaaatatggtattctaagaagttgtactgctctgtggttaaattgggatttgatcccctgcttttgcctctaccttctctattcttggcctcttatgccacctcccatttgtttcccaatcagcccctaaattataaacaaggtcaacttcccatctgaagagtgtttgacaaacatagggtggtccatttgacattgtatgaacccatctttttttgataactctagtcaatctatcaaacaaagctcagggagattgcttgagacatgtaaggacttacgaagctttcacaccttgcctaaagtttcggatgattcaagccctagtgaaattttcatctagacttcctcctctaattcaccattgagaaaggaggtcttaatgtctagttggtaaagcggccaattcagattttcagccaaagataggagcatgactgtactgagttaagtttggttactggtgcctcttgaatatttctaggtatttggatgcagttaagagaggtaacacaagttttgtagccctctgaattgtgatagtttttcataagacgcattttccaatagggtgctgagtgcaagatctcacccccttcctcaaggcaacggacatatcaagatcaatcagttttgattagaaggaccaacctgggtgtgtttcaagaagctctataactttgctttggagttgtgtcaaattctaactcctcctgagttttttgtctccttgagtaaacgtgaagttttttttttattgtgcattaggattctcttgtgcactaggagaatctaaatctggttcacttggttcagccatttggatttcagctagagcagtaggtgctactggattattggtaggtggtgctgctggttcagtggtaggtgctgagttaatcttgattgtctccatctctccaatttccaaaagttgggattcttcttgtgctattgtttttcttcccctgaattgaaactttgggataatagggctggttttcaaagaatatcacatccattgtgtgatagaatttcctggttgaaggtgaatagcattctttttggtgtggtgaataccctagaaaggtgccttttatgtatttgggatccaatttgctgcagtgaggctggtgatatgtataaaggttgaacattcaaacactgtaggagggattgaagtgaaaacctgggtggttggtagaaaacacaacttccaaaaattgggatggcacattgctgtccaacatgagtgatcaaacaggcctgtattttcctagcactacaaaacagaataatcttcaatgctggaaatctggaataaataaatctcctaaaataaagatcctgtcaccaactgtactattgcttcaaatgctcgagttaacccaaagactcttacaagtttgcgagtctaggtagtaggtagaaaaaatgagttaactagttgtcagcctcttttttggttaaacgtgggtgaactcgttaaactgctgtaaactcgcattaactctcgagtcaggaagtgagttaatgagtttgatatcaaatttaatttttggcccccaatgaccttacagtaacagtgttttatgttgttcatgctgttttgaagccaacgtaaatgtcacatattactagggctcaaatgaattgaagaaattaactcttttttgaaatgttttcactaaaggaagtaatgtttttataaatttatgtatgatttggccttttgtgtatttttgatattatttagtactaatatactatcacactatattattgtgatttgctactttgatctattatgaaatttgaaatgctgaataattgttgtgttaagagtattatgttattcatatatgtcattagtaggtttttttaatatttggtgaactcgtaatcttacgagtttgagttgaatctacggaagctccaccaatttacctagacattttaagtttgataatcttgtatggtagtttagtttattatgcttttcacaatttggggttaatgcattggcttgttttacatcttcaagatcattttcttatattaagttttgtgggcttcacataattaatatgcattttctttggcaatcatattgcttggtttcaatattctctttcttctcccttttcaggattgaatccgggagttggtagtctcacattgaaa

SEQ ID NO: 2577 - DNA, 1348 bp, Glycine max
  Intron number 5 from transcript Glyma01g43320.1 (locus Gly ma01g43320) derived from phytozome v7.0 (chr-ID Gm01; pos 54351701 to 54353048)
gcaagacccataccactttctgcagagcacctaatgtgtgtcttctaataatgtttatgtttatgtttattccctcaaatttttttctcgtttttttttggtttcaaacatataaattatctcgtcagaataacgaactctctctgcgactacctcttcgagtgcaactacctgccgctaccggaatttggattgcaggaccaccttggcttgcactgccaccaccgagatcgtgaggaagaagaggactggcggcgccgctttccggcctccgcgccggccgaagtgctcgcgggtctcaaaaatcgcagcggctctcatgaaccggaggaaagggaaccccagcgggccccactccattgaagaacttgtgagagacagagagggtgaggtttaaaaaaaatgataagagaattttttttactttaattaattctgagaaattttagtgtcagaaaatttaaatttaattttaaaacaaatattaactgtttttaaaatttcgtgctattaaatatttatgaaatttatgaaacatgtcagtaggaatttaaataaaattgttcaaatatgagagagtctatttaaaaaaaatgaggaatcaaatgaaaaagtcaggtatatataggtatatataagagataaaaatatatttaaattttttattttatgtgagatattgatcataaagttaaaattgttctttctcggatatcaccgtgtttggaagaaatttccagttggtttttactaagcaccagtctgtatgaggctatcacttttatttatttatttctgaaaaatttacccaatctactgataccttattaaaagatgtttcattcccatgataataattcccttcgtgagcttatgcagcagtaaagttttgatcaataatgctaaataaacttgatttttatgtataaaaattccgcactgacaatttccaccgagaatgatgcatggatgagtatcaaacaacacttgattgtcatatgcctcggatgaataagatttttttaatggttttcctcaatatgattgtatatttaaaatataagtaaaaaaattataataatattagataattgtttttttaaaaaagaaaaccattaaaaaaactgtcttagatcttgcctcagctttcaaaaaaaagttaaaaataaaatgctataaaagtgttctttaaaaacttatccaaggactcctataaaaatacttcgtctaaatcatgttattagatccagaaattgtttctctctccattttcttggactttctttattgacattcatattcatgcttgtttgattcagatactttcgacatgcttcaggtgaggtct

SEQ ID NO: 2578 - DNA, 3652 bp, Glycine max
  Intron number 6 from transcript Glyma06g35580.2 (locus Gly ma06g35580) derived from phytozome v7.0 (chr-ID Gm06; pos 37398389 to 37402040 reverse strand)
acttgcaaaggaggaatctgtgatcattcttccaggtactgtgcaaatcatgctttatttggcattcttgcattttctatttggagagtcattcatttatacagaaaaatgaaagccttttttaatcgtcttaggcacttagcttcaggcctttttatttgatatcctcaactatatcatctggttagcaataatcatgatattatgaatcattttttttacgggaacaacttagataacactctgatcatgttcatattcactataatttatagggccttcttaacatttccagcttgcatttcaacaagtgccttttgtagacttatgtatccaaatttactattatgagctgggttataagttataactacttataactcagggttgcagttcttaagcatacaacaaaaaccttgctgatatttagttataaataaaaccattaaatgattttaatctttgtttttatgtagaagtttcaggcatttgcttttgaaataggtataaatataattccatgctgcagaaacaaagattttctatgtggattcttttctttttaattaggcatcaattgtttataataatgcacatagagatcggaatattccacttgaaagttgcttcactctcaacttagtaacttcttccttccaagttcaaataagaaaaatgaatttcttataaacacatagtccctatattatatttttatgagaaatgttaataataaactccttgacactttacccaacacacttttattagatgagattttgatagaactagaccagaaactcagaatgtgtgtattattattgtggtgcctccaacacccttgacagaatacaaatcgaggtctcaccaccctccacatcctaatcccccattccctctaattgactatttatagtttcttaacaaactaacaattagttatcctaactgttctaactatatgatagttactaagactcttagctcttccaaggatatttcctaatgtacccctttcctcatctattagattcttgtggatcctactacatatgcaagtctaatcccccctggtgggtctcattcctaaactaaaataatctacattaatttcaactaataaaagagtacatgttgtaaagaaagcaccagtgtgttacaaatttcctcttgatctcccatttttcttcctccttgagtaaaccttcaaaacctttgcttccactggacttcgatgcaacaattgatccttgccttgtagtatcccatcactatcatcccctaaaagaacaacaaccttgtcctcaaagctcaattcaggaacttcacttctaacttctgtgttgagtcctgtgtgtggcataacagcattttccaacttaccctttagttcaacagatgaacccttgtgcaagaaactcattgtcatctctccccagtccataaccaccttccccaaggtccgcaaccacgccacgcctaacactacatccacacttcccaacttaagcacatatgcatcatcaatcctcacatccacattgccaaaatagatgctaacatccacacacttgcctcttgttagaactctatgtccattagcaagttgaactccaagctttcgaatgggcgtcacggctaactctagagcagcaacaacctggggggaaatgaaattgagggaggctccactgtccaccaaaaccaacaccgaaacaccgttcagcttcccctccaatttcatagtccctgtgtgacttgcgatcccaccacactcctccatggttttgcagcattccaacaacatattcttgttgtcatcatcatcctcaagaaccaaaaggctcaaatgcttttcagaaaacttgtgtaagggatgaaagttgtccccacatcgaatgcacaaagcctttgcttccaacacctcaaccttatctgccatcttagggggcatgcatgaggaaagtacaattattctcagaaaaaggaaaccaagtgtattatactgtacttgagcagactcaatacaaagcatctcgtataggctgtttttggtttgatagatagaaataatattggaaggatggaaataatttttgagtgtttgctgaagcataaataaggtgaaaataagtttttaaatggtgggattcacttgtatttgttaaattagtattttgatcatttaatttattatttaagtttaatttaacattctaatttttttcaaattttatttaatctctaatttttaaaattaattctatttgattatgttatataaattaaattgatggtgttaaaatatatatatatattatgataatttaaattgtcataaaatataattttttgacacgttaatctaatttagacaatataattaaattaaatcaatttaaaaaattataaaagcaaattgattcaaacaaaaactaaaaaattaaattgaattaaaaaaataaattaaagtataaaaaatcaaatttaaccttatttcttacatgtttttattctcctaatcatctctctcctgaagtcttttcaatttttcctcaatcaaataactcaatttatagttttattttttatttatttctactctccctttttaattttcatttacattatttttctctaatctcctctgtacctaacacattcataaagttataagagaatcatatttgaaatactctcaaattacaaacattctggcaaatttttttttgtttctttctctctctttctgtcactgcatttaaaggggagttcagtaatcattttccaagttactactacttcctcttgcagtaaaaacttgttttttccccaaaacttttccactccctatattctgacacctcagcatcctactaattttcctcacgctctcccatctttctgtctccttgaataaaccgtccagacctttggtttcacagaatttgaattcaatggtgggaattgttttgtacaccagttaaaatactggtatatccagcataagagagatagataattctaatattacctttctataaagcaaacctgttacggattggcctttcataaaacatatttttttaaaaattaaaaaatattaaagctgtccatcttgtactgatgtaccagcaaatttgactgatatggaaaccaattcccttccatgcttgacccttgtctttgttaagtttcatttttgggcttaggcccaatatcaagtatccccctcacagtcacattcctctattttctattttcatcatagattaaaaatgtatttataaaaatgtgaacttagaagtgtagcattttcatatttattacgagttttaagaaatatttttaaatactagtacattgtccatcaatcagaaaataatttttgaacactaaaaagtaaacgaaattgaaaataagctgcatttcaaattttggtaaacgaaaataagctgcattattgaaataattaaagaatagtttatcaaaataaaatcacttgacaaatcataactcattgtttaaatatgctatctactgctagctttgactttggcatgactcgcaaaattgctagtgaatttgtaacaaacaaaagcaacaattttttgcaggaactgcagtaggcctaaaagattggcttcgtatt

SEQ ID NO: 2579 - DNA, 588 bp, Glycine max
  Intron number 4 from transcript Glyma17g06180.1 (locus Gly ma17g06180) derived from phytozome v7.0 (chr-ID Gm17; pos 4371115 to 4371702)
tgattgcagaggcacaaaagcaaggaggttatcttcatataatactcttacaatgatattgtaatggctattgcttttggttgtattggatttaggattaggattctaaattctgtagatgtgaccataaccttgtcatgattatggctgccacagactcacagatgatttaatctccctctgtcactgctctttatgttttggtagtggtaatactgtgattttgttttcttatgatttcttagtgtctaactaagtttcttagaataccctttgcggccaatattttttttgaagtggcaaatttatggtttgattctatacctggttatgttctgctttcactttttttttgttcttttaaagaagaaggaagaggtgtactctgtctgatttaaattctagaaaatacgtgtcttggggggttgtgttaatctttcagatgtgtttcttccatgagttcgactttaattgtgataatttattagttctttgatttacttgttaaggatctttgttaagaattttgcagttggtttatgcagagattgatatgattgtttcgtacaggctattgtgtctttgtcg

SEQ ID NO: 2580 - DNA, 4138 bp, Glycine max
  Intron number 2 from transcript Glyma04g08980.1 (locus Gly ma04g08980) derived from phytozome v7.0 (chr-ID Gm04; pos 7112425 to 7116562)
catcgattcgagtaggtcgaggtcgctgtctcagggtatgctctgcaatgccaactccggagtttgatttctccaaattcttttttacccttttactctccgtaagcattcattgcaacttccccctcttttcttagattatagttttgcttagggagtggcctgtcaactatgttatccatagccattgtgaacagatgataatgggagtagaataaagaatatgaaatttagcggcatgtgattttttgtgatattcttttattattattttcagtataatccaaatatgttgaagcacttaatgtgtttttgattagagtgtgcaaacttgattttggttaaaatgtgggtttgggtgaatttatttatgtgtgtttgagtgaagcgtttgcacaaattattttaaatgaaattgattttgaagtaaaagtgatttatgtttaaatgtttttattctaaaagaaagttaatagtaaaaattaatataattttttttaattcaatacaaaagctacctaaagttgtttcaactaaaaatcaactatggactcaattaattctttgatgtgagaccaaacatgtaaacatttgtttaaaatcatgttaactcgtatttaatgtgatttgggatgattcaacgtgaattcaagcacactatgtttggaaacatttatttggaaagtgattttggcataatgaatgttgtttggactttggatagtgttgatcaaaatcactttagatatataattgctaaaaacgatatgactcttcttatttgattttattaaaatagcagtataatattaaattaagagaatatttttatcaatataaagcgtgccgtgattttacatttactcgatgcaaaagcagaaaaatgatgctttcaggttggaggggttccaaacttgttaaatgatactcactcaactttcaatgcaaaacacatcctgcaacttaatactccctaagttgtttgtgtgtgcttgtgagtgcctcgcttttgaaggccatgcataggaacccgaaaagccttttcatgatcattaaatgatttatccattgtaacattcacacgtgcttaccgccaacttgccattccatagaccttcattgttgctctcagatttgagtcggaactgattacttaggttgcataagaacatgatctgtacctaaatgataaggcacaatagactacatctgaagcaataaattattaatttttaaaccaagatcagagccataattaatattattgcatttaatttttcctatctaagaaatcaataatgtatatattttgatcatccatattctacggtagaacttctgtaggagtagcacttatcttaatctatgtttgcctttctgccattatgaagacttatgatgtatttcactttttgattgtgcacactatataaagattattgaacaagtgacctcaataatttaagaggggtgaattaagttttaaaattttttcgacttttaatctccttttaaatgatatgtgatagatttagaatgtagaaaaagaaacaacaatcaatttaacaatgttctttaaatgtacaagaaaaagtaaattgcaataaaaataaacgagataagggaagagagaattgcaaactcgatttatactggtgcagtcacttcatgtgcctacatcagttctcaagtaacttacttgagattttccattatccttgtaaatcctttacaatctttgaacacaccttgagatcccttactcttgtgttagagtttctcacacatcaagagataaacaatctcttaattacaattgagttttataagatgaacataatgatttctctcttttagagcatatgatacaacttgaagatcttagaggaattttcaataatttgcaggagtttggccaaagatgtttagagaggttttgaaagttaagttttctgaaaattccttcttttcgaagtaaggacccacacacacacacacatatatatatatatagacccattttgcctattcagaacagtttgaagagatgtgtcttttcgaaaaattttctaaaactattttactggtaatcgattatatgactctggtaatcgattacacagtcatatctttgaagggttgtgatttttcaatagtttttttgaaatttctttgctagtaattgattacatgactcttgtaatcgattacacagatcaaaattcaaaaattcttgtgtcgttggttcattagtttaaaattttcaatatgtcattttcacaaactctctggtaattgattacacaaacctggtaatcgattaccagttcaaaaattttttttgaactgatttaactttaataaaagaattttgacagtaaagattttgagaccaaactataacaatcaaattgagattcttttaacaaatttattaagtccttatcttagatttttttgatcttgtttttcgacttgattaaatccgtgctcatcaagtaaacttttggcatcatcaaaacttacatgatatacattgacaaagactactctgatatagttatcaatctagaataggcaagccctgaaaatgccatagtgggatgactgctacattgagattaggtatgatataaaaaattatattatacgtgttcaaatgctaaaagatttaaacccaaattatagaattaaaaaaatggtagaagagaacacactttagagaaaagtgaaacttgaaacacctgtttcagaatgtggaatctgttgcaatagaaggctgatcaaattacagagaagtcagagaacaaatagatactacagaaactgaggactgaaagaaggatgacagatcagaacagttgtccactgagatcatggcctgaccagagaacactgagggttttcctgaagttctgaaggggggggggggggggggggtaaatgagtttctgaattctattgcagtctgattttttttgctgcaaccaaaaacctgtccactatgtaaattaaaatcttgtagccaaccagggcatgctctggtgtcactatagcatgctattgactattatttactctggttatgacttatgagtagtattgttgttagacttgtgatacgtactaaatttaataaagagatagattggttcagtaagtttttgatattacaattttcagcatgatttttgtggttaaactagtttaattagcctgacagaatagcataagggatgcaattgttttataatttgagtttgagccttactgaaagttggccatgaggtgagggttgtcccccacttttatactctattttgaccattttactagtcaatgtggaatcttcaacatgcacaccctctcatgccgaggattatgtagagtataaagtttacaagactaaacattcccgatcaggtggcctattaggctcaacaataactactagaataggctttgataccattttataatttgggtttgggtcatgaaatgagaattgcctcctgcatatatacactcttttagcttatatgctctattttgatatatcactagtcaatgtgaatccccatcaaaaactgcttttgcaatccatttttcaggagtagaaagaaggatgcaggaaaaaggggatgttggggaaagaaatagtgatttttcacttttttgttttgttttatttacttttgcttcagaatattgaaatatgagccacactttttagtacacaatttacctacacattttcagagtagacgacctatatgacatcaatattatgcctgtaattcattagtttcatccatgtgattaagaaactcattactcatctatagctctccttttcaatttcctagtaaaaccaacggatgcaacactaaagtgtataacattccagctcaattcattgccccttgtttctagcttgtatgtttattttatttagcctttttacatattcatactcatttttcatgtacactaataaatgtcaccctgttgttttgctgtgctattgattatctatgttgaatgtcacttgatttgcttagtcattcaattttaggataatttttcctgttgtaaatcggtgcttatgtaattttcctgttttcaattttcctcagaa

SEQ ID NO: 2581 - DNA, 2047 bp, Glycine max
  Intron number 11 from transcript Glyma06g34250.1 (locus Gl yma06g34250) derived from phytozome v7.0 (chr-ID Gm06; pos 35528271 to 35530317 reverse strand)
ctttggaggtaatataaatattattttagttttaacatttatttccttttctctttttggtttttgtttacttgaggaaaccaattgatgctcaaaatcactaagttgtgtaagaaatacattgctcaaatcctaaatatagctatagacacatggaaatggattcagaaacagccaatttagctgtctggattctggagtgagcataatatatttgcactattgcttaacactggtatctttgcttgcctatttgtagcttcatacctgttgtaaataactgaaatatcttaggggatctatctatatcttatttgatattttatcgtctttttctttttacattttttctttttatccttatgttagtttttttactttagggttagttgttcccttgtaaaagcgtgattagataatgtaattcttgtgatacaaaaccaatcccctttcaacgtggtattagagtctatcctagatccattaaaagggtcactcaccatattattcacgcaccaagcccaaaaagtgttggagatgagagagtgtattgggaaatacccaagtcccacatcgactagagatagaggcaagattgattatataagtaagaggcaaccctcatcttatgagctagcttttaggttaaacccaagtttgcaaaagtatcctaagttctgtttctctaaaactgagattctaggcaaaattttactctcaaacatacttttgggagtaaccaaacatgacctcaaattaattttactcttaaacatacttttggaacagtcccaccaaaaattcaaacatacccaatttgtggtgtttcttaccaagatatatagtggatagccaaattaagtattcttaaaaattttattttatgatgaaaattagcagtgaaatgtagtaatgaaaattgtttgaagtggtgaaatgtattcttaaaatggtgatgaggatacccttgattcaaagaataaattttctaacaaaacaggtctaacttaactctacaaaacagacttgtaatacaggagggtggcaaatgcaagtgacccaacaactgatctagtgtaggcttaaatatcatcttagaatttggtcttagggcctaactcaattctacagaaccggcttgtaagttgagaactacctaagttttataagctttatttaagccatatctccagtcgatgtgggcccaacaatattaatcaaaaccacaaattttttcagctagttatctcagacccataatcatttgaatgataaaaactgtatctattgcaagaatatttgtgattacctattggatttgagtttgagccaaattccagtctttagaatggtgagctagagtgatggtgaaggtagcaataaccctattgcatgttggtgtagctttgttgagttggttggcatggtggtagcaatgaaataaaggccactttagtcttaataaggtcatgggttaccatggcaatcctttactggttgttcttcatggtgtaaacttacctctgatcaaatatgagacatctgactgaatctactggtagtttttttatttttattttcaacttttagttgttaatttgttagtttttgttggcgggacgattcaaacccacgacctatcccttcctccctttacccctttaccaccaaactaatcttatatatctctgaatctactgatagttatttgtgaattttattggggacagaaaacttcttcaatccccctcccctgccccacctctcttttttctccctttttataatccttttttttccatgtgtaagtttcatttttttttttctgtcaaaccaatatttgatgattgattactgatatcgtggcatagatgaagtagaaaactagaaatgaataaataccattgttgccaaaatgattgctgtattcttcagctaggaatgcataacatgggggccatagtttacaatttaaattcaatacttaaattaaagagtctcacgaatggttggcacaattgctttttgtatatttcaggaggcgcga

SEQ ID NO: 2582 - DNA, 2492 bp, Glycine max
  Intron number 1 from transcript Glyma16g10680.1 (locus Gly ma16g10680) derived from phytozome v7.0 (chr-ID Gm16; pos 10889919 to 10892410)
agagggaggtaagatgatgtaggttgctttgtcctttttgaaacctaccgaatctgttgtaaatgctgagtttttttttttctatgaggttgtcgtttttgttatttgtttgtgatctggtgtctagtatatatttatatatataaatgatgtaaatgttggtgatgagcatgattttgtgggtaaagtgcaagtattgtggcttgattggcctggtattataagattccttaagtcttgcttggaataacttccctgtaagcacttataggagaagaaaaaaaataagaaggtaaaatgaattgggcttctcccataagttatattcaacttatgcaattaacttctattgaagttctgccatctaactaattttaaaagttgaagacttgaagtgcgtcagtgttatcaatggtggaaggccgaaattctgccttataaacacaccattgcgccatatggctccaccatggcgagacttccttcacaatttgcctatggcggttggcaacaaatccgccacgccattcccccattgcggggccatagccactatgtaacaacactgaagtgcataaatgaattttaatttataggaaaagttcaattcaattaccttgttattttcttttcctttaagcgctgatggaaaagtttattcaaacagggccttaattaagggcttactaaataactgcttatcatataagataatcttatgtgtaagttgtttccataaaaaaattgggttaaattgtttttgtataagttgtaagttgtttttataagttatcctggagtgtttattgaaacaagctgaaaacaacttgtggacatatcataagctattttcataagttttcccgagcacatccacgagtatttatatattataagcaaaaattactgtaaataaattcttttaggggtatgtagtgtgggcagtatttgggtttaggtgattaatgttagagcttttgtagcttggtgatggcaaaatgtgagggtgtgtcttggagcttggagtcatgagagtatggatgtttgctgtcacatttttagcgagattggctcaggtgttgaattttgatgctccgctttaaagagggaatggccgagaattgtcttgtgtgtttaggggaagaaatttgtctatgtgctgtaattaaatgctgcatacctgaaacactattgatcatatacaactactactagatcctccttaaaccatgtatcaacaactactatagtatatttatccttttcctaatgctgaacttggggaagcaattacagaggacaaactgatcaaagcaactagcatgctgctacttagaccaaaataagaaaagacaaaagataaaagaataatttggataaaactttctgagttaataagattattaaacatgtgcatagattcagagcatgggaagtgtatttgtaggcagacaataaatgtataagtggagcaaggctttcttatcaatggtaataagataggtaaaaccatgacctacaaaatcactcttctttgaatactgtgaatgagtgatatgcaactaaatgaggcgtgtgtgtgcagaagggtggcttcattggcttgtgctacaatttctgtagtggtatatggctcgggccatgtgtggttgattaaagctagagctttgtaacttgcagatgctaaatgtcttgaagcttagagctatgacagaatggatttttgctgagttattgtgagtgagactgagaccagattagctgttgggtttggatgctccattttaaaaaaggaacagcagagggttgttgtgtgtatgtggtgtttttaggggaagaaatattcttctcctaatcatccacttagggaaccaactagcatttggctatgtagaccaaacaagaaaagatgaaagaaaaagcaatagatttgtttagcattcatatgcttaattaataataatacccaatctatgcttagatacataatatataaagtgtattaatagatagaataaaataagtgtgtaagtggagcaaaccttatatatcaaaatgataataagatattaagataggtggtgcctatttttccaactcacatcctacaaaagcatgcttgtttaattattatgtcttgaaacactctctcctcccattattttcatatcatatcaccatactaattttcctcctccatgcttgtctatattttaatagtcatataatgagcatcattttagtttaaaggaggaggtgcatcttcttatcaccaatgtcactataagtttctctgtcttccaatcagccccttccctactccctagaatgtaaaaccagcaaaggcatttttcttaatgagctgatcaattactaagaatctgatatcttaattttatatcactgtactctccttttttgtgattattgcttaatttttatcttgttggcctgtaggtttaccagcaatccattggagcagtttgtatcct

SEQ ID NO: 2583 - DNA, 6094 bp, Glycine max
  Intron number 28 from transcript Glyma13g26190.1 (locus Gl yma13g26190) derived from phytozome v7.0 (chr-ID Gm13; pos 29411277 to 29417370)
cttttggaatctgttgctgctaaggtactatgactaaaaaattgcatgaagattatcatacaacaaaagccttatgcgtggtgattatcatataaattatcaaattttttaatttgaagttttttttttttggaaggcaaaagatatatatattattgatagtagataaactagtaccagtggtactagagatacatacaaagcaccagagtgctgccctccaaaaagcccatcctaaactacgagattaaggaagcccaacaaaactatccaaaggaattcgaaatattggaagaccaatggatgaagctagtattaaaatctttgtctttagccttgaaccaggaccagactagatatatggcatgatccatgactttataggggtcaaaaggacttccttgaaaaatcaggttgttcccatggtgccatatagaactagtcaaagcaatccaccaaccaccccttatgtcctgatttacaggatccccaaagccttcacagaattgagtaaagtggcactttgggagacttggaagaggacctactacccggatccatctcatggattcccaccataaaccttttgtcaaattgcaattgaagaatagatgacccacatcctcctgagcattaccacacaaagggcggttttggtcctgtatattaatgtttcttcttaggagattgtccttggtgggaagtctatttttaaggagtctccagcagaaaactgttgcccgagggggaattttcaacttccagatttgcttatatatcttcccatcagagtttgctgtactaggaatagtgcagagattgtaagctgatttagtagtgtactgaccatggggttcagctaaccacaccatagagtctttactatgcctctgaataggaatggagcttatttcctccataaactgcacaactatatcattttcatgatcaaaaagatttctcctccacctgaggtcccactcccagctatcattattgaagttgcccatgcttgagatgaaggagctttgctgtctactaatccgaaaaagttgattatacttctgctcaagagtgtaatctgcccaatgttgttaatgacggatggcggttcatggcggaaagtcaaaaatccgccataaaaatatggcggatggcgtagcggaaaatggcggatgtcatggcggacacaaaaaaaaaaaaaaacatatatataaactcattgaaattgaaaaaaacaaaggattgcattcaaataaactaaaaaagtttcatgagttcatacaataatcaagtaccaacaccaaataaactcattaaagagttcaaaataagaaaatgataaaaacataatgcaaagtgcaaagtgaaggttgaggctctaatcatcttctccaatcccaacataatcatcttcgttgttatcatatggtaatggagcatctccctctccctcttccccatcagacgcctcaaaattgaccatgatttcttcttcttcagattcaacatcaatattctcctcaacatctagatcctcatcattttcttggactgctttttgcttccttgatgaagatccaacaaccattgcctgttttttagaagtttgggcagcagcaacacttgttttttgctttttccgcctagtatacatcctacactctccaacccccgaagcctgatacacagttgcccaatttagagcatcatcatcttcaaataccaaatcatttccagcatcattatcatcatcttgatccatctctcccacgagccattcattgcatacatcaatatcattaagagaaattggatcaatttcatctcttgcattatatctttgcttcaattgttggttgtatttgacaaacaccaaatcatgcaacctcttgtgctcaagcctatttctttttttggaatgaatctacaacataacaaataaatgttgatttcaatctcaaatatactccaaatataacttgatcatcaaaattaaataaaattaaaaagtatagttagagttttgtcacaattacttgctcaaacacactccaatttctttcacatcctgaagcactgcaagtcaaactcaaaatcttaatagccagcttctgcaaatttggagtttgtgacccaaacattcgccaccaatatgctgcaataccaattaccaaccaagagcataacttagaattctgaattctaacactaatacataaaaaaaatagtatgataaaagtttcttactaggagaatgggttttcctttgagccattgcaaagtcggaaccaaagtggtcagcaccaatcttgtaaagatgcaactcggttagaattttctgttgcacatcaaattgtggaatcaacttcttaatgcactcaaacaaaccattggtgacctcaaaatcaaactctaagtcagtgttgtcataaaagaactctggatttaagaagtgggcagctgcatgcaatggcctatgaagctgacaattccatcttttatcaatgatttcaaacacatctttgtacttgctttcattgttgttgaaagacttcataattgtttcttttgccttgtccattgcttcataaatatagcccatggctggtttcctttcaccatccacaagacgaagcactttcacaagtggagccatgactttaagagtgtaaaccacactattccaaaaagaaggcatgagcactacctttgcagcttcttttcccttaggctccttagatagcttgttcaaggtccattcatcagaagtaaacatttttctaatattggctttctctttgtgaagcctttccaaggttagataagaagtggcaaatctagtaatagcatgtctcaccaattccctcttgtttgtaaaatttctcaacaaacttaaggtactagaatgggcatagataaacccaactagattaattgcccttctaatggtcttccttatcaagggaagcttcccaatatcttcaagcatcaaatcaatacaatgagctgcacaaggagtccaataaatatgtttccttttctcctccaacaacttacccgctaaaacatagttgctcccattatcggttacaacttgaacaacattctcttctccaacttcctccacaatggcatcaagcaactcaaaaagcttttcacctgtcttcacaaaatcagagccatcaacagactcaaaaacatggtaccagcttgagagttaatcaaaaaattaatgatgcatctttgtttccgatcagtccatgcatcggacataatagtacaaccatacttgacccattgctccctatggcctttcatcaaattttcagtatattcaacttccttcttcaagagtggaactctgatgtcatgatagctaggaatgggcaaatgtggcccatattgaccaatggctgcaaccatgttctcaaagcttttcaatttaatgaggttgaatgacaaacctgcttggtaccaaaagcgagcaatatgttgatgcaccttcaatacttcattcttatccattgactctcttatgttcatttgcctcagcatctccatttttctccgattgattgcattttctggattcttacagaatttgtccattggtcctcttttagtcccacactttgtctttgcacttgcagcagcattacaagagtccgcaaactcatcttcttcacttccatcacatccaatcggttcaccaaattcaaaatctcttatatttgccatattaccactgccagaagtactgtaagtggtcccacttttttttgtagccatatattccttcaactcttcgattacatttgggggagttttcttgcaagctgcaacgttgcccgacttcccaatcaggtgttgtttggctcgggttattcctcccttagtgatttttccacaaaaattacaaacaatggtgtttgtatctccttccactagtgaatggcaatatttccagcctgggtctgccttatttttcctcgttgcacttgcagtagcagcatcggatgatggttcagccatttaaaagaggtctgaacagaaaaaaaaaattgtggtgtcaaatacgaaaaaaaaaaaaacagactgttgacagtaaaaaggggtgtcaaatagcaaaaggaaaaaaaaaagctgtagacagaaaaatggggtgtcaaacagcaaaaagcccaaaaaaaattaaaaaaaaaaagaagcagaccgcgtcttcttcctgtcttcttcttcttcgtgcgttcactgcgttgccggggtcttcttcttcgctcgtcgccgccgttcgtgcgtgctgcagggggtggtgtcgcggcggcgtctgggtggtgtcgcggcggctgggtggtgttgcggctgcaggtaggctgttgggtggtgtcgtcgcggctgcaggtaggctcgtcacggcggttctcgtgcgtgcggctgggtaagctgtagaagtcgcgtgcggcggttcgttcgttcgtgtggaagccgggtagggttctcgtgaagctttttatttaaagaatagccgggtagggttgggtcgggtcggcccaactcctaccgcggacaaaaaacccacgaaatccgccatttccgccaccccgccacgaccgccatggctatggcggccgccatggcgccgccatcccgaacccgcaacgccaccgctattcggtggcgttttttcgaaattccgccacggaaaaccgccatggcgccgccatggccgccatttaacaacactgaatctgccccaagccacctatctgtccaaaatatgattctttccccactcccaaccttccaagtcatattgtgactgaaaatattaggatccgactgatggtaaatctttctaatatccctccaccagtgagaatgacccctcttgttagaatgaagctggaactctgaccagtccccatatttagaaattaggactctaacccaaagctgctgctgacccgatagtagttgatagcacactatagctgagtggagtggtactggaccgctataggattcagatattggagcagtttcaatagtgaccattgatagcagacaaatggcgattttttgtgtactatagcggtgctgccatgatatagtcttaacagtaaccaatttttacccctggaacactgttgttaggttttttttgggggtaaaatatttcataaaacgtacctttgttttggcctctgttccatcactgtttataagattttttttccccgtgttctgtccttttgtcttcctctagacttccctgttcacatcctgctaaattttatctagtctgttgcattctttttctattaatttcttcatctttcattttttttacttcattactatgttcttattgcttctaggtggatggtgattataagtgtgaactgtgacttattttttattataaatttctttaattttggatattttgtcttgtttctttgagtatttatgtgtagtatatatactatttagtttgtatgctagcatttaaaatagtggtcagtccactatccagatatagcattttcagagtagactgctacccaccactatctgaaattgataactattgttgatagaagataaagatattaccaatgccaagtgagaatgatatcattattatgtaattcctttagtgatttatctgaggatcatttttgtgtttaggtgtgtcttcactttttaatgattaagaactatgaaacaccgtacttgtacatccaaaatggttgttgtattagtgttcaatacgaatcatgtcagatacttctagcctactttcagttattgattgaaattttgtaccaatacaagtgggattgcactataattagataaattatagtattttattgtgtctacaatgactaatgctgactttaggaaactttgatatctttattctaattaatatttgtgtttttatgttaacattatatcaatttcttatgctgtatcttatctgtgctttatctgtctcatgttagaaggcatgtatcttagaaggcatgtatgattaataataatttcttcttgcagggaggtagcttacgtggagaatttgtag

SEQ ID NO: 2584 - DNA, 1956 bp, Glycine max
  Intron number 1 from transcript Glyma11g01520.3 (locus Gly ma11g01520) derived from phytozome v7.0 (chr-ID Gm11; pos 909035 to 910990)
atcctcatcccacccaccccatcctttccttttccgtgagtgtttgtaccctgggacactatatcaacttgtttcttttcactttgcaacattatgccaacttttattaattagttattactgttataaattttaatgttattttttaatcgacaatctgtgcaatataaatttgtgcctttctctatccgttagggtaaatgttgtctaccttcaacttgtgcttaataaataagaaattaattactttgatttttaaaagaactatgacttgcagttggtggtttattttacccataattcaatcaccaagatggataattattgtttaagatagatattttgttctaatttaatttagcttgcatgaaaaaatttctatggacgtggaaaatatataaacgataagataaggctaacctttggtaggtggggcctctagtattgatggtggaagattagaaaggaaccatgggttgttttgtttctatctggccaagaacttccttttagttagcggatctttctatccgtactacgtattaacattttttaagtattctcttcagattaaaaacctatggctctatacggattttgattctccgtagttataagttgaactgctccagcatcaatctcatccattctatttattttcgtacataataaatcaacatttaaagttaaattttaatggtaagatttacaagttcacggttttcagtttcttttgaattcgtttgttgttatcactcgtgtggctttatatttcatgtgactttaattttctttgttatttgtaccccaatgtcgatatttccacactgtcacccttatttatgttggcgcatgcgcgcaacttttgtatatatagtctgttttttaattgataacatcaattgaatggctaatgtttgttaattaaaagtgatatataattattctgatatgcaactatactattattacgaatccaaataaaagtacattgagctttctctttcttttagaactttgtttataaacacatttgtgtacttattctgttattgaattattagctataatagcggcataatgtccgtccatagtgcaaataggagtatttgctaatgcgaagtgacacttcccgtataccaaatatcaaatatattgaacaaataacatttagaacaattaacagtgccagacccagttaactgtacttattaacattcagaagtcagaacagacgctagttccatgctttcaatcaatttatgtttatttttcccaatcatgatgtcatgggactggctgctaaaaactattattattgttttgtcaacccgtccaagttctaatcttggagttgaataatcgacttatataatgagtgtgatgatggttatgaagtttttttattatgatttttctattttcaaatcgacttgcgatagcaaattgcaatgtcattaatttgaaaagtgtgtttttaagaaatttggtgtctgtttttctttctttatatatcaatttgtaaaatttgagatttatttttctttgtgaataataccaatatattcatcgaatatcttttaaatgaatttttaatattaaaagtataattgtttaaattttaataaaatatgatcatgttgtattttaaagttttgttttcatggacgaacaatggacccgcgtggaaaatgcgtatagaatactttaattgcgattagtagctgggtcggttggtggtccaaatctcgataagctggtcaactttttgttttgtcgacacctaaccatgatatgtaaactatacaagtggtacgacgtggatagtggagtgagtatagctaataataatatggtaaatattggtcattgttatttgattgcatgaaatacaaaggagtgatgattgaattaattgcaggaggggagcatacagtagcggctcagtgtacgaca

SEQ ID NO: 2585 - DNA, 2928 bp, Glycine max
  Intron number 1 from transcript Glyma08g09910.1 (locus Gly ma08g09910) derived from phytozome v7.0 (chr-ID Gm08; pos 7087350 to 7090277)
aaggaacctacaatcaatctttggtcgccaatcaggtttaattttagcctaatctccctcttttatattttcatattctttccttgactaagttatgaatctcattgtcgtatataatagataataatacaaagcataatttaatattaatcgaatatatattgttctgcttctgcacaaggaatttgcatgcaaccgcacataacatgtgatcggttagttcacatgaaaaactgctcttacccaaagtctaaatttctaatgatggatttttagttcaaatcgcataattataacccttgtttaagactaaaagcaatgatgatgctaactatacggagtgcagttttgtattttcagtatgttcaaacaaaaggttgtagttaatctattatccgtatgtattgtcgaattatgtacagaaactaatagcatttgctgaattgacgagaaaaatcaattcattcgattaataagtttttatgatgaatgagtttgtttaaaatttttttaaaatatataataaatattttttaaaaagtagataaaattttcttcttaaaataaatagaaaaatattttttaaaacaaaaaaaattcaaacaaatacactaaaaaaaataaaattacttattttattaaaataaacatttatttcaacaaataaatttaaacaaaccactgatcatatattctccaattgatttatagtttcttttatgttaatatatttcatcaagcatatataagtctggcatattccatatgcttcgcatagatgttgatacattttcaaccattcacctcttagctttactttacggcttaattaattaattaattaatatataaattcactttttctcttagctttatcaggttattatgaacatgcattccgtatattctttccacttttttctttcttatttttttatcagatcaattattatatttatcatttttttataatctttcactttccatccctcgttagcctaggattgatcgaatgataagtgagatttaaaataaattttaaaaaagtatattattttaaataaaaaaataatatattaatttttttaaaacatgttacctttttatctaataaatgtgatgctttttgtttcataaaatctataattaaatacttttttattagtaaacctaagatttaaacatcagttattttatctttgaatcacctgaattttaccctcaaatcaaaatgaacgttgcacattacccattttcatccgttatttctcttcttttctttttttttcttctatctatctctgtcttccattaattaataatagcaacatgcatacatgtcatcactaatctacctttgccctttttattgtggtgtcttttaaaatttgggatacaagagatatacgatttgaatttctgcctctgataatctctctccccaaaaccatggtccctacagaaggaacgtttctctagtatgtacagtaccatggataatatgaacctttcatatagtgcagagtgttgagtttttaatgcagttggacaattgtgacttgtgagacctatggtttctaaacccaccagcacactagaacgacgtggccaagcacatttttttccaccttcaatcttttggagataatctcacgcatattccaaggcatattccaatagagcataatgatgctattaatcattataaaaattagacaaaaacagacatttcgtgtctaattgttttttcatattttttaaataaaaaaagttaacaaaagttagttgatggtttaaatataattatatgaataaaataataatttataaatgtagttataaaataaatataaaatatgtacatcaaaacattttatttcttttatatataattattgataatgataataatgctggtagttattgaaatacacctcacttggcaaattccaaatgagtaagtttttcttttcataatggcatctagccttcaatttgtgattgactccacaccactagagtttatgataaacccatgtgttcagtctacatataattaaacaccaaattgtttcgatctacccaattcatctaacttgtacaatttattatacatttttaaaagaaattaaaagcttctcccgtatatatatatataagttctaaaatttaattaaatatcatcacaatatatttaaaagtttttttaagggacattatacttaaaattaaagtttgacaatgataataattatgtgatgtgtcgagtatttctaataattagatggcaggataaaatactaatactcatattcatcaaaacaaaattagttgctattattaaatcattgaagtttattttcgcaagacaagatttttttttaatcaacctaccgtatccatcagaataaaacaaaatacacatgaaaaaaacttacaaatttgacggaacatataggcttaattaagtttttaataatgtcggtaatataggttatttttaaattattatctaacatttattcttttttttaacaagtaaaagacaaagtttttaatttcagtttagtatctgctgttactcattttctgataacgtagtagatgaagtgccacgttatcacaccttattatatacacctcattatcacgtcatcatcattaattatgtgataatgattgatgatgtggtaatgaagtgtcagttattttaacgtgatgacgtagtcggtctaccacatcattacttaacaaaagaaaactaatcacaagtaataatttgaaaaaaaaaatttcagataattatttgacaaaaaataaatttttagatagtaatctaaaaatatctattttttaggtataaaaacttaatttttacgaagatggaggtgtatccagcgagtaataactcttcattgctttttttag

SEQ ID NO: 2586 - DNA, 2174 bp, Glycine max
  Intron number 1 from transcript Glyma18g26620.1 (locus Gly ma18g26620) derived from phytozome v7.0 (chr-ID Gm18; pos 30662423 to 30664596 reverse strand)
gcagcccgcagggtgtaacttaacaaggtattcacatcttttatttgcttttcttttttctttcttttttatctatgcatgacatgccatttgattatttcccacccaatcaggtggacatagatttaccatgtatgttttttttttgctggggatatttttttatttatttatggttgtttctctttccaaaattaatgtcttcttagtcatatgataatggttatgtttgacaaaattaactcaaaaactagatcatagtgaaagctagctaaaagttaaaaattattttattgaattataagtgtttgataaagttatttttaaagtagctaaaaaatgtaaaattacatagaataaaagtaataaaatttaaccttaaataaaaaaaaattaaaaaaagaatctaagaaatatttaaacaaaaaggaaataagtataaaaagttattagttcgaagctagtgttttaaaaatgatacttcggttatgttcggtaaaattaactgaaaagttagctagaaactgaaaagttatctgaaagccgaaaaactagttggaagttggtagctgaaagctaaaaaattagcttattaaattataagtgtttgataaaactaattgttgacgtagcttaaaagtgtataatgatagaaaaatagtaaaattatgatttattttaaaaattgaataaatgtatttatgatataaatgaaagaaaatattaaaaactagaagctagcgttttttaaaatgttacttcgagtaacatttcaaaaaatgttagaagctattaaaataatttgtttactggataatcaaaaaagtttttcagttagtaaaaaaaggttaaaaaatagttaaaatgtgttgttgaacatagattatgttcaacaaagacatatcacaaatttaagtctatttttgttggaataaaaacatttacatgtatatataaaattgattttcactttttatatttaatttatcctttttatcccattctatcataatattttctatcataaaatagtttaataaataattgaaaagattgtcaaagatgaattatttacctattgactacttgtagaaacagaagaaatgaatacttaattatagagatagtataataaagaaattaaattaacactttattaaagaaagagaaagagaaacttgttcatcatgaaaaaaaattaattgatgtgagagaaatggatgcattgtggaaaaaacaattgcagtgagtgagtacagtaagaagcggattgtgaagggtataataggaaaaaaatgatcattttgtcaaattattgatttttttttaatgtaaaacaaccttaactaactattctattcttatttataaaacatagttttgaaaaaaaaaaatcattttttataaaatttcatttcaaatgttttgtgcattaattattttgagtaaattattgtctttaattgtctttttttccctccacggagattgaagaaaatgaatttaggtatccaataaagttaaaaataaattttaaaaaatattataattatcggtataaattggtcagttgtgtcttatattgtttacttttctatatattctgcatgtatgttaaaaagattgtatataagttgtgtataaatacaaattaactattctgtgtcagttacctttgaatctgctggttaattatttgacttttaaatggaagaagacaatgtccaactaagctaaatcagagagagacaaaaatcctctgaagctagtaaattgttttcttgggatgatggtggggttcaagcctagcttgaattgagtgcgagatgaaatttctaatataaattataaaataataattattaattaaaatatgaagttaaagcttttataattttgtaatgtgtataatatatgtataattctaattataattacactaaatttaacaaaattgacggttattgttttatattccaccctctaaaaagtttactgtataagtcggcagacttcctctattaaataagagttatcagttgtaaagttgctctcaaccaattggttctcaattaggatcacatcctacattagttccaaacaaaaaaccatttaaatgatcatcaagaccatgttatcaccattttaaagaatgttgttgttttgcagattca

SEQ ID NO: 2587 - DNA, 7355 bp, Glycine max
  Intron number 5 from transcript Glyma08g41540.1 (locus Gly ma08g41540) derived from phytozome v7.0 (chr-ID Gm08; pos 41497712 to 41505066)
aaggcattatctgaggagactgtcatctctcaaaggtatgcattcttgtttaagcattcctttttgcttgaactatgttcacttgtaaaaaaaaggcgataaagaaaaagttagcgtgtcatgcttgttttctcaaaatatcctactctgaatgataagtccctctttttgtatcattgagttactgagtttagcatgagggtaatggtaatggggacaaatgataactatcattggtcacggaatactcattcataagagaaataatttataggaaaatgcttattagtacgaaattttttcatgatatttgcacgttcgtaatttctaagagtttatctgatgcttttaaattttttatttagtattgatttatatttaaaaaaggagagtgatccacataatcattcattcagttggggcaaatataattcgtaccaaatagcaatgttgaggaatgaggagagtctgtaacaacccagctggaaaaacatgatcaactttagcttgttgacatatgacacattccctcacaaatttactaatatcacttctcataccattccaataaaattgagcaccaattctagttgttgttctattaacttcagaatgtccaccaatcttagaactgtgaaattcctccatgatttgattaagcaacccaacatcatgaggtaacacaattttgcctttaaagaacaataggccattctgaatactatattcagaagatggattctgaccttgcaaacagctttgataaattttggataattgagaatcagtttgagtcaaatccatcactttattaatccatgaatgtataggagtagatacagccaccatgaaactcctagataaagcatcagtatgtatattttctttccctggtttatactgaattgtaaagtcaaaccctaagaacttaggaagccattgctgttgttcaggagtgtgcaacttctgtctaacaattctttgaggcttttctgatctgttttaattatgaacttatgacccacaagataatgtctgaattttgccaaagcctgagtaatatcataaaattctcgaatataagcagactgcttctgcatccttaaggacaatttcttagagaaataagcaattggatgcttattttggctaaggacaacaccaattccacttcctgaggcatcagtctccaatacaaaaatttcgttaaaattaggaatagtcaatccaggagcagatgtcatggcaattttgagttgttgaaatgcttctgatgcagccacactccttttaaaagaatcctttttcaacaaatcagttaaaggggctgcaatgccataagacttaacaagcctcctataaaaatcggtgagtcctaaaaatgctctcaactgtttgagattactaggctcaagccacttttgaatagcttccaatttagttcccttcatagctactcctgaaccaaatagtgtatgtcctaagtaatcaatatgttgaactccaaaacaatatttagaaaaccgtgcacacaattgatgttgtttcaagatacttaaaaccacttctaaatggtataaatgatgtttccaattagcactatacaccagcatatcatcaaagaaaaccagtacaaattttcttaatattccaacaaaaatgtcattcataaggctctgaaaagtagtaggagcattggttaagccaaatggcataaccaaccactcatagtggccatgatgagtcctaaatgctgtcttatgtttgtcatccggatttaacaaaatttggtgataaccagaccttagatccaatttagaaaagaaggaagctccaaaaagctcatcaatcaactcatccacagtaggaatagggaagttgtccttgatagtaattgcattaagagccctataatcagtacacaccctccatgaaccatctttcttttttaccaatataatgggagaagaaaaaggagtcttgctaggttgtatgatatcttcatctaacattcctgacaccaatctctcaatttcttccttttgactatgagggtatctgtaaggcttaaccttaacaggttgttaaccactcaataaaggaatagagtgatcatgggatctttgtggaggtaagctgctaggagtatcaaaaaccacactgtaagtgtgcaatagtaaggctaattcaggctccattgtaactggtaaatcaagcatagacttaggaacaacatctggttccatcaattgcagactataaacttcagcaatggaattagtggccactattcttcttatacaatgtaattgagcttgcttaggtaccaattgacaatctccttgtaaggtagtaaatttacccttccacaaaaacttcaattgcagagcatcataatcagcattgtgagagttaatagtcttcaaccaactagctcgtaaaatgagatcagcaccaaaaataggaagcaaaaatactggtaactgaaaggtattgccttgagcctgtacctaatattgcttaaccaatccttcaacatacatataattacctttaccaaccattactctaatttgagtagctggttccacaggtaatttcaaaaacttggccacccttggctgcaaaacattatcagaactgccaccatcaatcaacacagtcactggtaaattttcaataaaagctataaacctgatagtgccaactcccctaccacctttcaaagcattgaaggacaaatgatgatcttcatattcttctatttcatcttcttgagtaccttgaggtacaattgtactcataggatcttccttatcatcttccatttgcaacaacagaaattgtctattaggacatttatgattaaaagagaatttctcaccgcaaaaataacacaatcctttttcccttctcaactgctattcaataggagtaatcctttttacactcgaggaccgaattggagggcctggtggagtaggtaaaagcggaggtaaactagatttaatttgtgtttttggttgagcattaatagagactgggatagaagaaatttgggaatatttgtgactataggaatttcgaaatggcttagaaacatgaccatatttttcttcaaaaattttagctaaagcaactgcacgcaataaggtaggagggcacatagcaacaacatctcttctaatatcaggatttcaaccactaatgaaacaattaaggagagcctcattacttaatcccaaaaatctattagctagagacataaacttgaggtaataatctgatatcgaacctatttgttgaagcttaaagagctcagtcattggacaattaaaaggtgaaggaccgaattgagactctagagcacgagtcaactcagaccaagtagacaccagagataatttctacgacatctggaaccatgccactacatccttatcaaaatgcatcgtcgcaatatccactctagacgcataaggagtattatgataagtgaaaaatttctccagcttgaagatccactccatcaccggcgtcgttccatcgaagtgaggaaatccaagtgagatctccttaacaggcaaagaagcattaatcggttgcaccatcggggagccattgttcggagaacttccaggaggttgagaagcattctgcaataacagattcatcactaactgaatttatccatagaattctaaatttgaagcatcttatcattttgctcttggtaacacatatccattgtttgaccgagacgacgaatatcatccgaatgtgtacgaattttcgtttgcaaatccttcaaacgtgtgttctcagccgtggaagcacaatgaaagcaccaatggaacaattcaattatgcagcaacagtttattacaatgaacagagaacgaaaatcgacgataagctacaaaaacagcgaggcaacgaagtagaggaataacgatgatcgcgacacactcctcgatcgtataccgacaatagaatcacctgagagaaagggataaggtgagagaaaggaataacagggagaagaaacaagctcttaacaaagaagaagaagagaacagaggaagggaatcacctcagaataatcctacaacatgtaatcctcccgtgacaccctctaccccgacatatatataaataaataaaatatataaaagtattggtaaacaaattcacgtgggtaaaatgtttgcatttaattcactattatcaattaaaacttattaaaaacatatccttctcaaaataagattgtcaaaatttacaaaaacattttcttaaatcagtgaggtaaagtaaaatagactaacaccatgcaattaatataaaaacttatgcccaaatgtcacatcctatcagagcattgtgtcttgacgttcttcagcacaaggttccttaaagcaattcacctagtcatttgctctcccgaacaaaaaagttcaagatcatcacaggatccaaacacgaataacacatagggagtgagttatcacattcaacaagataacatgtaggtataaatatcatataaacaaaataaaatttacttaaacaaagctcatgtcatttcaccattttgtcgcccaacatcacatcacatcacaacacatttcattcactttcacaacattcacgtactcaaggatcgaaacacaatatcatcaagtcaatcaatatcgatcaatacacaagcgttatgcaacatatacactaagactcaatcctatatgcaatgtggtaccatgtcagtgaaaaaccacgtcgggcgcctaggagtacatgacaagacaaaccacacactagcaagtcaagtcactctaactaggtaaaatcataggcagatcaatcagggtcacactgttttgcgagaatgctccaaccatgcaggattgacacatgcttaaaggagtactcaaactgggtgacccccaaagcctacactccgaagagtccgtcaaggcctctccctcctgatttaggtccaacccataaaatattttagcactcagactctatctatgaactgtacaaaacacacgactcctcaattattctcaaaatagttttaactcgtcgccctttaagggccttagcattaactcgccgcccttaaaggaacttagcattaactcgtctcccttaaagggtcttatagtcgtgtgactgtacaattcataattcataactcaatgcacacaacatctcaatcacgtgtatacttattttatcacatacactcgatctcaatcataatgatataatctcaatttaacacgttatcacacttcatgaatcatatgcattttacctatgaactatgcaatacacacaactgctcaattattttcaaaatcatttcaactcgtcggattcccacagtggatctcatcacaatattcatcatccttaaagagtcttacaattgtatgattgcacagttcatagttcacaacacatatctcatctcaatacacatgtatttcatcattcatcacatgttcaatttatcacatgcttacaatttaaatcttcgtttcataatctcaacataacaatttatataaaaggtttatcacaacatgggaagtaaaacccctcaaatagtttctcacaattatatcaaaatcaattaatcaaaatcatggatcaaaacacaaaaacatcaagagcactcaagtttatcaatcaattctcatcagaacatcaattggtatgtagaacacaacaatattgtatttataatcataaaggaaaaaattgtaattcagtaaacatctcaaaataaactctaatttaatcttctaaagatcactacacatattcattctaactccaattacgataaactcatctcttacctctaagcgggctcatgtatgttccggtagtgatagtgacatctctagcaatttcctgagattcttcgagtttttcctctgattgctctgatagggttcccaaacgttagagataatgagaagggattgaaacctccatttataatgtcttcgtgcaattctgttttctctctccatgaatattatctcgcaaatcccaatagtgaagttgtgcggaattgtattgtgaatcacatatcaaaatttcacggcaatccaacggttaacgaatccaggatcatagttttaccgagacagttttgggtttttacgggaaaagaaaaggctacgatgcgaagtgtgtttctctcagcttcgaaatgatttaaaaatttttaacggtgagaatgctagaaattgagttgcaaacctggttcttaaattttacgacgatccaacgatgaatgagtccgagatcgttatttttctgagacaggtctagtagtctggagaaaaaaagagttttgggaggagaaggggaaaaaacgaaaatgaaaaaaagatgaggcatcgtcaatgtgaaaaatgacctaacatgtctctacttatactcatatacttacaacttattatttactctatttatttatttttattattttattaaaggaaattctattttattctctatcaaatgaatatcctttttattttctctcaaaccattattttaataaagttattttttcttattcatttaattacaaaaacctcatcatttttttaaaactttatttatttataaataataattctttttaaattaatctacgaaaaatgggatgttacaccttcacccttggattctcccttctcaaccttgtgctatgcctgcctccctcactttgcggatcgtgagccacgtgtccctttcttctaacagaatttcgtgccaaatctccttccttctttatgcacattacagcatgcaacatcattttgaagagaggttggagaaggtattatctgaagagactgtcatctctcaaggaatgcaatcttgtttaagcattgctttttgcttgaactatgttcacttgtaaaaaaaaaggcgataaagaaaaagttagcgtgtcatgcttgctttctcaaagtatcctactctgaatgataagtacctctttttgtatcattgagttactgagtttagcttgagggtaatggtaatggggacaaaagataactatcattggtcacggaatactcattcgtaagagaaataatttataggaaaatgcttattagtacgaaatttttttcatgatatctgcacgtccataatttctaagaagagtttatctgatgcttttaaattttttatttagtatttatttatatttaaaaaaggagagtgatccacgtaatcattcattcagttggtgcaaatataattcgtaccaaatagcattgttgtaatttataatatccttccaatttgtt

SEQ ID NO: 2588 - DNA, 6185 bp, Glycine max
  Intron number 6 from transcript Glyma08g32320.6 (locus Gly ma08g32320) derived from phytozome v7.0 (chr-ID Gm08; pos 28465686 to 28471870)
agttggctaggtgattgtgcgaaggtatgcctaattttgtgggattatcattgcttaaaaaaatgagtgactgatttaactgttcatcgttgcggaatatagctaatgtgaacagataacttatatataatttgttatatctattatatttgcctcatcactatttaatatacttttcattgtttgtttttctagtttattttaattatgtatgtgtaatcttattcttctcaaatatttttcagatacaatttgttagaaaatattgagactatcagatcttttagaagtttgtggctaacactcattgagctcttaataagtatatatatttttttcacaattggagattttgtttatttttgttggtgttggaattcttactattctacactgccctcttttactaggagcttagttgccttctacatatcagccaaagaacattctattaggaatcttactctaacaaagatgattatcacacactcaaaatcggtgcagtaggcaaatcagagtcaaagagaaagaagtgagaaaagattgagagaattatctagaatatggaaagaacaaatgtacccaaaggagcactctcctttcacactggataatcccagttgtatatccaagttcttataaaagataatcccatctcagtatatagaggcctatatataatagagaacccccacactaacagctagccaactaactccccctttttaaaactattttccctttttattcttccttctataatagacttgtaattatttgggaaattaattctcatgcacaacacattctaatagtgatcttgaggatctagtgtaagagttagagaaatttatgcaatgtattttttttttagagatttgcaccttaccggccttttcatttcatttcatccatcattacttttggcatgttttgcacaacctatttttgtggatcacttttctatgtattgaatcgagagatgatagaatggaatagcttgagttgtgtgaacatgcccaaacttatgtctcaggcctttgaagcttaaagattttgtttgggggggggggggggggggggggctttaggactttttaccattccctagaagtttctattagctggttacagctgtcttcaaccatacaattttcctttgatttttattttgttttcttacttggagatctgaacccagtctcgaatttgggtatcaattagcttgtttgtcatcattttggtgctttcattttgcatcgcaactaccaaatctacaatggaactcaaagatgctttcttggctatggctgctgaaatcgaaacgttgcaggtgagatgggactcacgacatgagcagctccaaaacaccatggatgctacgaatgatgctttacatggggttcttagttctatcctggaaaaaatcacagctattcttgtgggcttcaatcttgtggcttcatccaccactacacccaccatttccctatccagcatcttccatgttggcccagatggttccatccaggtgtggtgactatcgtcccctatgggctttcacactcctacccctacacctttcttaaaccaaaaccaaaacttctctccactccttaacccatcttccacaaatccttttctccaacccaaccaatttccccccaagaattagttgtggtgactattgtcccctatatgggcaatccttttacaacgattcctcgtgtctcaaaactcaggcaccaactaaaactctgctattcatcttcataaactgcatttgtcctcttttgatggttctgagcccctggactggttgttctaggctgagcaattcatcaccttatattagatccccttggaccaaaggattgccgtggctgtgttctacatgaagggtgacgccctatggtggttcaaatggatgcacaataataatcaattagtcgatgtgttggatgtagatgtttgattgaggcagagtcaaccacaacctgtttgttgtaatgcttcaacctggctttatgagctagaaggagcgaacttatttaggaatttgaagaggaacctatttgctactgattagggttacaacagactcaatcacaaggtaggccatgaagagcatctagatgttcgtgacgagtgactggatctccaatggaggagagaaaaattgccaaggcttttagacgaaccaaaaattctgacatagttttaccttctggagatgtattgtgtaattgattagcatgagcttgcatatgcacatcaaaatgtccgtgaagcttttcacatagctcccaagaatggacgcaaccaatcatttgtatgagaatgctagtcgccaatgttgattgaaccaagaaaaaagtaattgatcctgttgctccctaattagatatgcaggattgacaaccaaaattgtgatcaaattttaacactggaggaatgttagaattaacaaaaaaggagtgaagacagtacctttgatcactagatcaatttctgtcgtcaaagaagaaaatgatcttcaatgagtttcttgctgattgtaatgggtgcatttgcaataaatgattagtgaaatcattaaatcgatacatagacacacttcttgttacaatgactaagctatgaatatgtaaagaatggattggatctaacttaatctcaaaagttaacttaagggaggaggattacctaagttttgcaaggagtattctagtcatatttctagttgatgtgggacatcttaccacatcccttgtgctcaggactagatatcttgcttgtgaattttgcaagatacatttgtggtggcccaacatctactgttaagctctagtaccattttggaattgaactaggaatatgttaattgactactctttgccattggctaacatggatcaactttctagattttttgggaagcgagagtcttcttgccttatttgctgtcttcacagatcttaatatgagattgggatcaaacaatcacctaaagcttgatttggaagattcaacaatttgatatgctacagtgtgagatagaacactcagccttctactgccattttgttgaaagggtgcatgtacttgattgtgtatgtcaacgatattgtcattataggtaacggtgatagctgaagattgaaatttgacagatttcatatttgtatttatatattcatctctacctggttctaaattgcatctgcaactgcaattgtggtcacaatgtaaaggttttttgaattattgcaactgtaaaaaggataaaactgagggatatttgtgtgaaaaccgtgtgtcagagtacacaatggatgctctattatatagtggatattacaataaatactgataattagaggatattcagtttcctttaaatcagatatgtttcctataaatcaaattctaataaacctatacattaaatatttctgattctcaacactccccctcaatggagtaagggacttgaatttttaaataaagtacttgtgtattgtgagagtattatcttattccaggctgaacccgttcggacttatcaggactgtccatcaccctggtggcatcttcctttaaatcagatatgtttcctataaatcaaattctaataaacctatacattaaatatttctgattctcaacactccccctcaatggagtaagggacttgaatttttaaataaagtacttgtgtattgtgagagtattatcttattccaggctgaacccgttcggacttatcagggctgtccatcaccctggtggcatcttcctttggcttatcttccattgttggaacttgtcatcaagcgatcagtaaccagaaccgtattaggtgtggattagagtaggagaggaccatgaaccaatgtcttgtcattccctccatacaaatttgagctagggaaatgtgcatttctggtggggtgttttgaacagaaaaataggtttccattttagctaaccaccctatagggttgttgcccgtaaatgggagaagatcaacgcgcttcaagtacagattgccatcgtcaggggcatggcggagtggactgtcggagatggaagaacgagactcatgcatctcgtcgcagaggatggaaatagacttcgagagctcgctgatggaggagacgagtgaatcgagcttggaagattgggtggaaatggaagattcatgtgattgaagagcgagtttgatggcggcgaggtcagcctccacagcatcaagacgttgagatgtcattctagtgcacatatgaagaaatagtaagaatgaaagaagaataagtggagaagggaaatatctgagagctaaagctccgccaagtgtgagaaagtctctacactcccaattctattacagatcccaaaagtggctgaataagcggttttttaaatgagaaattttagtagaatcatttcctgtattgactatatcatcaacataggctactagataaacacatcaactaagagaagtatgacagtagaggactaaatgatttacttcattagtctaaaaaaaaacttcgtaccccattgcccagaggctcttcgctatgcgaaggtatgggggagggatgttgtacgcagccttacccttgcatatgcaaagaggctgtttccggattcgaacccatgaccaacaagtcaccaaggcacaactttaccgctgcaccagggctcgccctcacttcattagtctaaaattttgaacaaaatttcatttctcaaatcaagcttgtggagactgtctaagcctacgatgagatcaacagtgtttacaattcaattagactctccttgagcaacaaacccttaagtctgctctctatatgaagaaatgcatcttttattgtgcaacttataagtggcaaatgatgaatagtagtcattgcaagaaagacgaattgaacttacttttgtcatagggtatcactatagtcaacagcataaatcttagtgggctgaccctttgaccactaattatgctttgagacgatcaacttcaccatatgaacaaactttaatgacatacacccatctagaatgaacagttgtcttgccaagaggaagaataaactccccaagtaccaatgtggtgaagagcatgcatttcatcaatcatggctcattgccatctaggatgatcaagtgttttacaatttttttttaaaatttaagtagaagataaacgatgatagcttaaaaaattgtaaatagggtgagtattttgggtagattgaatacctttcctattagcaattaaccattttgaaattttcgccaagcagattcatagtaggagttattgattatggcataattcacatggagtttcatgtaacgttggatcaataacctgtgccatgtgttgatatgtgataagagaaactagacacttccttctagaatccttatttgaaatttaaatttaaaataaaagcacatagatgtgtagtttcaaacaatcaccatggtatgttggtaccatttaggagaaactgcttctcaatcattttttgacaaagatcttgaaaaactttgtatttcgtggaatggtggtggcacaatccaaggatggtgtcttaattttctagagaaagtataccatggacatccttgaggaattaggcctactatatggcgagcttgttgatacccctataaatccaagtatcaagctttttgccaaattagggtatattgccaaatgtcaattcaaatggcaactagtgtatatattcaccaagtcattgagaggtccatggggacaagcacggtcatatgttttatatgctccatcttgtcttattattctgtgcatctacaattgagttttgcaacgtagtttagccacacattttaccaaatgccatttttttctctctaaaaaaaatgctaaaggtattgaaatgtgatacaaaaattgtatgtggttattcaaacactatgttcttgttttttttcactctaaaaaaatgctaaaggcattgaaatgtgatacaaaaattgtatgtggttattcaaacactatgttctcatgttttactatacattatgctttgacctgtttacatctcaatcattgtaatgattgaaattttgaacatggaataggtgatagcctccactaaccaagcagtccagtggat

SEQ ID NO: 2589 - DNA, 1424 bp, Glycine max
  Intron number 1 from transcript Glyma10g18310.1 (locus Gly ma10g18310) derived from phytozome v7.0 (chr-ID Gm10; pos 22643250 to 22644673)
ctgatcaaacttcaaaccctagctaggatttcaaggtatgtcgtaccctttttgattctttcgattttgatctctgtacttcttctctgtgcgtttgctttgcttgatcgtatatcatcaccaaggcggaatttgatttttggaattttagggtttgatttcgcttttttctatttgttttcctgattttatttcgttcttgctttttgacagcagaactggtagtttgtgtttgttgtttgttttttgggttcttggagattgtgatatttggtgctgggcactcaactatgcgtatgtgaaccatgtgtagcgtaacagttgttgttaactaggggtcctttgattagtttggtcgaaatctaaacgatggtcgcgatagaacttaaaatatttttttactcgtcgtagttaataatcttaaattcgagatagatagtacaaaaaagaagtttggttctgaattgaatttagattgctctgttgcaaaatctttttgctgtatggtctacttagtttgaagaaatcagaagaagacaattctgtgtttaaatatggtttccgtgatattttctacgacggatttttttattttattttataaattaactatttgtactcccccttgaattggctattatgctatcatggtggctcgcttttgttttttgtgctaatttaaatcagttcctctgttttctttttgtgaaatgaataagctggtttatatgttgtcccctcctgctgaaaagaatggtcattttagaagcttagtttgtttcaaattgtctgtcattttgaaaatcaaaccaagaaaacattaatgtttttatttttttaatttaatggttgtttcttggtgagtgtgtgtgtaccaatcctgcaaatagcttctctgctggcagggttccccaggccccacctccttgtgctctaagcagcccatttggtgttttcttcttatggttgtattgtggcattctcatgaagtggaaggattaagagccatccaaacgaaggcttaaatgataattatttttgaatgaaaagagtagttttgtttacctgtcaaaattttatcaattattttgtatcaagtttgattcaaaattgacttttgatcttttgcaaaaatcctttttagatatggctaattgatttgaaaaggctgcaataattttttacttatttattgtttgtactaccttcatttgttgtaattttaatttagttttggatttcttagactgagtgtgagtatatggccccctttttctgtcctcagaattagtgctcaaggttttattcattctgttttggagactgagtaatgggcagtattaaatgcatttatattggttcacaaattgcaccgaaaagtaagaagcctgaaatttgtgttttaaatttaggtacacttaacg

SEQ ID NO: 2590 - DNA, 630 bp, Glycine max
  Intron number 3 from transcript Glyma06g16340.1 (locus Gly ma06g16340) derived from phytozome v7.0 (chr-ID Gm06; pos 12828747 to 12829376 reverse strand)
cagttcaatccattctcggtaatataaattgatgatatatacgcattcattatgagtagttatagcatcatgtgaactttatatatatatatatataataaaattatatagaagacgtacgtaattttattccttactaatgcgacatcttcgtataagtattatattatattctgtttatttctttttaccgtcacatcatataacctgtttcacttatattactcactcttatatttttcctttgctcataacattttcttttgaatattacatcagcttactgattgcattcaaagtttcgaagtcacacgtctgtcgtggttgaatatgttgaaatgttttggtgtgaacggatatttctgtgtatacatataatgttttctaaattgttaattgactgattgtcttaatatgcatgattatcttaatatgcatgattatctttatcttttttatatatatacataaatctaaaacaatatgctttaaaagcaaaaggacaaatattgtgttgtacataattgacttttggttgttgaaagaatatttttcttttaaaatggaatcgcttgtgggttgtatgatagttagtaacatgtgctttaatggattttgcaggtgggtatt

SEQ ID NO: 2591 - DNA, 1102 bp, Glycine max
  Intron number 2 from transcript Glyma09g20270.1 (locus Gly ma09g20270) derived from phytozome v7.0 (chr-ID Gm09; pos 25111819 to 25112920)
caagcagttaggagtgtgtatatccctggattcaggttactttgccaactcttcttttaacattttttttgtaactaaatcctaaaaaagagtagaattttatttcatgttacaatctcacagcctgggaattacaaataaactaccaatttcgtcctggaagtattactctctccctgagtagtccctagagtaataaaattattcaagtaattcttgtagtattgaatatctatcacttgggttactaaactgatgcatttcagtgaagtttggggactaatttgaagggttttctaataattggggaaatacttagcatgatttctaatattgctaggactacttaagaaggttatttactttagggattacttagagagagtcatagttcaaggatgaaattgatggtttacaccatggttttaaatagcggtccccaacatcaaggtattttgacactccacaattgtgactggatcagctgtactttctcgcaattgcccacaatgtaaaggtttttttggctcaccacaaccgcaatttaaaaccatggtttacacttattttttcagtggtgcagtatgcatggacaccattaattacaaaataaaaatcagtaggtgggtgcaagatatttactatatcaaaccaacgatcttatgtccatccctttttttttccttagcaccaaccttactaatcaactcaggtaataaataagaaaaacaaaaacattataactcaagatgttgtcccaataaaccaacttcagggcatttatcaattaatgaattctacaaaattgatccaatagtttctaacttgttggttgttcaattcaatctcttgcttttagctaaatttaagatgagaaacactagtacatataaatttatttgttccaggccttgaatgataaattataaataacaatttggttatagatgtctccaaataaagtttatagcatacttggcacaaagttattttagtattttacagttttaccccccccccccccccccccccccctttttattctggaaataatgataaaacaataggtatttgccaactaagaagaacaaggataggtgga

SEQ ID NO: 2592 - DNA, 8544 bp, Glycine max
  Intron number 11 from transcript Glyma10g11720.2 (locus Gl yma10g11720) derived from phytozome v7.0 (chr-ID Gm10; pos 12067537 to 12076080)
aaagtatggaattcagaaactgaccagatatcttttgttttcttgagtagatgggccctacaaagcttaatccactttacatgtcatatatgcaattcatttgtgcagcccacaaatggtcgaaatatcatttcctgattaacagaattgtaacagaatgtaataaaagatattttgagagagaaaaacttcagaaatgagaagtgaaaatatcatttggcactgaactttgtgttacaacttgatatataggccgagatagttagttatgacagctgccaataactaacctactaactaacctaattaacacacttagctgagaatgcagttgaatactgctactctctgtacaatactctaatacccccctcaaactcaaggtgggtgagactttgaggaagtctcaagcacattgagtttggctcttagaaacatgaatctgtttggcaagagtggcctggtgagtgcatctgcccactgatcaagagcagggatatgatgaacaactagctgccttgtcaaaacttttttcctagcaaagaagacatcaattttcatatgcttggtttgtgaatgaaggactggattatgagctatagccactgcattttgattttcatagaagacaataggggtgctgaaggaaactttcaattcagtcaagagggtctgaatgcaagatatctctgcagcagtctgggataaacttcgatattctgcctctatactggaccttgcaacaacttgctgcttgtgggaccaccatgatatgagactaggacgaaagtagatagctaccccagaagtagaccttctgtcatcaatatcagatgcccaatctgcatcacagagggctccaagagtgtatggttgccccaaaacagcaggtttaaggtgaagaccatgctgctctgtacccttcaattatcttaggattcttttcactgcaatccagtgagaatctaaagggttgaccataagtttgcagactttgtttactgtgtagcttatctcaggcctagtgatagtcaaatactgtaaagcacccacaacagatttgtataaagtagggtcagaaaagagatctgagcctgttttagtgagcttgcagctggaagccataggtgaagaaataggctgagcctctgccatatttattttctgcaacaaatctcggatatatttactctgagtgaggagtaatgacttgtcaggaagtgtcttaacatcaattcccagaaagtagtctagcagaccaagttgttttaagagaaaatttagaattaagctgagattttaggtgctaaatcagcttagtggaactgccagtaagggtgatatcatccacatagactagaacatacactgtgagatgcggtcttgtacacaaaaaagagaggggcacacttactagcaacaaaaccaaagtgaattggagtagattgcagcctctcaaaccactgtcttggggcttgtttaagcccatacaaagctttattcagcttgcagaccatagaggaatttgattggtggaaaccaggggtttgagacatgtagacaatctcctttattcatctttggagatgtagattctgccatctgctgcaagacacttatagcctttatgagaaagtgagtaaccttcctgagatcttggttgtagcttgtgctgattatagggtctgaggaggggaaagcaagcacaacaaaaaatcttgagaaatttgtaatctgggagtcttttgtacagcctttggaaaggtacttcattctgaatagctgttgaaggaagcctcttgattaagtaaacactggaaatgacagcatgatcccaatattccaaggtctaagcttgagataacatagtcaaggctgtttccactatatgtccgtgcttcctttctaccacaccattttggtggtgtgtatgagggcatatgagtctatgaataataccaagctctgcaagatacttagtaaaaggtctgtattcccctccccaatcagactagacagctttaataggcaaattaaattgagttttcaccatagtttgaaactgtttaaagataggtagtgtctctgatttatttttcaacaagtacaaccaagtgaaacaagtgtgagcatcaacagaagttacatagtatttataaacagtgtaaatgagttcaaaaggagttgaatacacagtaagagagggagaggagggaagttatgagatttgccaatgcaacaatgggaacaaaagtcagaacttgttttattgataagaggtagattacaaagtttgaatacaagtttcataacatcagcattaggatgacctaatctggaatgccaagtggcaaaagaaacagtactatagaaactgtatttacagcagagacattattgattctgtttacagaaggtgaaacagagtcggaagaagatgctcttgacatggtattgacagtgaaagaagactgaagttgctgtttagttaattgaagcaaagctgggaattggtaaaggccatcttaaccaaccaatcccttaagaagaacttccttagagacctgagatttaacaaacaaaattcaggatgaaactcaaaaaacacagaattatctttttgcaaaattgactcactcatcaaatttttggttatggaagggactgtaagtgtatatgagtaactaactcagttgagtttactactgtagttaattaacagttagctttagttacttttcagttacaactaattctcaactgaatctcaacagtataagtactgttcttgtaagagatctcagtggcttttgcatattctaaaatgagatatacaaatctctttttctctctctagagtttctacagggacaaacaaaagattattataaataagaggaaatttaggattaaaaggagactggaaagatgattcacctgaggaattgatgctcaatccctgaccattaccaatggtgatttggtctagtccttcaaagggtgtagtctggtgaatattttgagggagatttgtgacatgatgggaagcaggtgggtgggtttgtgaatgggcttgtggagcaggtgcttgagggtgattgtaatgaggctggctagggtactggttatgatactggttagggtactgattgggataatggctaggagggggtaacatctgatattgagactggttagggtactgattggggtactggtgagggtattagggtagtgatttggctgaattggatagttcatgggttgtgtagggacataattgtcattatgtctgtagtaacaataagaggcatcatgattgtatttgtaacgacctctacctccttggccatcaccatttctatagccgtgaccaccaccacggccaccacgagaaaaatttcgtccaccaccacgatcattgttgagaaagcgattactcccattataggaatatgttgaatcactgctctaagtaacactattctgagcctgagcaacatttgcttgtgggtctggagtaccagtggtgttaggaaacatttactgagaggaattgggggtataattaggtttaacagcttctgtgagattgatagaagcaagcaattgcttgcgagtcttatcaatacgtcacggagcgttagaaggaaagagggctagtagatggaaatggtggtggcttgcgctgacttggaccatttggaagcaaagaaatgacatcatattctccaatgggacattcaacgctaacagattattagatgatgcactttttttgttatggacatggctcacacacttggagaaggatttcaatatacatttcaatcaatggtcctccaatatcagagcaggattttctaatagtataggatagcatcctaaggcaaactttgtattatctcttttcctcagctttggttcacttattgtatagggaccaatcctgaggtgactattgtattttcagtacctctggtactctattaatatattagtatttttgctgatcaaaaaaaaaaaaatacgtgtttcatgagggagaaggagagtctctacgtcatcaatggtaagagcctcaaacctgcaactaataagagtagccagcgactcaaattcattagtaagccatcaagaactatatcaacatgctcactgactggaactacttctccaataggcgacagagaattgatctaggtctgaacttgttgaacatgtatcagcagttgcctattagtttgttattttctactaattgtttgaccaagtctttagaattagttattttattttctgttacttagtagctgttatgttagtggtttgttattgtttaggaagtcagttattgttgtttctttcagttactacaaatctgtatttaaacagatgatcattcaataaaaaaatgtgcattcatctccctttattttgtgagttatgcttattttacaacaaaacttgaagaaggtattcagaacttgagcgattgtcaagataaatatttcaaagatcgccgcaaagctgtttcttctttccacgaatgatagactgaaaatgtgaatgaagcttgtcccagagatgcgcgaaagcaagagctaatcctgttgttctcaaagcagaaactcaggtgaagtttttccagcatcacgatcggcaagcgtcgcatagcgcagtggaatctgtggattggtgagaagataatgaagacgatgtcttttaatcgcaggttcaacctgttgacaccgtaacagataattggacttcttgagtttctccaatatcgaatgtgaaaaatcctttgtagttgcggtggaagatgcgacggcgactggtgtttctgcggaaattggtgtcagaatttcttcagaagcagaagccatgaagaggaataaatggggatcgaaaaactagctcaatgataccataaaggaaacagagagagaaaaaggaaagatgcactgaggtgaaaagttgttactattcaacccaaacagaaaacagtttacactttggtttatatagtgggtacagtagggtaactgccaactaactagagttagttagtgacagctgttacacaactgtcctaactactaaactaactattactaactgaaaaataacagtagttaggctaagaaagaaaaataacaagtacacagtaagaatactcctataataagaaaaccttcaagatgatgacttcagataacaggttcaacatgttgaatccagagaagattattcttcgcatgcagcttctgagagatagagtgtgtgaaggtctttgaagtgcttgccggcagaggaggcggtggaggaggaggggaggaaggaggagaattaggaattgatgtggaagccatgaacaaaagctaggtttttgacctaagctctgataccataatagaggttgagggaatttgagagaagagacgagttgcaattgagaaagaagatattattcaacccaatctgtaatgtagttacaagactatttatatatgatgagatcatggattctgacgaagaagtgctagagaagtccatttctccaattggcccaataacacgcgtaagaacaaaaacaatggagtccttagtttctttgaaggagaaaacaataatgggttgggttacattgctaagttatgaataaatgtaaagaaaaaggtgctgaagtgtccatacttgggcccattggcccaatagctattttgggctggaattgaagcattttggaagaagaccaaaggacaaatctgatggggtgcatggagcacttttttatcattaataaacattattagaaactaaacagtatcataaaagaagattagagagtttgagagagaggaaaactcaagaatcaagaaaggaaaaatatatttggccagtgaatattgtgttacaaagatatatatatatatatatgtatatatataaaacagttactgaaactgtttgtagctaactttgaactaactaggaagactaacaagcttccaaactatcttttaactaactccctttaactaagagtgcagttgaatactgcaactcttttgtacatactctaataaacgtgaagctttaataatttttagcagagcactttgtttttattgccatttaatgtattttgctgttttactagcccactaagtttgcccattaactcattcaatctatcattgctgggtaagtggaaatggaacctgtttcatagccaaggagagctgtgggctagggtactagaatcgaagtatgtgggttggaggggtttaagcgaaataactagagggaagggtgaatcggtatggtggagggatctaaagctcgtgcttaatcactcgcatcatggagcgataatgaagaatacaacagcatggagggttggttgtggggataagtttaaattttgggaggacgtatggatggggggagaggagtcgttacttgcaagattccctaggttgtatagcatttctactcagcaacaccaaagtatacagcatatgggggtcttcaaagatgcaggttgggaatggaactttaggtggagaagaccactgtttgatagcgaagtacatttgggggtgtcattcttattagatgttgcacgccacccaattcagcctcacaaaggtgatcagtgggtgtggaatgcagacccgagtgggcaatacatggccaaatttgcctattatgtgtttcgggggaaatagctgaacaacaacaagatggagcatttgaggagctgtggaagatcaagcttccatctaaaattgttatatttgcatggagactaatcagagatagactaccaactagagtaaacttgcggaggcgacaaattcagcttggagattcaggatgtccattctgcggagttaaggaggagagcgcaggtcacctattcttcttgtgcagcaagatcattccaatatggtgggaatctttatcttgggtgaacttgttgggtgccttcccaaaccatccaaggcaccactttttccaacacatttatggagtgacagagggaatgacgtctagtagatggaaatggtggtggatggcactgacatggaacatttggaagcacaagaacactattatcttctcaaatggctcatacaatgccaacggaatcctagatgatgcaattttcttactatggacgtggctcacaaatttggagaaggattttaatactcactataattactggtcttccaacattagagcagggttcctaaatagaataggatagaatattagtgcagatttctgtataacctaaatgatatttcagattggttcaaagaaaactaattgtcttgggaccaaatctggactgctatttgtattttcagtacctctggtactcaattaatatataatattatatttgctgaaaaagaaaaagtctgcccactactttagtggatatttatgattacttagtgaatcttttctacaaaaggcaccatgtactcagattccaaatcaattgagtgaaatttattcacattgcttattacaattgtttccaattcttatctaagtaagtttttaacttagtggcaaattatccgaattcttatcactctcaatttcttcttttctagagtgtggcgaattcaactgggttactttaggttgtggcgtttctacttatcaacctagagttggccagattctactctttttcttatttccattttctgggcgcatcaatatagctgaactaactgtcaactaacctaagttagttggcacaacagtcacatagctgtcatacactaacactctaaactactaactgaaaccagactaactactagtggttagtctatcagttaactattagaagtaaaatatacactgtgagtaatgtgatactcttataattacaaataaatagaggatattctgtttattctaaatcaaaggttatgttcctataaaccactattactaatagaatcagaatattatattattattctctgtcaatagaattgataggcagattatttggcattatttgtgcagatttgttggtccttttaaaccagtatatcttgcatgattgtatcactgtaattgtgtaattatatccttaattagttaccccagctgtaggttaccatttatagttttttagcaaacttcaaggctagaaatcaaattgtatcatactatttaaatgagaattctccaaaggagaacacagttttcaccccaatttctgagtttgacattttcaacattttctgcagttactaaagcattttggcaaaatgatcattgacttctaattccaatgtggtggtagtattaggatcccattctagatactcatgtagcatactctgcattataaatctttgttttccatattctgccctgtagcagtctacatggtaatgctttttaatgccaaattgccaatgctgcttcaaattgatatttttttactatgcgtgataatatttgcaggcacttttacattctgttccatttgggaag

SEQ ID NO: 2593 - DNA, 6935 bp, Glycine max
  Intron number 1 from transcript Glyma18g45670.1 (locus Gly ma18g45670) derived from phytozome v7.0 (chr-ID Gm18; pos 55388002 to 55394936)
tcattgctccattgtcagcaaatactcttagcaaggtaatcaatcaaacttgagtggtttttagtttttttctatctgcattgtcatgagatgaataatctattatatatgttcctaatcatcatgcttggatttgaatctagcttctctgttgttgagtacaatgtgtttgtgttggagagagagaatgcaatttttattactatgatttggaatgacatcgtatcatctatgtaacagagaataccttgttgctattgttgtaaagactagtcctacaccgtaacaattagttgtaggagtcacacatttagcacattcacacaatcacttgattggaaccgttgaatgaggattggacaactcatattttattttgtatatcaaattaacttaaaatacacatcccagatgtgatcctatcttcatccaacaaagctgattcaagaatccattttctttaccagtaggactcaagatagcctttttcttggccatgtctcttagcatgaatcattatgtaactagagtttgcttagtttgttagtctctatgtaactagagttagctgagttagttatagttggttatgagttagttacccttacaactaactatatgctcaactataataaccaactttgtgagctaattcattcatgttattcattcccttcaatatcaatttctctctttaactttctcggcaagcttcttttgcaagctttgtagttatccacggcaggcatgaggtttatggtggtatcagagctcttccattgaagagctatgttgcggaactctctgcccttgcttcttctatagttttctttcaatttcttcatcatgaataccaagtcatcttcgcaagatcaatctttgaatatccacaacccatactatcttcgtccaggagaaaatctagcaactgcactggtttctccaattcttgattcaacaaattacactttgtggagtcgatcaatgcttactgcattaagtgccaaaaataaagataaatttgtcgatagatccattcaaggatatgcatcaaatcgtacacttcatacaacttggaagaggtgcaataatatggtggttgcttggcttgttcactcactctcaccttcgattagacatagcattctttggatagatgatgcacgagtcatattgaaggatttgaggtcaaggtattcacaaggggatttgatgagaatttcagaattgtagcaggacatgccatctatcaaacaaggtgatcaatctataattgattactttacaaaattgcatattatttgggatgaattggaaaatgatccagtttgttcatgttatccaaagtgtgtgtgtgatgctcttactagagttatggagagaaagaaacaagatcgggttatgtagttcctcagaggtctgaatgatcagtttaatactgttagatccaatgtactgatgatggatcccttgcccaacatagctaaggtcttctcatatgctattcatcaagagagataacttgcaagtaatgatataatgggaaataccagtctgattaatgcagttaacaccaactcatttaaatcaggaaatatgtgcacctactgtgatatagataatcataagttggaaattatctacaaaggctataccagtccctacaaacaaggattcgcagctacgctccactcctataaataccatgttccattgaatcctcaacacgtacaatcacacacacttcagcacacgagcaacaagcctatgtctctctctctctttttctttcgcttactcgagcttgtacttaagcatatacttgttttatctcctaactcacttacttgagcatcaaagtcctttgttttataggtcccccatcatgtcctcttgacaaaggcacatcttaaatctgacgtgcgaagtttaagagcccactacagccacatcctccctaacgtgtgctagctccgaatttcggtaagtacatttggtgcccatcgtgggtctgcggtaaaacatatcatgtggtctctcatcaactctctcttgatcatccatggttagcactcggtctggcctaagacgtgagacccctctcaaagactctcatccttatctgacaactatgacagacacaaatactctacagcatctccaaaaccgcattgcaaagatggagtgatgctacgaagaggagctaagaaagctaaagactgaccatgatcagctgaaggctcgtgtctgacgtccccagggcaaagactactttgcctacactttgcatgagtgcacccaaggggaatcacactctcgacgcacaatcaacactccagatgtcttatgtctctcctacatgcactatgcaacagggtagacatacccttggggtggaaaccacttaaccttgagcgatatgatgcgacaatagatccagacatgcatctagatgcctgacaagttcccgaatagtttgtttaaaaaccccccaatatcatggacgagttacgcaaacgagccaagggctacattgagatggaagaaatgtacaaattccaaaatgaagttcgacaagctggacagaagcacaacaagtgagaagaaagtaccaagaccgacttacacaagccggacatgaggtacaagtgggacaagcgccaacctttcccaaaagggactaggtacgagcgttgcacacccctaacgaccaatcacactacgattcttgaggaagctttcaacttggaggtaccaattaggctaccctagatgaaacctccctagctagggtcagacacaaccatataatgtaggtatcattgtagtattggtcataatagagaagaacttatacaggctgggtacttagcctagtttgttaaatggacggacgaccactaagcaggagcaagacttggaggacaccaataggagcaacataggaactatgaagaagacaaaagaagatatagagtagaagaccaaggttgacagggacaccaacaacagcggtgtgagtgacaacctccacaagaacaggaacccgcccaacaaatcagagttgtaatcaatagcattgcgagtgaattttcctatggaggacagtccatccagtctcgaaagtgacatcttcatgccattaatgtggacatagatattgttgaaattttttggcgatggattactctgatccaagaggtaaaaaggcaaaagctgaggtagggtgtgctttgatcaatctataatagattactttacaaaattgtgtgttatttaggatgaattggaaagtgatccagtttgttcatgttattcaaagtatgtgtgtgatgctcttactagagttacagagagaaagaaacaagattgggttatgtagttcctcagaggtttgaatgattagtttaatactgttagatccaatgtattaatgatggatcccttgcctagcatagctaaggtcttctcatatgttgttcatcaagagagataacttgcaagtaatgatataatgggaaacaccagtctgattaatgcagttaacaccaactcatctaatttaggaaatttttgcaccttctatggtaaagataatcatactattgataggtgttataggaaaaatggttttccttagaattatgcttccagaggaggaagaggaaaccaaagtggcttttggtagaggaaactcaggaggaagaggaagtaaactatttatatattgtgctttcactaaccacactgtagatgaatgctacatagagcatggctatcctcttggacactagttttacaaatctcaaggttcaaacattaacaatattagtgcagaaaaggaggaaggtgatagctgactccaagaaaggaaacaagaaacacaaaatgaggatgtaaagctaacctctcagcagtataaagctttgatggcattgttgcaatagcaaaacatagttcataacaattcacatgtgaatcaatttggtacaattaacaacaaaggtagtgtactatccattacttgtagtgtaagcaagaccaatcaagatgagtggatccttgactcagatcatattacaacctttcctcattttttttctttatgtaaaaatataaactttgtgattgttagactccctaatggtcatacaaccactacaactcatgtagacagagttcaattttctcaatttttatgccttgaggatgttctatacatacctagttttcaattcaatttgatttcagtatctaaattatccttttctttgtcttgcaaactaaacttcatgaatgacaaatgctttatacaaaatatacacataacctccagaggattggtacagttgatatagtggaaggtctttacaaactcaacatggttcctctcaagccttatagggattgcagttctaattccattacatccctatctgctctagtgtttctagcatttcaactttttcatgtaataaaaaacctatagatttgtggcatttttgacttggttatccatcttatgaaagattggtgttgttgaaaaaattttatcctattcttacatcagataaacaattcatatgtgaaacttgtcaattgtcatcatttaaaacagaaaaaaaaattgtcttttcctagcagtgatttctcactcatcttgtgtttttgcttttatatatattgatatttggggccctttctatgtaacgtctttaaatggttacaaatatttttcactattatagatgattattcaaggtttcttttggttttccttatgaattcaaaatctgaaacacaacctcatttaaagaactttgttgccaatgttgaaaggcaatttggataaaaataaataaaggttatcagatcagataatggatctgagtttattatgaaacaattctatgatgatactagcattatacatcaatgttgttgtgttaaaactccccaacaaaatgagattgttgaaagaaaacaccaatatctattaaatgtcactcgatccttgttatttcaatctaatttaccatctactttttggtcttatgccttgattcattttgttatccttgttaatttcatgcctacccatttccttggtaatcaaactccttatgaaaaactacatggagatgtatatgatattgagtctttaagggtatttggttgtctatgtttttcaagtactttgagagctaacagaaagaagcctgacctaaaagttgttacttttgtctttttgggtttcaagccacacacaaaaggatatatcacttttgatctcaagaccaagtctacttctatctctagaaatgtcattttctatgaagattgttttccattcactgatcaaaataaaccagatcctatcactgtcctacctatgcctactctttcatccaatgtcattgattagtctggtgattcatctttagagccaccaagtgatcctgtcatgtttgcctccaataatgattctgatccctcagcctcatagcaagtcattcatacatctagaagacccatgagacaaatacacagaccaagtaaatataaagactttcatgtcacatatccatcaccaactgttgtcaatcactctacaggtactactagcctttatcctcttagttttgtcctttcatataccaaattgtcttcttcctatcaccatgttgttttatctatcacacaaagtgttgaacctcagttatacagtggagcatctaaggatcctaattggattgaagccatgaatgttgagatcaaagcactagagcttaatgatacctaggttctcactgatcttcctcatcacaagactataattgattgtaaatgggtgtataagatcaatcacaaatctgatggttccatagagaggtataaagccattagtggcaaaagggtatactcaggtggaagaacaagactacctggacactttctctccagtagttaaactaaccatagtgagatttttattggctttagctgctattaataagtggcatctcaaacaactagatgtgaacaatgttttcttacatggtaatttaaatgaagaagtctacatggtcatccctcagggtatgcaagtagctagaccatggctagtttacaagcttcaaaggtctctatatggcctgaaacaggctagtagagcatggtttgcaagattatcatcttttctgatttcccatggatacaagcaatgtacttctgaccattcttttttcattaagcatggttgcaacacaattgttattttgctggtttatgttggtgacattgtcttgtcaggcaatgatttgtctaaaattcaaagaattacaaatctacttgacaatgctttcaaaattaaggacttaggagactttaggtactttctggggtttgaggtagctagaagctctattggtataaatctatatcaaagaaagtatgcactggacattctcaataatgttgacatgcttggttctaagccagtttctacaccttgtgattacaccaccaagcatcaacactcagggtcacctatttcagcagaagatgtttcctcttataggagattaatagggaggttgatctatttgaccaacacaaggccagacattacatatgttgtgcaacaactgagctaatttgttgttgatcccaccacagatcacaaccatgctgcttttctctgcaagctttgcatttatccatggcaggcatgaggtttacgaatgtcctatgacttaacaataaaaaggatccaaatctaacgtttacgtcatgcattgagttgtaagttgtgtgcatgtttcttctattttaagaacatcattatggtttgcaaattgcctctttcttctatttcttacttgtaaaaacatgttgtagattgcgggagggttgtgtgacgatcttctgacaac

SEQ ID NO: 2594 - DNA, 1964 bp, Glycine max
  Intron number 5 from transcript Glyma16g02840.1 (locus Gly ma16g02840) derived from phytozome v7.0 (chr-ID Gm16; pos 2409046 to 2411009 reverse strand)
taacatacaggttagtaccagtgtatttccagtctcttcccccctccttctaatgatcataagaaacactttctctgcactctgctgaataaaatattttaaataaaaagttatattctgtagaatgcatacctctcatttcttagttaatggtatatggtagttgtcagtccagctagcattgagagctaactcgacattgattatttgttcttatttattattatactttgataatcaattggattatgtactgatcaattaaagaaacttcagtgaaactttgaagtgtttcaaatttctagtcataaatgtcttgcattgctctcaagctcatgtgttaggaaccaagaattgaaatgaggaagaaaagaaaggattttatttattagtaagaaaaaaacagaaaataggagagaaaactctcctccaaggttttccccttcacaaaggatttctcctttcacaaagagctaatgctcaatttacaataacaacaaatctgcctctctcctatccttcttcccctatttatatctaataaaccctcaaactaactaaattattaatagtctaactatcttaactactatcccttctccttatatcctaacatcatgtacattaggctactattgattagtttaggtataagcatgtacttgcattgattactagttcaggtatgtttaaaacctgaatggattttgtccttgctcaaactcctaaatctcgtaaatctcactgcttagaaagaatatgtctttagcctgattatccaccttatttgttcatctacttattatctgtataataaccagcattacttatgcatcattactttcattttaaggtgtaagattggattacttttatatggctattgtttatgtaattagttgtgctggatagacatagggatgtgattaatattttaatttccaaaagcaagttagaatccttaatctaaattagaacgaattcaaatattagctttcctcacctattaagcatcttggcattttcggatccatcataccaatttgttggaacttggagttggaatccttagtattttgacaagtagatgggcatacaaaaattatgcacaagggttgcaccttagtttgttataactttggagggtatttaacaatatcaaagaactaattatgtctcttagactagattattcttctgaactacacttgtcaattttcttttgttgaactagcatggctggcaaagtgtaagccttgtaaccttctcttgcaaagtataaactatattttatttggatcttaattaacattatgtttcagattgtagagtttgtggaaaatttcaaacatgaaactataattggtttattcatatcaattaatctaatatcatctgtcaaagtcaaacaccgcttacattgtttgggaaatttattaacaattaactgaagccttacaattgctatacggttcattcatctttttggtacttttcttgaacttataatggttgcgcatggctcgttgacacctctaaaatgcattcaaattttcaaccataaagatctatagccaagttgatagggctggaaggactctgcttgtaaatcctttatacatggtgtcaattagcctttgactggactgggtatgagtgttacttccaatggacattatgtggctcagagaccacctgaccttataggaaaaagaagtcattgcatgtattgttaattgggatttgaattagtctggataaatgactaattagtctttcactaaaaatatttaatcacttttatcacatgcattcatttttgaatgtcaatcaattgcttaggttatcttgtacttttagaaccgtaattttaaatgctgttctactgataatatatatatatatatgataattgcattaaacctacagagatttggtgggacttttagggggtgctgttgctg

SEQ ID NO: 2595 - DNA, 220 bp, Glycine max
  Intron number 2 from transcript Glyma11g01600.1 (locus Gly ma11g01600) derived from phytozome v7.0 (chr-ID Gm11; pos 943798 to 944017 reverse strand)
tggaagttccctataataaggtgttgattatgattctgagtttttgttgatctaataagtgagttattgtgcgaagaataatttattgtagattcctagatatttaacagcatatttgttcttacctattttgtatattactccaaaatattatctttgtatgaatttcttgtacttgctttcagcaagatacttcttctgggcaaaagcaaccaacatc

SEQ ID NO: 2596 - DNA, 4881 bp, Glycine max
  Intron number 1 from transcript Glyma13g08080.1 (locus Gly ma13g08080) derived from phytozome v7.0 (chr-ID Gm13; pos 8308948 to 8313828)
ggttctacctcactctcttccccttttccttgtaactcttaaaccttaccctgcgtttggatgcaggaatttaagttggtgattcattttttttaacaatttaaaatactcacctgtaaaataagctgattggatgcaaaatttaaggagtaattaaaattttggtatttgtataagaaattttaattagttcaaataggagaattttaaatctctaacattttaaattttttaaaattttaaaattttgcatccaaacacatgataactctttccaacaagagttacttataaattaaaagaactaattcttatcaagttcatattagaacaatctttcatatatataagaatagttattttctattcaaacacataatatctcttttcaacaagatttacttataacttaaaagaaccaattcgtatcaagtttatattgaaacaattttttatatatataaaaatagttatttttcatccaaacacataataacttttttcaacgagaattatttataacttaaaagaatcaatttttatcaagtgcaattggagcaatcttttatatatataagaatagttgtttatataaacaaaagcttacaacaattcttaagattataaactatgatacatagatattatacatgtatctgataccatacatatctgatgatgttgatgtagcgatgcaatgatataatgcatacaccgatatgatagaatccgatgtagcgatacaattattttgaaaatataaacatatgatatgacacatgtaagatacatatttagaatttgaaatttgaattttttaatagaaattattgtgtatagttagttgattgttaatttaattaatttgatttgaaatatttgatgattgatttatttgattgtgtttgattgatgtcttagtgtacttgttttttgcttgattaatattgaatgattgttttaatgccttttggtatcacttgattctcatacattgcgaaaagtggtaacatctttctcctctctattcatgatttgtttttgatgttgacaaagggggagagaaagataaaagataaaatagtaagaaaaattatctattgtttatgagacaatttgtttacatatgaaaaatatgaaattttcaactgtctcatataagcaatcattgcaaaaccaagggggagtaaactatatgcaaatagatattttttctttgttgttgctcctaacctataggtggttgtcatcatcaaaaagggggagaatgtaaatcatgaagattttgatgatgtcaagaagaattaagaatttgcttgagaaagggggagaatgtaaatcatgcaagctttgatggtgttgagaagaaatcacatgtttgtcatcatcaaaaaggggaacaatgtgaatgtatgtatacatgattttgatgatgtcaaaagaagaatcaaacaaggctcattttgcttcaagattaatacaagattgtttcaacgaacaaagccttgatttaagatttcttcaagatcaagccttgcctcacaatgaaaggtttgaagtcattcaaggcacatgtaatcgattaccaatacatgtaatcgattaccaatggtttgaaagtgtgtaatcgattacacatcatatgtaatcaattacaagagactctgaacgttgggaattcaaattttaaatgaagggtcacaactgttcaagaaaaacaaccgtgtaatcgattacactaattctgtaattgattaccagagagaattttcaaggaatatcgccaacagtcacatcttataatttgaattttgaatggtcatcaaaggcctatatatatgtgtgacttaggatgaaattgaagagagagttttgcttgacaaaaatgtcttatcctctcaaaagacaatgagagagattccaaaagaacttcgttgtcaaatgctctctcaaaagaaatccttgaccaaacacttgcaaaatctataaggattcttacataatcttcattgtaatattcttttcttgaagagagaattcttcttccattcttcttattaaatgagattggttaagagattgtaagtctcttgttgtaaagcatctgaacacaagggatgggttgtccctgtgtggttcagactttgtaaaggaatttacaaagatagtggaaatctcaagtaggttgcttgagtactggacgtaggcacaggaagtggttgaaccagtataaaattgtgtttgcattctctcttcccttatcttatttattttgttgcaatcaattgtgtcttgtatgtttaaataacattgttaaattgattgttgttgcttcttctgcattctaagcctatccctcttaagattattgaggccacaaggttcaacagctacgaggttacctttgcaattttgagcgcctcgatatattactggactcaatcggacatccgactaaaaagttattgtcgtttgaatttgctacgagcttccattttaaacttcaagtgtctcgatatattaggggactcaatcagacatgtgagtaaaaagttattgtcgtttgaatttgctaggagcttctgttttcaatttcgatcctctcgatatattacaggactcaatcgggcatccaagtaaaaagtttttgtcgttacaatttgctcagagcttctatttttaatttcgagcgtctcgatatattacaggactcaattggacatccgagttaaaagttattattgtttgaatatgctacgagcttttatgttcaatatcgagcgtctcgttatattacaggactcaattgaacatccgagtaaaaagttattgtcgttagaatttgctcagagattctattttcaaatttgtgcgtctcgatattgatgcaatcctacccccaagggtattggatagaagactccaagaggcttgggctagagctactaaagaaggccctagggttctcatgaaccttagggtatatttttgagcccatgggtcaaggttggatccattcttctttgtaaatgttagaattggtttttctttcttttgggccttgtattttggccattctagtggtatagggttttagccttgtatttcagggcattttgagtagtccttgtaatagggacttttttttatattttcatgtattttggcatgggggtgagcttagctattatagggggtgtgtgtagctaagctctagcttctttaggaagtttctcaaggaggtgagcttagttattagaggggtgtgtgtagctaagctctagcttctcaaggaagttttctcaaagaagcttttcaaggaagttttctcaagaaagcttctcaagaaagctacctagtctatgttggatcgagtggtctcagaataattaagaagggggggttgaatgaattattccaaaaactttaccaattaaaaatttactcttttaaggcttttacatatgttgttaagagaatatggagtagaagagaaacttaacagaaagtaaaagcgaaaattaaatgcacagcggaaagtaaaagagtagggaagaaggaaacaaacacacaagagtttttatactggttcggcaacaacccgtgcctacctccagtccccaagcgacctgcggtccttgagatttctttcaaccttgtaaaaattcttttacaagcaaagatccacaagggatgtatcctcccttgttctctttgaaaccctagtggatgtaccctccactagaactaatccactagagatgtaccctctcttgttctcagtcaaacccaagtagatgtaccctctacttgtaccacaaaggatgtaccctccaatgtgttaagacaaagatctcaggctgttacacctttgatactttgtgaatggggatacaaaagaattctcaggcggttatacctttgaacgcttttgtattagggaatgggaagaatcaaaagaattctcagactgtatcattttaaattctttgacaaggaagaagggagacacaaaagaattcaggcggttagtcctttgttcttttggaaaagggagaagagagacacaataagaattcaggcggttagtccttggcgaattctttttggcaaagagagaagagaatgaaaagatgaatagcacaagttttcaaggtttgtaaaaccagaaaacttcagaaagcttttggtacaaagaagaaaaagaagtttaaagagattcaaggcttgtaaaggattgtaagagattaattgataaaatgcaaaacaaagccttgcttttatagactcttcatgtctggtcaagaaggccattcagaagagttataactttttagaaaaacttaaaacccatttgaaaaattcaaaacctttatgaagagttacatcttttgatttttcagaaacagtcactagtaatcgattaccaaataagtgtaatcgattaccaaataagtgtaatcgattacacaaagcttttgagtgaaaggatgtgactcttcacatttaaatttgaatttcaacgttcaagggcactggtaatcaattaccaaaacattgtaatcgattacaaccttttgaaaatatttggaacgttgtaaattcagtttgaaaactttttcaaactcattttgctactggtaatcgattacaacaatatggtaatcgattaccagagagtaaaaactctttggtaaaggttttgtcaaaaactcatgtgctattcaaagttttgaaaaaactttttaatacttatcttgattgagtcttttcttcattcgtgaatcttgagtcttgaatcttgatcttgattcttgagatcttgaatcttgattcttgattgtagactttattcttgagtcttgaattcttcttgattct

SEQ ID NO: 2597 - DNA, 1035 bp, Glycine max
  Intron number 6 from transcript Glyma15g04920.1 (locus Gly ma15g04920) derived from phytozome v7.0 (chr-ID Gm15; pos 3483431 to 3484465)
ttgcatcctacatcactttctgaattcgctgagaggtgagaatttccacatgaatttgttgtagttattcccagcaacagcatggatggtaaacagaatcaaccgaaggatatctaagaactataagacaattaggtaatgacgtgctgtattaaataggttcaaaagatgagaacttactgatgtttaagtttatgtacaacgaaacccatgcagtcttaaaaagttgaggcaataatttgaagaaatttatgaacactagaggatggtaaaaaaaaatatcaaagctttaattcagaaggacatagcaaaactaaggcaagcaaaatgggataaatttatagttttgctctttggaaaaagaaaaaaaaaaaagaagaccaacttgttttgatataataaaggattcaatggttgttaattattgtaggttatgtatgtgtctgaggtagttactttttgcacaactctcatttagaagggcatggtttatcgtgattagccttcagaatggattggagtgctactagacggttttagtcaatgcctttcttttctttgttcttaaatctgattttgtcctcttccccagttgcaatgggttactgacacatcagacctactctatcaagactgtttttgtccctggttggaaagaaatgcatgttaactgaaaataacttaccattgataaatctttaattttaaaatctctaagtaaactgtatcaatggaaatatggaatttcttttctttcgagcaaagctcaccactagtttctatgccaattggggttctgttgttcttaaaggttgtgtctgattcatgacactcttaaccaatctacaaattttcggtatcaaactcattgcatataacatgctgcagattatgcaagaagatctgtcataggctcatagctcctgttttattctgcctctttctaggtttctgtcagacaactgaaactattaatatactaatgtgttaatactgtcagtttgcaccagatcagagtatcactcctccaacaac

SEQ ID NO: 2598 - DNA, 1422 bp, Glycine max
  Intron number 16 from transcript Glyma20g24470.1 (locus Gl yma20g24470) derived from phytozome v7.0 (chr-ID Gm20; pos 34136655 to 34138076 reverse strand)
gaggttagtctgcctttctgttctttatttttcatctttcttgttagtaggtcctttaatcctccttttatacatatattatctatttctggattgatttggtgatcaagtaaccctttatattgatttgttggcttgagatgtgtggttatcctttacacttgacggaaacaatgaaaagaaattaaaaaaaggaaaaaaaaataatggctaataatgagaagggaattttctgcaaagtccctaagatgcattaaatcatcatcattcagacatcttgaaccccaacatagcaactccacgtgttcatttaacctctcttgattacttttcttgtgtaacgtgtagaacttgttgcttgtttatgcatttaaaccaatatggtttggataatgttgaaatgtaagaaaacaatgcttccaagaaaaattacacaactcagccaccacatgttaaggttatctgtgcatatcccattgttgtatatgaaatatgatgtagcaatcttatgtttatgattctgaaaatgtgggtttgggcggcctaacttaaccccaaaagctagctgatagggtgaggattgcccttcacttatatactctagcttggcagtttggccttatctctagccaatgtgggacttggatttttccaatacaccctctcacacccaacactttgggcttggtgcgtgaataacatggtggatgactctttgaatggatctaggataagctctaaaaccatcttagaatgtgagtttagcttaactcaacccaaaaactagttcatagggtgagggttgtccctcacttatatactttatcttggtctaatctttagtcaatgtgggacttgagtttttcctaataatgattgttatactttagtatatagttgtcacaaactttacaaaagtttgttttcttttattttctttattgtgaccgtaaaggacaacacctaaaattttagtaacttgaacagagattgaataatgctaattttctttggtagaggagttgtgaatatgatacataatagataggaatgattaaaccgccgagagaaaacaagcagtaaaatgatttgataacacagaatcatgtgagctgaaattggattaagtacacatctcaatacctaattcaactttagcaactaaagtctagacacagaagagcaataagctgctgacctagaagaataataatggactaataagctgcgacctagattaagaacaatggattaagaaagcagagaattgaattagaaaaaaaaaacccagtggttgcaatagtgtgaaaattgatcatcatgcataaattgtattattttacaaatgcttggtgataacatgttgattaataaattgtattttcaggctcacactccggctttttgtggtgctgttttgga

SEQ ID NO: 2599 - DNA, 4775 bp, Glycine max
  Intron number 1 from transcript Glyma19g30250.1 (locus Gly ma19g30250) derived from phytozome v7.0 (chr-ID Gm19; pos 37896919 to 37901693 reverse strand)
gggcactaggtatgatgttggtggtgtatatgtgtgatcatttttgtgtgtttgataatttggtgtcttttcctgtttggctttattttttatctgctgggaacttttttttaactgtagcagggaataggatagattttgcggggagctaaagcaaagtagtggtttttcttgtttgggtacattcttagggtttttagtgccaaaggtgtcaaataggatatatttattgcttagcatgatcccaaattggtcattctttttggcttttgccatgcctggttgcctcttcttgttgtgctttatatatttgtttgtctggaacataattatatatgttcattcatattcgttgataggagtattggtgtttccatctatgtcactggacatgaggatgaaacgatttatgttagacaatgaaaatggaggtcttgagagtttggatgaggaatgtgtgatatcctggtccaaaacaactcattctttattctcggtattctatgcaaatgttttagaaagctaaatagataaggtacataaggaattttggaagtaactaaccgagaataaagaatgatagtggcctggaatatgtcagacgtgcattgttggacagagataatttatataggttttcattcacaaacattcttgttttatgtgttgcttttttgattttatcttttcaataggacaagcagtagttcttttctttgatttctctgttggattaagaatgtaccccttcatggttgggcagctctagttaatcagtagatttcataattagtatgttggacaaaaatatttggagtttttaaaccaaaacatacctaatagagtttttttttttccttttcagaagctactttagcttctggaaactcacattattattataaaaatttttaagcagaccttttagttttaaaggcacttttatttgaaaagggctctaacaaatgggcccttaatgtttgggctcatttgcattatagaaaggatcttacaatccatgttacatcctcaagttatgatcttttaatcctctttcattcttgaacaatgcttgagttttgcaacattgctcactgaagaacagaggcttggactgccagtgtgacagacaacaaagaagaaaagagattgacaagataatcgaccaactaccaagagaggattcagttaagatagggtggtgagctcattcattttaggccacacaccttggtattggattgaagttgagtcactcggatcaaatgttattgtcacgggtgcccatttgtggaatattaatgataccagtttcaagtatccccagctatctcaccggaaaatgttcttctatgaggataaaatccaaaggcagcatgaaattcctagtcttttgtacagactacttggttgtgtttatacttgtggaaaacaatttttcttggttttttgttggctcgtggttttctaataatgttgaatgtttgcaacagttttttaaacctttccaaatgtgatattccaagcaccttgaaaaatcaaattattttgagcttgttatttgagtttcaatagttctcagccaattttgctaaagcttggtttttgggccctttttttcccaattaaattgttttcatgtttttttattcattttgcagattccacataagtgcatcagtattttattactggcccggtgattcttctgagttctgaagtttaaggagctgatgcaattggcgtgtttataatgaaatgttacttactacaatgatcagaatattttaattaccaaatggagttctgttttcgcgacctactttttcttattttcttccatttcaaaatattgtagtattttgatttttagtttatcttcaaaaaaattcctgtggaactgtttttgtactgcaaattgaagttttatcagcatttatgaggagtttgggatgctgtacaaattatatttttaaatatttatgtttgtgtggacaaatgtgctgcaacttggtattcttgtattctcgatagtttttatatagtagtttgatacagtttccctatgttttttattgctttatttatttcttactttttcattcttctttgacatgtaatcattgaaatgaaattgcataatatgccaagtgcttttggttatcaataccatcttccccttgaaaagataaaatggaatgaagctaacttatcatttttcttttgttaaaatagtttgtgtacttaatctttgcagttattttgcaggtttgacgtccatacttatatatagtcacacaccaataatataaccagtttaaattaaaaaggaaataaaacaaatgcttttcatttaagtttgattttgatctgcttgtaaagttcgcacattttgagaaatctttttatgtagtagagttccttaactaggtatgtgatgtagatttttacctccttccaacagaaaaccacaaagagtgcacttgtttttttggggctcaatcttctcttttaacataaaattttgaatcttcttttgtcataatgcttatttaaaattgtctttttgaagtatgtcaaagttgtgcaatttcttttttctttcttttgtttctctagtttttcttttctcaaaggactgatttgaaacaatctttatccttatgtggcatttgatacacagaatcgattcatgtttggggatgatgatattcccaggaatataaaatgtattcagttatgttcagaaaaatatacctacagtgaaattttattgtcaattttcttatcttcaaggtggaagatttttatttctacctattcaaattattcccaaaaatttcttatgttcagaaaataatttttcttcttctaccaaatattagaagttttgcatgtactgaattccaccttgaatggttgtatcatgcttttgatcatcatcactcaaactttttcatttttgttattgccgaagcagagtattgtttctggcaagataggcttcatgttggttggtctgaattctttcaaactttctttcaaacttgcaaaatgttgcatgtttatattatagaagaaaccaaattttgtcattgaaattgtgttttatggaagtttaattttcaacaaaaaatcctgcttctgaagttagagatgaagttgactcagtgatagtgataatgggtttgtctgtagctctgcttatcgtctaatgaataggtggctttgatggactggaaggtatgctgcagtgcattatgtctaattgcttattctttgttttagttgaatggcaagtgtgttgtctctctctggctttttactagagaaatttgcagccttaaaccttgtgtatttaacttgggatttaaagagggctgttgctcggtttctcaatcttttgcttctttggtagatagtcatcagttcttgcgtcttccctccctctgaaaaactaataaattatgcatgcttgccttttctgaaacaaaggcatagaaaacataatttcaatctgaatatatcgatacttcgattgcttgaaacaactgttttacttttcatgttgcattcaatgtgttgaatagaactaggtttgttatacatggcctgtggtttttctgagatgtttctatgattttattcattgtgaatccgtgatatttattagtaacatgaaatattgcattgctgctttttgatcgttctgggcttttgccagttcaagttagatgatgctccttgttttagtctttcatgaataatcttcgaatctatttatgatgacctataaaatctggtaagagggaaagtgtccccgccctaccttattatattttattatatgttataagattatgatgtcctccgccgaaggaaataaaattattaaaataatggcagaatagtttttttgttatttataatctatttcatcattttgcaagtattattttatctatatttattatattttaaaaaatataattattataataaggggatatatgcacgagtcttgcatgggtacaatattgtaggtttttttaattattattttatattctaaattggtaattttttacattctaaatatttaaagcataaaattggtatttaaatttatagtcatttgcttcctgagctatttagagttataaataaaattttaatgacttttatattctatatattcaaattattttatagaatcactgaatcaaaactatgtaaaagcatttaatggcggtactagtcatacgccacctgagtgggcataacagaaatggaaaacaaatttctgtattggttatcaaaattaattttgtagtaataaagtattttatctgttatgtaaaaataaatttaatttataatatttaatgcccgtccatgtgggtaatagtgaatgagtagattaaacttgcagacgtttccttggaaatagaattcagaatccataaagaaacgatattgttgttggcttgaggaatggtgatcgtgaggctgatcttcaagaatggaatcaccgaataatctaagtttgttttggtgtacgccgttgtccctgttgaggggttcaaatgtaatagccatcttttgtatttttacacatgcatagattgacctctatagccatatatctgtttctttgttgtagtcatatttgttcgggacatcacataacatgtcttgattttccttctttttttttttttttacaattcttctattcagtttgtaaaaaacaaaaagaagcacgacaaattgtt

SEQ ID NO: 2600 - DNA, 3476 bp, Glycine max
  Intron number 2 from transcript Glyma15g02930.2 (locus Gly ma15g02930) derived from phytozome v7.0 (chr-ID Gm15; pos 2043260 to 2046735)
gtcacccgctcattgcccgcttgaaggctattaaggtaaatccaaactctcactttttgtctcttttttttttgtcaggtcttctccttctagatgcaatcggacactaaactcactttttgtctttggtttcatggaagaggtacttttttttttattgtgtgtcctaattatttttaaattgtctaattatcttaaatttaattggcacatttttaattaaataattacttttcttttaagaaacacgcataagctgtcttttagttttcaagaaaaattataagaatcttaaaaaaaaatattgagtttcgtttttataatgttttcacgagagtcgcatttcataatcaattttgttatagccaaattcatctcttagtcattttcattagaattgatattttatagcatgatcaattttaacaatatcaagaaaacaactataatgaccgtgaaaaattattttaaaaaattgttaacaatttaacaagtgtaccaaatgttcaaatagtaaaactcacaagtctaagtgtcgaatttcacatgaattttgtgttgtactttttattgtatattttttaatttataagagaagaaataattacagagaggggtagagcaaaagagttaactagggaattcaatggaatacgaatgttaggacctaacatgttttgtttgtctaagatgtatgatttttgggatttttctttatcaattcaagtgaatttattctgcccactattcatttacttgacctttgaaaaaattcaacaaataaaatgcatgaagcttcacttttagatgtgtgcttaaatgcatgggcataaaattattatcctatgtctagcaatgatttccttatgatattttttcttttgttctattagaagttatcctctatcaagagtttaacccctaaaattaatgtatacatatattctttgtatttttattagaagttatcctctgtggaacacctaacccctaaaagaatgtaaagatgaataatgcataggagataaatagaaaagacaataggataggaaacacttgctgcattgataaatagtgagaagtacatcatacatgactttgactttttaggcatgtcaggtcctaactaggggtttagcctctcatgaccattgagggccttacaatagaatggggttataagaactgatggaagaaaatgggtgaaagagaaagaaatggagaaaatggtggaaagtggactgggccttctcgctcagtgtgtgtgctctgatttcgcgcttaatgtgtgttgtgcgcttaacgctggtaactgtttgtgcacttagcgcgtgttgctcgctgagcacactgttggactgagcttggatgttgtaatcttcatttttttttttcttaatttgttgtactttttgctcttagttccttcaattgttatatttgcaaccaacatttagaaaaacatcaattcttaacaatttagaccaaatagctgctaaataattattttttaaagataattttactttatttttcgttattaacaatacaattatttagcagttatcaaagattaagatagcacttgatttgatttgagtatttattttctatttttattttctaaaatcattttcaattttagaaaacactcaaattagtcacctaaaattccgaaacaaacatgtaactaatcttatgaaaggtcatatctctgcagtttgtttcattgatgaaaatctaattttaagaaatttcaaatggacttgctactgggatttgagacagtgtttgattcgatcttgaggcctggaaaattatacaggggggccttcctacgccttctccgcatttcaggagcccaaaaaggatatggaccggtaaccagggttactatgctaaatcttttgttttaaatttgaagacagttttactattattagttcccttaaacatttttattcaaaagtataatgttttcttttgtcaccatacacgtttaaagcatccaccaattttttcgataattaattccggcatggaaaagtataatgtttaatattatcaataaaatcatttttaatgtttaatattccggcatggaaaattatatttactaattctttaactaatctccttaacaaaatcatttttaatataagggtttctattttgtacaagaacaatcttgtggaaagaaggaaaagaactttccgaaggaagattccatatttagggagcaaatattaatgtagtactttttgggagaaaaaatgtacccaaaaaaacaaaagcagaacaaagtccacgtaactcgtaatggaatgaaagttagcttggtccctctcccttaattccctcatttctcttttcatgtctaaatctaaaattatcaaaagcgtgcacacatttttctatatctaaatcaacagcttaattttgctcaaaaaaatcaacatcttaatttcttccatcatgaccgattcttgtttttgaaatataatgcctaaactttgtagctttggactgattctctttcattcccaatttccgcgtgtagccaaaccatttctcaattcacatcattctctttctgcttccaaaaatgttacaaaaacatgtactatatgtggtatatacacattcaaggtaacgcatacgtataatgtgggaacattcaaacccgtcgtgggctcagcaagtcgcaacatcgtttttatttgtttatttttactattcaaaacaactcaattttatggaactagaaagtcacacaacatttcctcttaattaattttcaattcaaaccgaaccaatttgatggcaaccaaattccaaaggtctccatttttctatagtagacgtctcttgcgtatttgtaggtgcctaagcctcttccaaacttgtgcagtatataagaggccgggaagtgccatttcaaagactaaactctgttgtatacatgaaactataaagaacctgacatttttactaccaggtgacccctttctcacccttttaattaaaactctctagctattagttactttgtgtatatgttttggctatgtatatttatagctatcccatgcactctcaatatccagtttcgaaatgcttgatatgattcttctttatttccttcgtatgaggtcatatgtatcttctagagaattttgctcgagttgggtatgacgaatacagtcaaattgtgaattgctatcaatttgaatattggttgaatgttattttagtctttgatctttactattacgtatctcgaggtaatgaaagatatatgtgtgtctgctttttttgttagaattgtatgcttttcatttaacggttcttcttcctgattgcaagttttatgtatatgtacctcaaacaagttgatgcattaaatgtgccactgctaataattaataagaatgctggaaaatgtgaaggacaatgttcctgatttttgcacagga

SEQ ID NO: 2601 - DNA, 3459 bp, Glycine max
  Intron number 2 from transcript Glyma19g41880.1 (locus Gly ma19g41880) derived from phytozome v7.0 (chr-ID Gm19; pos 48031941 to 48035399 reverse strand)
gaaggccgttagccattaaaaaagaccgaatcgttgtgagttttattgttaacgtttctttgtttgttacatcaaaatcttcattgcgcagtggtattttattttttcctcgatttgtgtgactttagattaggaagaataaaggggataggaggaagcttaaccttgaattgcaagttacttaatatttgttctgttctactagacaacaaccttccatcgttgtggtgctgattctgtaatgttgaatctttctaagctctctcttgtcgagtgtttacctctgtatgtgcttaaaacttgttagaatttcaagcattttagtttgaagaaattgtctctaagggaatggagttgaatgatttcccctaacttaatttgaaatcagctggggattttagccactaaattgggttgtaggagatattggtagtggcctgaactttagtcaatggcttttcttaaaacctatttagtccacactgtttgtattggtccaaatttcccatatagagtacactgtatatgactgaaaaaactcatctgagaatctcacttttaagctagagatgccatttttggttctgtaagttgtacaatgggaggtgaagataaatgaatgagaaatgatacttgtactatcatttgtacaacaaaatatacaactaagagagagaaatagataaaagggaaaaaattgaatttaaattgtaataaatgataagattgaggagatacacacaaaatatgatgttgaataaattgttgtacaacttgtatgtctatcatatctctaaatgaattggttggttggaaattttatatacatttcttgatactggtcaagtgttcattatattaaatgttaacaaggaacatttatttgattagaaaaatgggaatatttgggacttgataagtggagtcttgcatttgatgccaagcatgggagatgtagagaaagtgtgttaggtgaaagggtgagtgtctcaagcaaaaaatcttgacatttttggatcaactggatgagagaatgaggatagtagatgttggttgcttgcacattgggcctagcagtacttgtgaagtattgcaggattgcatgagttgagtagtcttcaagattcactcgaggttgcttctcttccgccatgagtggtgtctcctccaagataagagagcaaggagggagcgaaactggttgaggttgaagagaagaagactctccttgtctagcttgcctttcttggtgcttttgtttcttcctttttgaattgtattttttgcaagtcttttcaatctccggatcacatggaactgatttccctcttcaagctttacctcgcatacaagaaacaatagatactagaagcacaagttagaacaaagagacaagaattgaaagctagaattttaaagataaagaatgaaaggcctaaatatggtcacacaaatgattgggcacgaggaacaaagtctctgacaacggcgtcaaaaacttgttaaccgattgacaagtgaaccaaatcacgcaagtagtaataaaatggtaagatctagtgttgtgtccatagagacttcgtttgtgctaaatagtttgtgtaaactaagttctaagcaatggaataaaatgagttgattgacttttaagataagagtgcataaatttaaagttcaagattaagcaaagacattaaaaactgtgcaaagttcaacgaggcaaaaacacaaacactttgagggcaagagataacttagtgctgaatttgtagaaatgttgggtgcttggcctaccaaatgaactcttgacgtaatgtgaatgatttttcaccaatcaatgttatttcaactattatcttaaccactaatttattctaataatgatctctcatgtgaaagagcctaaatccattgactgcactcctaattccttataaagttaaacaaagtgatttgattaagagcaagggtttataaaaaggctaataaacaccattccatccctagatatgagttaattagaaaccccttttagttcttagtgtaaaaacatttctcaatgatcattattactctataacatacatgcacatgggtgatcaaacctagaaaggaaacaatgatattgaaataacattaaatggatagttaagataattacatcacaggttttttggtatccaagtccccaacaataggtaagttaacttctcataggcatgagagacccaaaacaagaagaaaatacaagggaaaatgaagaacaatggcacccaaagagttcttagtcaaaaatgcacatgccctagagttctcccccctctttccaatgaaacaatgcttttaaataggcctaagagtgttgtactgttgttttggcataatggtttgtgtgcttagcccagctttcgcgctaagcgcgcatacaaaagcagcacttggctaagtgacagtacgccgagcatgaggttagcccaaatctttggcagtggttgttcagtgcgcatatggtgttgagcacacaccaagcttcaaatttgcctccagatgcttgccatatgtccttccaggctagctctgccgtgctaagcgggctgcctcatcaacccaagtattcttccttccttattgatgcatcaagctctttaaatcacaaccaaaactacattattcgtaagttttattcatagtgaactaagaactaagaaaaactgtaaaacttaaaaaaaggctcaaactaaacatcaattaaggaaaatttaagatgaagtgctgcgtgaaactaatgaaaaagtaatgattcacaacacttatcatagggactaaaataaaaaatcatgatatttttgcgaactaataacttatttaaacctaataaaattgatggagtagaaaacaaactttgtgaaattctcattgtgtgaaatgttatacaatgcaataagaacatgtttttttcatgattaattactgcaagaataatttttatttacaacttgtgtcaattaatctcaatccaaatttataggttaatttaaattaaattatttcataaatatgaaatgttataaaaggaaaggagttatatatgttttcgttctgtcccataatgctttctgctgcctattgcacattcagaaattgcttgtcaaaaactgtaatatcaaaaacatacacagtgatggagaataattaattgactaggaatttcttgaaatcatgatcaagtatcattcatttgtgaaggaaataactccttaaaatatattatgtgacgctgtcatatggcactatgttagagttaaaaccttgtctcgtggtagatgacgtgctacaaaagctttagtaatatgaaacttaccattaacatgaatttgtggcttgggaaatgtcatcattccatatgttatttttttccaaattgcaggcaaaagtggaagttttgtttggtatcaggtg

SEQ ID NO: 2602 - DNA, 881 bp, Glycine max
  Intron number 5 from transcript Glyma19g02250.1 (locus Gly ma19g02250) derived from phytozome v7.0 (chr-ID Gm19; pos 1959654 to 1960534)
tctgaagtgaaggaaaggggaggtatgttgacttaagtaatgtttgtggttgtttgcataatgtggattctggttgatgaaaccttgtgtttaaaaactactgagctttcttttatcttatgtttccattaacttatacagtgtgactctttctctgaactctgaagttaaatcccagtctcctgataaaacatttttgtagctggtgaatcatgtctttttgtctttttgttttctctgtgaatatgaatattagtttgaggttcacttttttcataagccaaaatgttatatggttatagtataggcacatattttaaatctgcaattaatagctgccacagtttcatcccgcttgggtataacatttgccattttcttaagtcaaaatgttatatatgaaatggtagatttaaaatccaagtaaaatgatgcaatccgagctacatcataaaatttttgttttttgttctatttcatagtttactttgaacaattatctaaaaagcaattgaaagttactaaaagttaattttgcctccaatacaataatatactttcctactgataattcggtgtaaccctctctttgctacacttatcttggttctacataaacttgaagtatccacttttcaaaatggatgattcgtcaataacatggtttgtgttcaagttggaaatgttaaattcatattccttgatccctatctatgaaatgcattattaaattattagaaatcataattgtccacttcttttgtctctgtttacaatcatttgaatttaggatttatcatgatatacattcaatttgtcagtgctgaactgtgtattctcaaatagtttctgtgcagaccagaaaaactgtaacagctgta

SEQ ID NO: 2603 - DNA, 1569 bp, Glycine max
  Intron number 4 from transcript Glyma08g10420.1 (locus Gly ma08g10420) derived from phytozome v7.0 (chr-ID Gm08; pos 7550858 to 7552426 reverse strand)
caagacattactttttgctgtcaataggtgcgcatttaatgttaattcatttgttttccagcttctaatgcttttatttttttttctttttttttctttttttttccttcatttttttaatgatttaaaaattgaaggaaaaaaattgatatataagtaaaatgaaataaaatattatgaaaaatgtgtgtatacttaattacatgtgatttttatataactagtggaaaacacaagtgatgcatgtacccctttgatgacaatttcactaaatgtgataaaaaaaaatttcaataatagtttgccaattgctttaagtttttgcaaatatggtccttcctatcctattgtcatctatgccctaggtgtatatagatttgtcagatgctagtttcatacattttatttccctttaaaatgaacgagaagcctttttccatttggttatgtgtaagactgaatgaacacatgaagttactcgagcatacttaaggtttttggttagttgtcaatacaaaggggggaaatgaaaagataagcagatttttcgttcatatcatagaaccttgtacaatattttataaattaggagatatgagtttgtgatatttaagaaagtgagagaatgtcatagaaaatacagagtgaaaaaagagtagtttctctgaaaatgagattctaacaggtaatgaaacttgtgatgggctctggtgcctataggatatgtgacaaatagggaatgatgcaatacaagtgtacatggattttgcacaactgaataaaccatgaaaaaattctacatcagctttatcttttgcaggtaatcttgctttttttaaatatcatctacaatccaccaagcaaaactttgtggtttgaaaacttttgacaattagtataaccacaactactactgcaattgtcacataaatcttcatacaccctttataagctggtaattcttagccttgcatctgtttgttagtgtgttttggtgccttctattatttgagtaccctctgttagtacagctgggttgcagctgtcagttttgttagtttttgatgctgctggggttacaaggttgtgttaactcttgtctgtgtatataaagaacccagggttctctctttgcaagtaataatattagttcagattcagtttctctcagttttctttctctacttctctgtaatacagttttctttatactgttgagatttatattttcgtaacccaactactgctgagaatctaagattaagtatacttgtgagacaagcaactattccaatgttgcacaacattaatcaagcagaataaaagacaaaagcaaatctatagcaacaattattctatccagttcctcctttagcttggctatattgtttgccttaaaaaacttgcttttaatgaccgagactgcttttggatgccaaagaaaacaagttgcaagtctcaccattttggtatcagtgctattcttttcatatttttgtttctttgaatttacccatgttacttgtgtgtgcagtatcttgctattcaatttttccactactatttgag

SEQ ID NO: 2604 - DNA, 1665 bp, Glycine max
  Intron number 1 from transcript Glyma05g38160.1 (locus Gly ma05g38160) derived from phytozome v7.0 (chr-ID Gm05; pos 41559523 to 41561187)
ctccgttattcacgctgcttggtcttctcccacaggttaggtttgcttccctttccaacactttcgttcctttctgtttctctacctatgaaatgtgaattctggatttgttcgtttttgtcgctctaattagaacttggtattagtcgggatgaattagactttggcttattcaataccttgcagttgcgtactacttaatttacttctaagttctaacatcaaattgttgcccaaaagaagaaaggataagtgtggtttatgtatttcactggataaacagtaagtcatgtttggataatcttttccataatcacttgtaggagaagtgtaatgaattgagtatctttcgtaagctaaaatcaacttacgcaattcagttattttttggactaattaaatgaatgggattctataaaagttaagtgcattagttgcttttaactcatgggagaagttcaattcattttaccgtgttattttttctcttgtaagtgtctatggaaaagtttatccaaacaaagcctaaatttaaataataaaacaaacaaacttggatctgacttgcttaaagtgagcaattcattttagaggataaaataaataatttcagtagttgatgataaaatcaatggtcgatattgggtgcgtatgcatgacaaattatgaatgtgttgaaatgtgaagcatcaacagtttatttttctcaaatcatatcattacttactttatctctattcattttagaagagcctaatccaagaagctttgggtgaaatcatgccacttgtcttgtgtaaaactttcgtgcaacagtgttgtaccaaatagcatttttgaatgaaatattgtttcattgcttagccttaagtccttaacttcttagttgacatctgcgtgaatgtccttgaatattgagagctagattgcttttcctttcctgcacggataagaaggaattagtaattttctaacatcattcaagattgtaatatttttagagtgaggatgaggttgaagtggagtttgttacagatgcttgtttgatctgattactttgctttgccagggcttcgatctttaggtggcttgggtggtacactatgaagtcatgagcatgcctttgcatgtgtttttgtgttgtttggagcaatgatacttctggtcatttagcttgttattttcagtctacagctgtctggcactggggcaccttggagtgggttttgtgtccaaaacaataatgagttaattttgattctaccgctattattggtctgttatacttctatgtaatggtccaatctgatacttacaatcccaattttctaatttctatacatatataccattgtgggctgagttttttctggggttctagaaagatattttttatgcttgttttaaaataataatagaatgtgatattcattattgagctgtttgcttttaggtcaagagttagtcatcagcatacttctttgcaattgtttactgttaagtggagttgaattacattgcagtttccatattcaatttgagatccttgaaaaattcatatggaataggcttaattatggtttatgaatgtatgcttattcatcgttttatgctttcttctgcgaaacaggccttccagctgacacttcaatagagaggtacgtg

SEQ ID NO: 2605 - DNA, 1731 bp, Glycine max
  Intron number 3 from transcript Glyma16g24130.1 (locus Gly ma16g24130) derived from phytozome v7.0 (chr-ID Gm16; pos 27933634 to 27935364)
ttggaacattttaccctgcagagccagagcaccaggtttgtttccaaaataatgtttatttactattgatgtttgatagaataccagtttgaaataggatcaaatcacaccagattatatagatattacagcgatttcttgctctcccagagttcaaaaacttttttagagactatctttgtcaaaaaaggtaccaaagacatgacttaatggtccccctaagattaccacaccgaaacaatcaaaatacataattgttcgctacagaaactgtcacatggcacttattaaaactgcattgattattaaaactaattcctaatatgaattattcaaactgcagtaattattaaatctaaatcctacattttctacaatagaccttccaatctgtgggtagtctgatgccttattgatttttctaagaaaagcatttcctgctatgtggcttggatgtgggtacatatagaaaacaaatgtaccccggtaccatgaaggctccttgttttgcaaaggtattagagagggtcagtgtatttgtttctagcatttcccttgtgtatgcaaagaggttgtttccagattcgaacatgtgaccggttacaaaggtcaactttaccatcatgccagggcttgtccttggatgtgggtacaaatacaatgctttttttaatttaattttttatttttttaaactaagatacaggcaggacaatttgtattaaataaaatattatatttgtatatgttaaccagataaaattaaatttatccacttgtaattgctcactctaacctgaaacctgtgttctcaaatgtggtatggaggaagaaaatctggtattctgtgtgatgattttgatgagggtaagattgcaatcgtgtaaatattcttcaaggtaattggtgagaatgagaattcaatttgtgtattggattttttgagtaacagtctgggtatccacacaaaaaatatgggggcaagccaaaaatattgatggagcagttttgtgagtattgaaactggatacggttgcaatatgaatacatcaccaattttggcacctatgtgcatcataaagatgtaatcgctcattgttccatattcttggtaccaggggcgggggtagttagatttcataactcagttgatttgtcactttctagagaactaaaaccacccagttgtcctatgcatatcattggtaggtggctattaacctttttgaagtttgcaaacatttttctttcaagagacatcaagcaatgagagttaaattctacttcgagctgccttcaattgatacattctacatatttgtaaatattatgcaagcattagttattagagttgttattctggccatgaaaaataccgttggaatcgagacaatttttgttgtctactattctatgaagcacggacacttccgtcccttcccgtgtccgggtgtccgtgtcagtgtcgacaccgacaccgatgccggtacgatgccctacgacgtcctatattttggacattacaagtgttcacgtgtccatgtccgtgtcagtgtcagtgtttcttgtctactattagacaattttaccaagtacaattttctgtagcagggaaaaaaatgcctctcaaagttctgacccatttaattaaatcaaatcactaactggaatcgcctgttctgttctaaatatgcagaaatttgaactcaagcaaaataccatccttcttca

SEQ ID NO: 2606 - DNA, 3093 bp, Glycine max
  Intron number 1 from transcript Glyma13g25320.1 (locus Gly ma13g25320) derived from phytozome v7.0 (chr-ID Gm13; pos 28578066 to 28581158)
gcttttccggcaaactcgctcacgcttcccctaaagtaagtaaataatgataatatcattaaaaaaaagtgattttccctcgttccaaggttaaagcctctaccttttcgtgccaaaagttgttttttttccttgctgtggcgtgtttggagcgttttatcatttttattttgatttaatttaatttaattgctctcggaatgctggatcttgggcgtttctgtaaattactagtctttttgttatgttttttaataaacttcttctggggtgtttttatttaatttcatagtgtttttgtgtttgtgcttatcatcccaatcaccaccatcttctatatttacttgatcattctcagaatttgaatttggatattcaatgttggaattcccaacaattttgaccttccattagaggttttcacagtgactcttctcttctctcttttttcaattgtcaaacgtttatgcattttctttggtatagatatgtactaatagtttgctactttgctgtggtggttaatcttaaattcttaatccgtaacttcccttctgtaaaaaatctgaatttagcacagacaaacccaacttttttttttcttaatggaaagtgaatttaatagctttaagctaaccccaccatttttttattttgatttcatgctgcatttgcacgttgtgtcaattatcttggttatgatttgtgattgaactgtattgtcttgtaagttttatgaggagatggtcctccatggaagctttctactcaacacttggtcccttgccacgagtccttgtaaataaatctttgtgattaaagttgagacttgagacccacacattatccttgttgttcatccgctccggcaccttcaaaatctttgatgaaaccgtgtgtggcttgtgtttgtggtctcagacagttggtcaaagtttaaatgctagtcttgtatgctacaatagagaaattaagtaaccacatggtatattgtattttattctacatatatatcttcttggcttataccaactttaataatattttagttcttttaatgtagtgtagtgtagcatcctatgatgaaccagtaccatgtaacaattgtgttgtctgccttgtgccattccttcggtggaacatgcctggcccacctacttatccaatctcagttggctagtagggcacaactttttgattaggacactgtctctacattaatggatttgtttctttcaccttttatcaaaactatttaatttaatgattctctagtatttggccaatgaggttttggagagaaaagctccctcatcaacaaattcaaatttttttattttgaaaggaactaatacagaatttaatactagcttacttttttggcattttcatcaacttaggtggatctcagtgtaatgtgttaatggaatatagattgcagaatatggactttggtgaaaatgctccacgcactttggcttctgacatggagtttcttttttattgtttatattaatgactaatgatattagtcagagaccgtgttggaattttctttatataaaagctagcttaacatttctgtaacaaaccatacctagaaggaaattggattagatatgaatcaatctcccagaaaggtagaaatatagcatgtgattgttgaattgttaatctagtagtcttagtagcaagtgatctgaaacactcaaatgcccggttaaaaaatcaaaatagtttatatatgttttgttatgaacccactccatcataatttctaatataatcttattgcgtgtgatttttcataaaaaaaaatcttttgtctattgattctttaacaattgtcttttctgtatttattaccaaggtactttaccaagtaccatgctttgttttctgtggatccatatgtctcgtctgtgtgtttatattattgtcaaatatatgatatgaatgtatttattttttgtcactttatttcatttaatcttatacagaaatgagccactagaagtctaggaaaagattctgtgtaacctagtgaatcttatacagttggatttaatcactttgatgactgatgtgatatatttcactagctagatcttagtttacaagtttagcataggatgcaaataacttcacagtaaaattctgttcaacaatagtcaatttgggtggctctagggtgttttacctacttatcttagcgacttttttctataaaaaatttgtgaatggcaccgaccaattcactgaccaatagatccatacctgccttgctttgtctgatattgtgtggaatgttatctttaactgagcatttttttttacgttgaaaagccgtcataatcaactaacctgatcgaatcttcagctaaaaattggtgataatacaattattaatcaattgctttctcctttctgatatgttactgtcttctatttttcttgaccagctcctcttggtgaatttgctttttgtgctgaaaagtcaaactacaaaatagtaatgcagctattgcattactatgtctagatgcataatgtgtatgaacaccacctagatgattgcatactctaaatagcctaccctgaatgattccacatgttcatttatagtacattttattctattatgatgctaaaagttatgcttttaaaggggtgtttggaagagtttatacataatctatttgaacttataaaaataacttatgactcataagttcttcttagcttattttattaagcttcttgttataccgcgttaagaaagctctttttaacttattcaataaagtttatggttgaaataatgacataagctatcatgtaataagagtttattgcataaaccacatccttagacatagagcaaccaaagaagcatttgttgctttcctctgaaagtttacagtggacaacggtttgatttctggtccacttttggtataacaagtttcttcaatcatcttacacatactgaatcccagaatttgactaatctattgcaggagataacttcatttttgtaataattatatatgaatttcatcctctctttattttttcttctaacttttgcag

SEQ ID NO: 2607 - DNA, 1566 bp, Glycine max
  Intron number 1 from transcript Glyma03g04390.1 (locus Gly ma03g04390) derived from phytozome v7.0 (chr-ID Gm03; pos 4508433 to 4509998)
ggtaactcaattctcactttctatgactaattcaaacctttattttgctaacaaattttaagttctctctgtctatatatatatgttctaacaaacattttatgtacatgtactttaactctaacaggtctacaaaacgcattttaactattctatctaaaattaattataatctcaaataatcttgatttttttaattagtggttattattgtactttttttctctctaattgctcactttagaagactcaaatccctattaaacaagagtcacgatgaggatacaaactaagaaaccattaatacactattaattagtatttctaatttttttttttttgctgaattttagtatttctaattaactacttccaaaaacatgtattaaataatatgtatgtttataatgtaatgacattgcttttatccaaatatcgaatatgaaattgagtatctatttttcgaataagattaaattttgtgtattttatatatttacacaattgaatccttgaatatttaatataatgtataatgctgatttattttattttaaatcatatattcaggttatatttagtctaactattctcttaatttaaaaattatttttaaataaaaaatggtatgagagaagaaggagagaagagagagctagcctacaacagtgaagaccgaagggaaagagtgagagtaagagtgagagaacgcgaagtgggtagaaagaaaagaagccaaccttttttaaaatgttatttcacctaacttttttttataaaaaaaagctatttgtttggttttaattttcttctgcttaatttgttaaatacttccaatttttatttttgtaatttttgtttgaatcaacttctcttttgaagatggtaaacaaatattaagtcaaataataccttaattctattttcattaatttaaacaaatatatatatatatatatatatatatatatatatatatatatatatatatacacacacacttattctctttatctcttcttttttttttctcatggcatcactcattacacctctcactttctctctcaactttttattgtatattttgattaaattaaaatatttcaaaaggttaaaatcttataataattatataatactatttatgttttaatgatcattaattagttttatttcctgttttaatgtgtattaattatcatattttattatctattttagtatagtattaattagcttttatttctaattaattatagcctttttataaaaggagattcaatcggtcatgagtgaaatatctctctatcagagccttcgttttctgtatgagttcctgtgttagtctcacaaagaaatcctaatcacttgtcagttcctgagaactgtaaaattatacatgtctcaggctatatagatagtagttagtgaataatttgttcatgacccatgatcatatttggagattttgagcactagggacaacactttttttctttaacttttttctattttaccttgtacactaattaactacatgcatgtgatgtgaaaagggggagc

SEQ ID NO: 2608 - DNA, 1392 bp, Glycine max
  Intron number 13 from transcript Glyma13g37690.2 (locus Gl yma13g37690) derived from phytozome v7.0 (chr-ID Gm13; pos 38699576 to 38700967)
aagcttttagaaaggtagtagttgattcttgatatgcctgcatgttttttggctggacaataattcttggtgcatacctgttttcttcaattttatttataaagttatggtagcttgtgtatatgaaattctatgaagcacatattatttcttttacagttaaattcaacaaaaaatgcaggaaataaaggatgtgctttgagggcagagtggagggtccagatccatgtttgtttgtgttgattagttttgtagttttttgagatttttagaatttagttatcataataaattattcaagagaaaactttagatttctaaaatgaggagaccctttgtgtctacaaagtttgaagatgacaggattaatatatgaattattagccatctaggttcagtggtgatgactccatccctctgccttgatctggtattgcagcttttcaatttcacatctattacatgtgttagtcaggttcttttagggagttaattacttctgggaattacaaaatgaagaagaacacttacaagagaaatcacaggaagtacactcatactggtttcattttgcagaatgtgttacatttaatgaacaataaaaaaagatgtagtttcttgttatgaattatgatgtgtacgggctagagtccattgtcagcaatgtaaatcaaaattaattttacaccagtgattaactttttataagatcgtaaatctacttgggattgaaaatttgtctcatggtcataaaactttttatgaagtctagatcttctgtactacatcaatatatataagctgtcaaatgctatttatttgtgagtagaacttactaattttgcctttcaacatgataagcacacaagcacttgaggaaccctcccttataagatagttgtcaagagggggagaattgagcatcccatattactcgatgtgggactttgggaccccataataccctagttctatcatagcactgctcctgagagtcaatgtcccagtggcttcactctgatgtattgatgtgtcactcggtctttctgatcagtccctccattggcaaccaactctgatacctattgataagcatccaaacacttaaaaaaccctcccttaaaactagttgtcaagggggagaaccaaaccacttaagcactccattgagtatcccatactactcgatgtgggacttacgcaccccataatacccaagtccctagcacaataacataatattattgtttatcatatcaatccaaacagaagtagcactccaatttacttagaggtttatttccttgtgatttataagtttgaccagagctagtaatatatcatacagccattaatcttatataattttgctttttgcaattttcaacagtt

SEQ ID NO: 2609 - DNA, 7538 bp, Glycine max
  Intron number 1 from transcript Glyma16g12090.1 (locus Gly ma16g12090) derived from phytozome v7.0 (chr-ID Gm16; pos 12706651 to 12714188)
gagtggattgactttgcagttacctcgccacacaggtaaaaaacttatgaatatttgctttcaagttgcacttgcatgaaacataagttgaatatagttcatataatatatttggaagcataaatttaatcaagaaagaaaaaaaaaaaaaacactctgtgccacaatatatactatcctcacaccccttgctaccggtccccgcctttacaaaagttaaactcgttacttgaataggttgttttagtgcatggctatattttgtagttaaaattgttgtgattgtatttcaatgcagatccaaccgatgaaagcaaaataaatataaaagcaagagtcttaatttcgttggtaaaattacttttggccaacgaaactggaatccaaactctgagtttgcaaaaataattcaaatcttacttttataaaattagtttttcacgtaaaattttcatatccaaacgtactttgataatcaaaatacatcaccaaaatgaatttattcttcaaattgaatttgaggttctccaaagataaaatcaaacatagctttagttgtcttgagataacaattttttgaattaatcatttgttcagaaacttttccaggggactagcacaaccactttttttttttcaacttggaactcacctaaaccttttcaagagagaattctgcaacggacgaatagaatatcaaagtgtcgagtcgttcatatcattatctactgtgtttatattaataattagtttagatctatgcttaatggtataacttgagaacccgacacaattattaaaattagacatttatcattagttgaaaacgccctaaagaaatagttgaacagaatatcggtctgggtcacttgtccagatgattaagaaaattgatagactagataattagtcaaaataggacagaatgagtgagaaaaacctgtttgaatcggtcatttaaaaaaatattaattttaaaatgtttttaaatacacaatttttttatttttatattaaccaaaaatattttattaaaatagagtatataaataacaaccatcagtttaataacaaaagttcacacatgttatctacatataaattattatttaactatttatgttgagtttttcatcttgtaaaatatgtaacaccactatatacatttaaaatataattcaacataacttttttcataattttattttaatttatattacataatacttaaaatatatattttattattaccggtttgatctcaattatttttttataagccaaagatatgttattgctgaactcagcacaaggaatgctgtggttaaaaatccagtgacacattacccaaagtccaacgattatagagataaaaaaaaaaacaaaaaaagaagaaaacgtggcgtatagttcaccaccacctacataacataaactctcaaagcaaaaatctcgcagaatacaaactataaaacataaaacatacaaaataaagggaatcctactgtcccatctctgttaatatattgcaaaattaactcttcctcattgccttcattgcttattgcccaacattctaacgagtgccgacacgaacaagagtacaaggactagagagaacaatgcaatcccttcaagcacaaaaggattaaggattaagaatattttcattttgtttatcaaccataaccagatcaaaatttaatcatctccgaaaaatactcaaagttaggttcctcatctttaaaaataatgttatttctatgtatatagatgaagaccaaagagaagcaaaccaaacaaacaacactcaggttaatttgatgtcaatttaatatcgtgattaaattaacaaaccataaataagtgagaagaaaattgaaacatgatgctttatatatacatggcacaacaattcaaagacagttctaattttaggcatcattgcatcaatcgcagaaacaaaatagttacaaaattgacacaaactaattttggaaagatacatattggctgcctatggataatagttgcacatgatatgtatccatcttgtggactaattttttgtgtggtttggtcgggttacccgaatcttgtggtataatcttgttttcgttttttattaataaaactattttgcgtttcccaaaaaaaatcgcagacacaaaaatgagttggtatttatcacacttttatgctatttaagtctagcacaaaatttgaaaaataaaaaattatagtattccagctaagaagtaattgatagtttataaataactctcggagcaatatttaatgcatataagcgtgcagcagcaattcctctgaaaaataaacattttgatatgtccgtactccattattttctaatgcactagaaattgatagcaattcctcttctttatgaacggccaagttgatgaaccaagccaggctgtgtatttgacgttcatacattggacctttttctttcgacttttcttttatatagttagccatcattttcagtattagacaattatacagatgcccaattattagggttagaaatacggatttcagcctcagcattggccacgagacctataaagttgcagccttgtctaaagaaaactggcccatttaattatgggtctgttagaggttgacactctcttaactccactcataaatgaattgagtctataaattcgtgagtcaatccgtttattattttattaagattaagatcagagcataacaaaatcatccaacacccacccacttaaacctgtatgagtctctaccaacagaccctgctaattacaaccccacatgcatgatagatgctgccaaattacacgagatagaaaataccaacacaaataaccaaaaccaccatctactcaaatataagaaaattcaaaattcgcatgcaaatcgacttgtttacttcaaaaaatcttacttgtgttttttttgtctctaaagtttggagtgaaattagttttgatccttcaaattaaaaataaataaaaaattaatcctcaaatttgtaaaagtaaatttttagtcccaaaacattaaatttgagggactaaaatatacttttttcaaaaccattttcataattaagtatctttgttttgaaaattgggtggtaaaatattcatttttaaaaaactgggtgaaaattgaaaaaaaaagatgggtagtaaaattggcaaattttcaaaaattaaataataaaatgtgcaaatttaataatttggtagcttcttaagaaaataaaaaaaatggtggcaaaattcacaaatacgtaaaagatgagtggcaaaaagtgaaagcccaagttataaacttatttgaatgtagttttcataccatgaatcaaatgggttgtgaagttagaaacatcaacttcgtcaagtttatatatataatttattaacgtaaatacacttgttttttaagtatgaggctggtagtaaattatatcattgatacatttatagagaatttatagttataatttgttatcgatgcatactaaaaataaatgtgtgtacgttagtaaacctaacaaatatttattaatatatacatacttatattttagtatgattgtattaataagctagattatttaaaaaagtgtactaaaaaataagtgtggcaaagccataactataaagatttaaatagaatattttcccaaattgttaaatactcaatcaactattgaagtatttctaacatattctaaaagttttacgttgacaactttataaccatttagatataattttattattattattattattattattattattttcaatccaacagacaatggcacatattgtaatgagatgttagtttcattttcattgtaatttttttatttgtgagtaaccatgttgtttggtacaaagtatgtataacttttgttaatataattaattttcattaagaaattcaattgataatgtttagtgaaatctctaattgtaatgacatttttttttctatttacgaaaactcaaacataagaccatctttaaagaatctgaacactgttgcacatgaactaatgctttgttgtatttttattatagtatatataactctcaatacataaaacacgacactattatttgccattagtttttctttttctttttaatatctccgttaacagccatttacagatgttaagagtgaaaaaaaagatgaaaaaagtgtcataaactcgataatattacataaattatctagtcattcataaatctagtgaaacaagtcaaaggtctcagttactctaaaccatatcaaataaataaaaatgtgagttttgtttacgaacttctgggtatttaatatatgaaatattaaatattatgaatatattatttataagtattgaaaatagttattaaaatttttgtaattttcataaataaataatttttttcttaactatttttaacttatttttgtgaataactaagcagcaagtcccatcatgtgagtacaagaaactctaatatttttctgaaatatatatatatatatatatatatatatatatatatatatatatatatatataacttttatctgttaaatatgacccttccactcgacaccgtctaaggctgactttcattcttgctctgacgagaagatcttgaagttaagttctcttctatctttgcactcgaggaccaatttttgtttggcctgagaaaacctttgcatgcatttgttaccctttgggaggcctatgtcccataaaaactatctaccttagattgtttcttggtctgtagatcctgacacaaagttaaaattctaattcttttggtatctcacttatggttatgaccccactagaaggaggccttccttgccctttttttctagtaagaaattgtcaaaaattcaagaaggtactgtaatttataaaaaaggaaaaaaacaaatagatgttaaaagaaatccgtaaagagtacgaattaaacaaaagcaaaaaaaatccaacaataaagatcatttttcttatatttttacaaaaaaagagaagaatttatacaaattgacgaggagaaacttaaattaggatttgctcaaaaacttttcttaaacattcttttcaattataaacaatggaatttttcatttcaatatataaaaaataatcgattggaaaatattgtaaaaaataaatttcatattcttttcatacatgtcaaaatgatgaaaaataaagaatatcttttatgtatccacaaaaaatttatcagcttttcacaagatgatggaatcccaattttatctcttcacaagagataaaatttcctatgatgaattgtctaattattagagatatacaaataaagaaaaaagaaacaaattgagcaatgaatttttgaatagaacaaaagttatggataagaaattcatttctctagaaaaccaaatttgattgtccaatgatgaaattaaaacaaaatatttaactaaaatatatgatcgagtcctgattggacgcttttgtggataaatctaaaatgatttttcaatctcaatccaacctggaaaaaaaatttaaaataatcccatttggataaataaaattcttgatattcctatttctaataatacttataaaaataataatagtaattattcagaattagagaaaaaaaaatatttgatagaaaatccttagtaagtacactatttaatctaatcaataaattttcaaaaacaatagtatcaagcttgagctttgagacactctctttatttccacaacatgcacaagtcaaaattaattatgaagatgaagaagaaaagaaacaaataataaaagtattatttaatgcaattagaattgatttgaacgaaaaaacaatagtaaatcaaaatagaactaaatgtattagaataaacgaaaaatagttcctcgatgatcatacaaatttattgatgaattgggtcaaccagatggaaaaaaaatctttataattgcattaagttttaacttgctgatagcttaaagtcttttaataaggttattatattttaaactttataattaagttcccagaaattaaaattgttatggtttttaggcaaaattatatttttggtttccagtttatctccaccagtttcgaatttagtctcccattaatttaattcacgaattgagtcctcctattttgtaaaatcgtgcaatgctagtcccctaggccacaattgaacattgactgagtgacgttgattgtcacgtgtcacatattggatgatgactgtcacatgccatattctgattggatgtaaacttcatggaagatgaaatgcattgttattttcattgaccaatcagaacatgacacgtgacagttatcattcaataagaacgtgacacgtgatagtcaacattcatttgtaaccgttaacgtccaattgtgacctaggggaccaacattgcacgattttacaaaataggaggacccaattcgtgaattaaattactgggggaccaaatccgaaattgaagataaacttggggaccaaatttgcctaatttttaaggtaaaatataatcgaattaaattgaaaatacaaattataatatcttcgatcatcattattcttgattttacgctggagttatcattagaccattctaataattggtttcgagttctttaaatttaagttaagccagattttttcatttggcccctaacaaattgcagtgaatattttgtaccccaatcaagcatatataaattatatacatctcaacggagtctcaatgacactacctaacaaaaatgaatgcattcttagtttccttactcacttcgcctcgccaattactcactatgaaaagttttgtttataaaaaaaatactaattcatgaaaagaaaatatacatttttttccttgtattcatgttcactatttatttaaaagactgaattacagttatagttcccttaaaaaaaatatgtaatttcaatttaattttcaatgttgcgtatattttatttttattcaatagaatgatagatcttaaagtatcataaaaaattatttaattaattgaaatataaaaaataaacatatgaaaaacaatagaaacactaaaaatagagataaaaagttaaaggagaactaaaattaaaatccagcccagttagaaaatcatatactagttcatattcattgatataattatgtcaactctacattagtaagcgtacctccaataaagtgtagcaagaatggatcatcacgcccaaatcaatgttgggttgagaggtcacctaagaccaatacgagtttgctaagatattctgtctgcacccataatgctccttatgcccgaagtagtgatttatttgtaacctattcacaccaccatgtaatgtgtatgtcagagattgcattgcagaatattccacaattcgagactttttactataaaaattagtaaacttggtcttatatgattgtgaaggaacaagaaatt

SEQ ID NO: 2610 - DNA, 4405 bp, Glycine max
  Intron number 1 from transcript Glyma08g44610.2 (locus Gly ma08g44610) derived from phytozome v7.0 (chr-ID Gm08; pos 44169948 to 44174352)
tctgccaacgacaccgtttccggcactttcagcgtgtaagtaacccctctacctgccatttgcttcatatgtgtgcaatattggagtgatgtgaaaagcatcgatggttctatttatcatattttttagtagctattaatttgttatgtagagaaaatgacatcctgtttgtttggttctgtcgagtgaaaccccagatccgtgcctgtgaagcttcgggcaggaaatattggtcacatgttaggcctgtttagattaacttctctggaaatacttataagagaaggaaataagaaggtaaagtagattagtaaattaaaccaatcaatttaaagggtaaagtaagtaattcctttagttattatttttagtctaatagtataatttagctttgctgtatagctttgtcacacaacttatcaaatgtattcagagcttgctgagatgcaggtctattccatgtatacctgctggatcaactggctgcccgttggtgattctttttttcaggaaaatgtctcatttccggtttcttcccccctcccccagtgctgtgtcctcattctgatgttcataccctgtttccagccgctaccaatgctccactattgtcatttgatcccccccccccccttcaatgtataggcagccaacatctttatttcaaccacaagttgttttcacactggacccacctccagtggaaatgttatgcactaccacaagttggtgacatatcgctctacatgtattctcctcattactcattatcctctatttggatctctggtcctctcttccatttgacctctacttggatgtgtccctttgaaaggtgctttttggttttttgttacattgtcttccccactacccattgtggcccttggctggatatgcaacgtcagctgcttccaaagacattctgagactaagccccctattctcagtctatgtcattgtactctccactggcaagttggatgggagcaactacgatacataggcttttgcatatcaaaccttggcttattgaccaatgctggctctatggctattagcaagcactctacatgacctaaaatcgatacccatatatgtagcattatcaaatccaccattaatctatcctttgagcatatttttcacactcatgtgagtcgttggaagcatgccaaggttctttaagccaacaacacctagtgtctccttagaatgcattagtttgtaccttgaagtacgttaaatgagcttcaagatagttaattatctatgaggatgatggtcatactcagatcattggatactcaaatgctgattgtgttggttctcttggtgattaggaatttaggatatacattgttggatattgtgtattccttggagataatttaatatcttggaaaattaaaaaacataatgccttcacaatggaaagttttggagtagatatatcaagtcataacatcaactacttgtgaattcatttggctcaatcaattacttcttggaattagatttggagaggtcagctagatgacactcatgttacttgatgtggaacttaggcaccccattatacccaagttcctatcaatagcattttatatgtaaaatgtccaattttattcttttaacttactttacactctactttcaaagttttcacaacaggatttacaaaaaatattagttgttaaccaaacataacttttaaagtacgcaagaacgtcattcctatcattatattcacggaaagaaagtagataacttgaaacaaatgcgtccttttgttttccagatatcaatgtagacgaaggctatggtggactagttttacaaatgatcttctgtggaccacttttagacattgttggatttatctcatgcacacagtaatccagtgcaccatcagcaccatatattttcttctcctttttctgtctcccttacctcttgttctccgatgggtgcacctactgttcccaacaaagacaacttcagccacattgtctcatcatcaacaacattaacatcatggtgttttcagcattacaaacaaaaattaagaaacacgttgtttcaaacatcacaaacaaaaaaagccacataaagaaccactaaatcataccacattttcagaaagaatgactaaaaaaagagaagttcattaaaaaaaatacaaatgatagcaaatctgaatgcctctacatcccattccctcttttctggcgtcggttcctcggaagagctttgttccaatgatgtacttgtcattgtcgataaccaccgccttctttgatttcgcacttccacctcgctgtacgcgttcttgtcatcccttgccgtcagctttttcctttcgctagttggagtgcaagcgatgccgcgatcaaatcacagaactgcggaattgaaagggaaatctaagaaaaagattgattcgcccaaattctgcaccagtggaaaacaaagtgcgagattctggggaatcgtaagtgaatctgacagcgactcatagaatctgcaatgaaaggaaaaggaaaacgcaccttgcaactatggtgaagagtagcgagaaaagaagggttcaaaaatgaaagaacggcggtgaaagaatggaaagggagaaaaaaaagtgacaccgccaccggaaatcacctccgacagcagcgtacggcggagacggactgtggagaagtcgggaaagagatctggtatgtaagatgtagtatattaccgtgaacctaagatgaatccaagggattgaaaaagtgggccaccgtaaatcacctataaaggtggtccacggtagacgtggtcatcaatgtaattatatacatttacatatgcatgatctttttgacttttctctctcatgtcatgaacttcactctgagatcatgttaatttacaaggttgagtcttggtgtcagtaactttttgctgtcattatgtgaattaatgtaaagactgataacaagtttctgatgcaattgtatatgggaaaattgtctgttttgtctcccttatctgcatgtaacaatggggctgggttggaagtaggtttagctagactagccgactatgctttgtagggcctaagccttctagcctttttagaacttagaagcttagcttagcctgaaagcttacatataaatgtactttgttgcaagactcttgtatgggtaaaaaaaattctttttaagttttaaataggttaatggacctaaatttataagtaggccagctgactttggcctttacatatatcaataagtgtataatctcaatattacagtaaaaatttgataacacattatttgtttaaggatgccagcccaagtttatcaaagtgagattgaaatcttgaatagcttagctaattttttaattgtgaatcatttgtatttattcataagattcaaaaacacgaaaaataacctcaaatatatcacaaatggtatatagtgttcaatgtaataattttgaactggaaatggataaaacaacttaaccataaatctcataaaacaaaattgttagttatgggcttaggccccatacatgtacaaaaaagaaaaaaacaatattattagttatatatgagtttgtgaatcctctattttagaagaatggaaactaaacaatgaaataaccaaagagtgcatgcattgaattagtgtagtagtggaataatcaaaggataaggtcagaattgctccttcaattccttttaatttgatggtttaagctcatatgacttttcaatttctttcattagaattaattggtgaaagaaaagtaaaaaaaaatgaaaaaataatgaagtgttgaatcatgtgatttgtatcaatgatatgaaattgtacctattcattcatgtattgtaagattcaaagtcatttgagatttgttttatgatacaaaccaatgtagccgaatcataggattcaaatcatgaataagattttaataattgtgtgtcagcatgttaggcctgaaatgctttttaactaaatagactattaaaatagtcttagccaaaaagatttgtttgataagtaagcttaattggcttaggcatgatgtggtttagagtataggtctccgatgagtgactttatttccactcctatcgagatgagttgtttttttatctttggtttcttttgttgatggtataaaatgcagtaggaaaaacagaccgtgtgtttcaatttgccctttttttttaaatggattttctatatccttatgaaagaacatgctggcacttggccagaaagccttttataacaaatactaataattttacctgaacttatgtcctcaagtagttatgcagtttgtttcttattgtttagggtttctaaaggtgtgagagatctacctggcaact

SEQ ID NO: 2611 - DNA, 1500 bp, Glycine max
  Intron number 6 from transcript Glyma05g05190.1 (locus Gly ma05g05190) derived from phytozome v7.0 (chr-ID Gm05; pos 4486247 to 4487746 reverse strand)
ctcattcagtagccgccactgctggtgatacagtggtacttttatttattaaatttaaagcaacagtaaattgggggaggggttatgatgtgatgtattagtgaaacagataactgatgtagtgatgaaaggtttagtttggctttcttatcttgaaaatctggttagttatttgttgttatcattattctttggatatgataaactgatacttaagcagggtcttttatataaaatagtttttatttgtaggttctcttatggtgagtaatcctgggatttagatttggccttttagactagagatttgaaccaatgttcaaatttaagttgttatgcaactgagttttacaaagaagtttctttgaaaacatatcacaaacaaatgaccatttaacttcgcaggagatataaaattatgagaagataccaacccattggtgtcaaaccctgcttcctacttggatttttcttcattgaagttgtatgacttacacacaggaatttacttttatgagccaaagtaggagtagctgcaattctaaaaaaattcaatttcaaagtgatttacataagttggtagtaatatagcaaattcagtccataatgtgagtagcctcatgttttcagggccaatatttggaccattttttggtgactagctttaatgagtttggtataaataaagaagctaaatactgtatttgatgcatttggttaaagcttaatgaccctattttttgaggtttctttggtttagtagtttattcagttattgggataaaattaggcaattggcttctattgcgtgtgaagaacatggtttttttaagggggttttcattttcttaacagatatatggagggattggggagctttgcaactatgatgttctctctttttcttttgttttttttttttttttctattatggaggatctcttaacctccaaatttctttgtaatattcttctcttcatcttaatgattttcttggggcaagtgctagtgcaacagtaaggtttctgccttatgatgtggaggttatgggttcaaatcttggaaacattcttttcacttgtgtggttaaggctacatacagttatcctccccaaaccccattaggtgggagccttatgcactgggcggcattttttttatcctaatgaaagttatttttcattatatgaagtgaaaaattatcatcgtctctctctctctttcttctttctgtatctcactacattgataatgttgtatatgctgactttaacaagctggaaatgtaaattacttaggttttaggagatataactttctaagtgttctcatgtattaatgttgttatattgtgaggcaaaacttggatagtattgtaaacatagataacaaccccctacccctgcaacaacaaaattgcttgtttcaattttcaaattgtttccttttatccttacatttttttttgtttaaaatatttataatgcaggcatcagata

SEQ ID NO: 2612 - DNA, 2448 bp, Glycine max
  Intron number 6 from transcript Glyma17g35450.1 (locus Gly ma17g35450) derived from phytozome v7.0 (chr-ID Gm17; pos 39424833 to 39427280 reverse strand)
cctattgtcaccaaaggtatgtgtttcttttgcctaacctggttttacagatgttgaatctcaattatacttgcgatgaagacatggtacaaaagtgttgttttatttttctagattactttttcctgcctttgtatctcctagctacattatgattatgaaaaaaaagtgattttgttatataatgtaagtctagtctttccaagtgtccagaaaagaaaagtttagaaggtttgatgtttatataataagcatttagtaatcactgcaagcaagtcctgcttcttaaaatttctgagctagctatattgctgatggttccaaacttaaagttccttggcttcctgtccttggttgttctgttaaactaatgaacttaaccgcacagtgcctataatatattctggagaattgtcccagagaagactatttttttttaccaaatgccacatggtgataccaagaatggtactgaatatcatggaacctaaaatttgagcaactttccaattcaaaaccctgtactcagaatttcacccttcaaattgacttgctggtgtgactgtgtgagcgtatccatgtatgcaccttttgaatagaaatccatattttgaaaaatcccaacttttcatgcgttggtgggtctttgagatcctttcaatgacctatgttgtgttcgggggatttctatatgattcgatcaattgtgtgaatagtgctgtagcaatgaaagtggatatagtaatactgaaaagacagttctatttttattctattagtatattttatcaatattaagttcagccatatgtaattgaatgatagtgcaaaaaatttcaattttcagtgcattttaattatattcatataaaaatcatgtgagatatttgatgtgatgcagaatgaacaatattttcacaattatgtttttaaagttccagttcagatagtacactaagaattggtgttttgttatgctgtttatcattattctttgtttttagcctatatatagagtgtggcttttcagtcaagaacaaaagtggtcatggatgtgatggagaaaataaggaaatagagaatatcagtggtgaagtgaatgcatttattatattttttaaattctttattcatattttcatccaagaatgttgatgtgaataacatatttttaaaccccgtgatttgtatatgtaataagcaattgaagtaaggtgttttggatcttttgtggaaaataaatgctgagtaaaaattgtttgttaccgctttattgaactattaaacaattgctccttcacggcctccattttttttccagacattaatcttcaatttgaaatagtagtttaaaaatgcagagtttactgaataatagataggtattaatttgggaggaaagcattattacattcagcaatctgatgaattgattattggcaatccattttttttacattttgttcctcaattgtgagaagagagcaatatatctatcatggtaggtttgtgatgcagagtaaactgagtggtatgattgaaatatagagtaaataggaatcaatttaggaagaaaacaactaaaatccagtaatctaatgagttgattattggcttgaatctgggtacaaacatggatctctttatatgcctattttttcttctcttgtatgcctcgtcaatccatgttagtcgaggagttcacagataattaatatttagactatccaagacactaatagagtagagcataattcattttatgtaaatcgttctgcttttgatattaggttattcaattctttctgtcaaaaacttctaaaagtaaaacaaggtgacggaaaaggagatgagaggattgtaatattgttactttgttaggtcttaaaagttcaaaattttaaaattaggtgagaaactcgaagaccatttggctttaaattttaaacaagataaatatggctgattttctctttatctttgcatgtgttattttattttattatcattttgctgatgtgtggtttgtattatatatgctgctaatgctttggtggggaaaaaggcataattgatttgtttaggctaactcgttgaaatgctctgtacccctcctgcttttgaaatttttctgctcacatgtatttattttcgttgtcaactaactttatttgcttcacaccacatgtctacttcattttctgttaattatatggaggtgatttaacagaaaagtataattgtggcagtataattcacatggtttgtttttttaatttctttctttctgtaaggtcaggacttagtacatttatttgtttttttggatatcaagcaaaagtagttactattggtcagagagttatgtagcaattagcatgccaatatgtctgaattcatttgcaattgataggttgggcaattaaattcgctggttgttgaagttgc

SEQ ID NO: 2613 - DNA, 1712 bp, Glycine max; identical to SEQ ID NO: 2390
  Intron number 1 from transcript Glyma06g07210.2 (locus Gly ma06g07210) derived from phytozome v7.0 (chr-ID Gm06; pos 5249181 to 5250892 reverse strand)

SEQ ID NO: 2614 - DNA, 958 bp, Glycine max
  Intron number 6 from transcript Glyma13g09390.1 (locus Gly ma13g09390) derived from phytozome v7.0 (chr-ID Gm13; pos 10679605 to 10680562)
ccttggatcctaaaaatcctgaggtgatgcaatttttttatgttgttgttgtccttgtctactctctggctatcttcattctggaacttttattctgttattattgtttatgaaaatatatgtttgaattttgaagttgatgcatttagtatgtgacagaaactagatcgtatctcaaagagagatctgtatatatactgtatttattcactgcagctactgatatcagtgtgatatcaattactcaattagtaatcagtatgatggatttacagtggaattgacttaaatttaaaaatcccagggaatgagttgtcctgtactccgtactctatataattatttcctataagctctcttccctcttcactctattacacaattagaatacataacagaacttccctaccaaaccaactcttaaagctagtggtaatcagttgacagtagtgacattccacttaccattttgtgtgtttaatcctttaaatctagcagacaccttgatgttgattagtggtttcctaaatgtatgcatgatgtaatattatgctacttgtgtattactgtattactgtggagtttgaaagattggatatgtgatgtatcccagtttagcaaattgaaataagcccctaatggcatgattgatcatcaaagccaacccccacatatgaatgatgatttgttgcagttgctgaaattgaaaataaacaagttaatgttagagtattagccagattctaattataagtgtttaggaagtttgcatctttcaaattttggattactataaaatgtctgttaggtgagaatgttacgagcttcaaattttgcatgctttgacttttgtccagcgcaaagcagttatggcaagtagtcaatactaatttgtttattaatattctggacaaaatatgcaggttgagaaccaggaggtgattgctgaacttgttga

SEQ ID NO: 2615 - DNA, 1025 bp, Glycine max
  Intron number 1 from transcript Glyma14g02720.1 (locus Gly ma14g02720) derived from phytozome v7.0 (chr-ID Gm14; pos 1718031 to 1719055)
gccggaaggggttggaacataaggtaggtaacttgggctactcttcttacactctgggtctgggcctaactcagtcgcaaaaactcgtttttgctgtgagggttttcctctgcttatatacacttttgtctatgacactggtcaatttgggatctcaaacgtttacccttttgtttttttctttctttctgttgtttgagatccctagtttttcttcgttcccgtgtgagggttgttgcatcttgcatgtgtttgttgtttttgatttaaatgtgattttgcagctacatgctactaggttacttcatctactgtattgtaggccacccctcacggaggaaaaagaattaatagtttattgttggggtttatttatttttatatgatgattttgtggttgcttgattttgaatcgtgggtcttcagattctatccatggttccttgtcattattgttcactttcatgttttggtgttagagttagggattagccgattaggctttctatgaaattaaaaatagctgtcttttgaagatacaaatgcttttgtttttttagtttgctcgcgagtgatgtagttctagtggaggactaattattagtctttgtaatgattggagaaatgagttgagtaggttttgtctgtgtaaataattatcgttatgttgaagatttcttccctaaacgcaaacttttgttcggagaaaggaagaatcagttgcttccgttcgtgcttcattaaatcatatccatccagattgcattaaatattccgtcttgtttggcagaatgtcaaacaaacatgctgtgtagtaatattggcttgtatgaactcattcttttgtgcttttttgaaagtaagttgggactttagttgggtcttccttttatatgagattctgttatttgttatctgtacatttattattgtcttcgtttgtagatcaatgtagctggtttacaatattaatttcataggtttccatttctcattactgatcactgatgtcacttatctgcagc

SEQ ID NO: 2616 - DNA, 817 bp, Glycine max
  Intron number 24 from transcript Glyma03g37930.2 (locus Gl yma03g37930) derived from phytozome v7.0 (chr-ID Gm03; pos 44384939 to 44385755)
gaagttgttttccaggccacacgcgtagcctacaggtttcatttcctattgatatgatatttttgcagtaatgacaggcctagttatattaaatacttgagacagacatacataaatagattgtaatctgtttaaaacaaggacatatctcatttaagagaagtgagaagggccaccactggtttaaatgagaaactttattctgaagccctgggataaaaccgccacacatctgatataggtgtgttgattgtggaatttgggtgagagtgggagtgcaactcaccagatattatctccatgaaagtatatttttagtagtaatgttacacgtaacacattctttgcattttcatgtcatgctggttctcctgcacctattttaaataatccagattttgcacatacctcatgtagtacataacattatttttttcttaaatgctgaattgttttgtaaattccatttgaattcgtagttgatttaatagattgaatcatatctattcaagtatgcatgattaaagtgtaatgttatactggtgaatagggcacacagaaaatataaaactggtgtccagagtaattgcatacaaccgaaataccaaactacagagcaaattgagcaatggacatgtttgcactatttatattttttttaccaagtaattatattaaattgctggacaccctgtagccttttctaccttttcatgtgcttgcacttttacacttgagcttactttactctggaagatgctgaggtaaatcaactcttgcagtgctacaggtatagtgtctctcttgtctggtcaac

SEQ ID NO: 2617 - DNA, 891 bp, Glycine max
  Intron number 7 from transcript Glyma09g36920.1 (locus Gly ma09g36920) derived from phytozome v7.0 (chr-ID Gm09; pos 42503646 to 42504536)
ccaggtattgaatatgttattctgtgtgtgttctgagccttgtgtgctgcatttgaggcagtttgtaatgttccccttctctataaaactaagccctttcttgccctgatgcttcatatttacacattggactatattttgtgactagggttaaaattgaagctgattgtgtgttaatctgtagtgattatattgagatatgtactattgttctgaagatctgtttcctgaattgacttgtgctgcacagtgcacagtaagaaatagatccctaaatctccctgaatatttccgtaggagtttggattgtcagtttcacttgctttcctttcttacccagttttgagcatttgtggtgctgttatattttagtttccttcagtcatgtattgtgtttagactaaaaataatcatggtaaattaaatagcacatataatgggtggtggaattacttttggtagaattggaatctagtctgaactaggcaattttacaaagtgtgcttcttttttgtttgctttgacttttgtgccatttgttttttttttgtcttttagcaagcagcacagtctatcacaacattggaaaaagcaatcctattgaaacaaccataaattaaacaccaaagaaagttcataaacataaacgaatcacatacatgtttaggggcaaatagaaatcctaaaaacttaaaaatttgagcattttgctccaaacaaatgctttaacaactacgtaaagagaacactgcaattttcacactgaaaccttatagccttgttaattgtgttttctaatgttagtcacatttttttttgtttgattctaactaattgatgatttcatgttatctagtggagaagaggtttgaagctgagtggtgaaactgc

SEQ ID NO: 2618 - DNA, 1446 bp, Glycine max
  Intron number 2 from transcript Glyma06g14250.1 (locus Gly ma06g14250) derived from phytozome v7.0 (chr-ID Gm06; pos 11226791 to 11228236)
ctctaggtcctcttctctttcactaagtttcctcttaacctaatagaatccttatttggtacttttcatgttatcgttagtaaaccctatggttctaattgattatttggtttccacgtgcttgtgcataattctagggtttgggttgagttctgtatttacccgtgagacctaactcacgttagattggattttattctaattatcatattatcatacttgagcgatcttaacaaggtctctaatcatagagaaatggtagttgtttgctaacagtaacgtgtaatgttcaactgcttcatctttttgctgttatttgtatgtatttatttgtgcattggctgttattctttgattattgttgttatttgtttaagtataaaaaaattgttttcatgtggggctagaggtaacctttagaccttaattaacaatggctgtcctggagatgccttgattctgtgcggggcatagtaggaaacaaaaggaattataaaggggcttggcataacccttaattagttgtcacttgattgattggaatttatgtgttggtgtttgaaaagcaaatctgagctatgctcaacttttatctgttgctaatgtccaaactttcggaatgcatatgattggttacataaccattcaatgtttatctgagaattttaacaaaggtgacttgggcataatgtgtgtcttgctaaaaaatgatgttacattagaaaaagaagaaattagtaacatatttgattagtttgcattaattttcatggtaaatattaacccaagcataacattttggacaacgtaaaatagatgttctatcttactatatcctaagttggtccctgctctgagtcccaaagattgactgctagttttttttaacattctgacaattttatccccttcagcttcacatttatgagtagatggttcgatctttgttttatctttagtttacaatacttatcaacacatcaactaggtgagcacctcatcaaatctgcagcacctcaatttgaagagggatggccctttttagagatctgcagagcactgcttctgatcactgagctcttataccaccattataatttttgtgattatttttcttgatgttgaacttaacaacttaactatgttcaacaactacttttctgtgcttatgatttttatatggttgaattgtttagatgagaaaatgaggcactttatagctgttgcaacattggcaagtaaatgactgtcacatacttttggaataaagggttttacctagagaaaataatgtgtttatgtactgttactttgccctctgtttctgctgccatatctatgctctatttatttggcttgttatctgttgatcttcttgttcataaattcgttttgttggactgagatgcaggtggtgctgagggttcaaagcagagcagaagtgag

SEQ ID NO: 2619 - DNA, 2830 bp, Glycine max
  Intron number 1 from transcript Glyma01g02890.1 (locus Gly ma01g02890) derived from phytozome v7.0 (chr-ID Gm01; pos 2374151 to 2376980)
cttccaaagttgagggattaagagaaaaggttaaggtaatgcgttttcatttccacgtgtatcgcgttcttcttctttcgaattcgctagctgaaactgaaattttggttttgagctatttcggtgagagtgcttatagtggtttctgcttccgcttcggttttatatgcttcgttttggattatttttttttggcgaatttcagtgactgttagtggcgaggatttgactgtgaattagattttggaatctgaagagaatttaacttgcagttgaggaaattgtctgctaaggtggaggcgttgaacaattttttgttccttcatgtttcagaaaataaaaataaaacaaaaaaaatatgctgtgttcacgaaagaaagaagaattacctgcataatgatttttcattttccaaaatttgtctctgtgtaagagagccaggtgtacttttttttattgttgccttaacggtttcctcatccagctgaaagctgttagtgttgtgttgggcaacaataaagagtatacagaggggaatgtgagttaagaagggattcactgtccttgtagaaactggtgaatcagagtgtttagaacatagtcctagatggtagtttctcacagcggttgcttgaatactataacaatcaggtttaatcagcattaactaagattccagatttgaaaatgccaattgcttaattaagattcccgatttgaagactccaggtacagtcagcattagttaagatagagtatacagagaggaatgtgaggaaagaaggggttcactgtccttattgaaatggcgtacagagtgttgagaacatagtcatagctggtaaattctcacagcagttggttgtgaatatataaattaggttcatttagcattaattaaaattccagatttgaaaatgccaattgttttcattttgtgctaggtttattgcatggttttgaactaaggtgcaagcttggcttctatgtgccttatgtcttcaaaatctgcattggatttctaacagtcaggaggttaaaatatcttctcaatcagcggcggacccagacatttgaaaatactaactatttaagtttttattgaaaaaaattacttgtggttttgaactaaggtgcatgcttggcttctatgtgccttatgccttcgaaatctgcattggatttcttagagtcaggaggttaaaatatcttctcaatcagtggcgacatttgaaaatactaagtatttaagtttttattggaaacaattacttgtctaatataaatgtaagtgatagacaatgtaaaaaaatatgttcataaaattagtttcaagctagtcggtgcatttttaagcaaggcaaaagcaaactttagagtattttcaaatagtaaaaagagatgttgtttatccaaaagtatatatacataactttttcctacttatatctagtagtgcccaaatttaccctgcttctagtataaattatttttgaacacttcatatccttgcatgttttgttgggatttttttggaaaaataattggtatttttttattagctcttttaggaaattgttaaaaaaatgtttattttctaaacatgcgtgcatatatatatatatatatatatatatatatatatatatatatatatatatatatatcagtaacatttttcctaagaacaatgctgtgaacactctttatttgaattaggcacaatttgtttatttgttactatgaacataagacaaaaccaaattgttagattgatgtttttttgttcccttaacaattgtagaaaaatgagtaattatttctctcattagctagcaatagcatgccatcagagtctatggattacttttctaacttttagccatacaatttgctaactaataagtggtaatcagagcaatttagaatacatagtcggagcagtcatgttgatctgtttgattgattgaagttttggcatttctcctttctgaaaacaccagtgtgggcataaattctctatgattcttgagtgaactttacttaactgggatatttcaacttgtcataattttggtgcattagtacttggtggttctgttatgaagaaggaaaaaatgagtgtggtctttcagtttcaaaattatgaatttagatggtaggcatgttgggagaggctgttagactaatatcaagaactctggaaggtaacatataggatcaaactcagctaattttggggatttgaagattttatgtgcaaacagagaaaaaggattattgttatgtaaaacagagtataagttatcctcttctgaaaaagtttcattaaaaaggtctagttttggattacataattttgtgtatagaatttaagagaaatttatttatgcacatatatggtgtcaaacaaatataagtaaagatgattcttacacaatccatgattatagtatattaaacatggttggagagggtaaattcttattattttttaaaatacttttagtagtattggattgatggggagttggagccacttgtggtagcctggtaggtattagattcagaactccatgctgccatgtaccaatgaaaaggatgattagaagatgtgtttttctggagtatcttttatactatttaaagctattttacattcttacaagttcaagctagtcaagttggttggaatttatgttttttatgtggcgtggtgtcctagctgatttttgtggatcatgcaaatttttttttagacctgtgttaacaattacatcaggtaatttgcacagcttgctagaaacgactacctgcagttaagacaaga

SEQ ID NO: 2620 - DNA, 1389 bp, Glycine max
  Intron number 1 from transcript Glyma02g13570.1 (locus Gly ma02g13570) derived from phytozome v7.0 (chr-ID Gm02; pos 11891504 to 11892892)
aaactctttctcttcttcgccagttttggactttggtaaattctcttgctgctttgatttcatctcagccgtgtgattctctctttcttccactctctgatgacttacatggcttgtgttcaacaaattatgtttttatttttctaaaaaaaattgctttatttttcatttttcaatttcaattctttttgtttcctacatggtgtcattctattttattcttttgagactttcatctccaggtaaagtcagaattttctcttaaattgtctgttctcaagggagatagatagagagaatcagagaataagaaaattgaagttttttttgttttttcttcttctgaatgtttagcaaatcctattttctcttttttatatgagagtagctttttagtcctttactattatatgaggataagaaggttttgggatctgagatagatctctattatggttttgaccatgttccctgattttccttcatgagattccagtgtgtaagtttcaactcagctgggtattttttccactgtacttttttatctggttttctaaacttctttattctgatgagtcagatcttaatcagagctaaaggacaaagtattttggtagggattttgtaggtagtcatcttgtttatgtaggccttgtgatttaaaatttcggtttgtaattttgtggttgaaaactttcgaaaaagtttgagaatttttaaacttttttcttgtcctattataccttcttctgtaccgtccttggattctacttaggcgaaatcttcttttacttataaaaagaaaaaggcaactaattggtacttgctttttagtacttaaaatattatgatatatgtaatatgtatgtgttgtgtggatattaaaagcttaatatagaatatggtccccagttttgctggtttaatctaaaccttgtccttagaaattgtggtaaactctttattcccctttcttatgctttctggtttattttataattagtgtcatgactagagttgggttctgttaaatttcattcctggtttggaatcaggaatataaggtaaatagtgacagaatcagtgtttcctttataccacaatccaaataaatattttatgatttcttatgattagagaattgacactttttctttctttttccttttccttttttttgttcttttaaataagattatctttttggagcagtagagtagaatcttattattggtgcttggctttgagtgtacctttgtagatcattgaagaaattattgctcttgttttcattatgtgcagttaaattttagttggttactaacctatcattgttgttgttgctggttttcagatccctgcagaatattgtgtaatcagactagtcac

SEQ ID NO: 2621 - DNA, 5362 bp, Glycine max
  Intron number 2 from transcript Glyma15g28370.1 (locus Gly ma15g28370) derived from phytozome v7.0 (chr-ID Gm15; pos 31030680 to 31036041 reverse strand)
gctttcgaacaggttctgcttctatcacctcttttttttctttttttaaagccaaaagcttatttggatagttaaaaaacttattaaagagtgttactaaagtgtgatttatttattatgttaatgtttctggtgttggtctctaatgagaataggagtttcaccttggtcacttgttaacttttaatacaaacttatagtttaactagatttcctttttcgattatggaaacaacgtatataagtgtttatattataaacacttagttaagttgtttccctgaacgtgtctctattttgtgtattatgttaattgttaatagacgggcataggtctcatatcgacaacctctttgcttaaagatgcaccattcaaatatgtggataggatagatgttgtatgttggttcattaacaacctttaattaattctcttagactttaccaacttattatttttctgttttctgttattttgttatagcatgtaatagttaagtagttttaagttggttaggttagttagatttgaaatagtgcttctatttcttcttgcatagcctagatcataagagagttttttctgtaaccagaggaaaaaaaaattgcaatttttttaataaaagtggctgctgtgagttctgtgcagttttggttcatatgttttctgcatttttcttattcttgttcatacaagaaattcattcttttgtgaagtaaaatctgatcttggcacaacaaattggtgcggtgagcgtggaacgattttgagtttgattcaagaaatgggctcggccaagtatgaggttgaaaaattcacagggcaaaatgattttggcctatgctgattgaagatgagagctcttcttgttcagcagggcttggtggaagcacttgatggagaaatcaaactcgaaaagatgatggctgatggggataagaaagcactattgcagaaggcatacaatgcaattattctcagtctcggagacaaggtgctgaggcaagtctctaaggaaacaactgctgttggggtttggtcaaagcttgaaggtttgtacatgaccaaatctttagttaatcgtctttacctaaagcagtctttgtattcgtttaaaatgcatgaagatagatcagtcggagaacaattggatttgtttaataaactgattctagatcttgaaaatatcgatgtcactattgatgatgaggatcaaactttgttattgttgtgctctttgcctaagagttactctcatttcaaagagactttattgtttggaagagactctgtttctcttgatgaagtgcaggctgctctgaattcaaaggaattgaatgaaagaaaggaaaagaagtcctctacaagtggtgaagggctgacagcaagaggcaagaccttcaagaaagatagtaaatttgataagaagaagcaaaagccagaaaaccagaagaatgttgaaggaaacatattcaaaatcagatgttatcactgtaaaaaagagggtcatacaaggaaagtttgtcctgaaaggtagaaaaatagtggcagtaacaataggaagaaggactcaggaaatgctgcaattgttcaagatgatggctatgaatctgcagaggcactgatggtgtctgaaaagaatccaaaaactaaatggataatggattcagggtgttcatgacatatgacaccaaacatatcatggtttgaacaattttctgatcaagtagatgggttagtactccttggagataacaagccttgcaaaattgaaggaattggatctataaggttcaagtttcatgatagggctgaaagaattctcacagaggttagatatgtacctgagttgaagaaaaaattaatctctcttggtgaatttgataaaagagggtatgtgttcaagggtgaaaaaggaatactgaatatagttaaagactccatggttgtcatgaggggaattatggaaaatggcctctattctgtagatggtgaagttgtaattggctttgcagccactgcaactggaagagttttatcaaaaactaagttatggcacatgaggttgggccatgtaagtgagaaggggttgattgaattggcaaaacaggaggtgctatgtggagacagaatggaaagattaaagttttgtgaacattgtgtctgtggcaaagcctgtagagccaaatttaatgctggacaacagagaacaaaaggtacccttgattatgttcatgctgatctttggggtcaaaccaagactccctctcattctggagcaaggtatttcttgagcattgtggatgactacaaaaggaagttgtggatctacatttagaaaacaaaagatgaggcttttgataacttcaaaagctggaaaacacttgtggaaaaccaaacaggcagaaagatcaagaggcttcatactgataatggtcttgagttctgttctgaacctttcaatgatttctgtaaagagaatggcattgcaaggcacaggacagttgcgggcacccctcaacaaaatggtttagctgaaagattcaacaggaccattttgaagagagtgagatgtatgccgctgagtgtaggattacccaagattttttgggctgaagcagcaatgacgactgtatatctcatcaacaagtgtccttcaacagctctaaactttaaaacccctgaggagatttggtctggccatccaccgagtctaaaacaactaaaggtatttggatgtgttgcctatgctcacatcaagcaagacaaattggaacctagagctgtcaagtgcatttttctaggatatcctgagggagtgaaagggtataagctgtggtgtttggaggctggttttaagaggtgtttagtgagtcgtgatgttgtctttaatgaagctgagatggcctacaagaccaagcccagcatggttcagtccagcactgatcaaagtaagaaaattgattctgaaaaattaaattttgaggtggagactgagaataaacatgctaaaacacaagctgttaattgacctcttgatgaagaaaaatctgaagaagaggaaaagctgactatgtgctggctcgagatagaatcagaagggaaatcaaacaacctaagaggtatggatatgctgatctaatagcatttgctttggtagctgccagtgaagttttggaggaagatccaaaaactgttaaagttgtcttagctagtaaggagaaagaaaaatgacttagtgccatgaatgaagagattaagtctctccatgacaaccatacatgggaattgattaaaaaaaaccacctggttctagagtggttctagagtggtcagctgcaaatggatcttcaagaagaaagaaggcatccaaggagttgaactaaacagatttaaagttagacttgttgctcgaggattccctcaaaaggagggaattgacttcaatgaagttttctctcctgtagtgaaacacaggtcaatcataattcttatgactatggtggcagaatttgatcttgtgttagaacaaatggatgtgatgacaacatttttgtatggaaagcttgatgaggtgatattgatgaaacaacccgaggggtttgaagtcaaaggtaaagaggattatgtttgcaaattaaacaaatccttgtatggtctaaagcagtcgcctagacaatggaataggagatttaatgaatttatggctcacatacagtttcatagaagtcactatgatgactgtgtttacttcaaatttccttctaaagctgagtttgtgatattgctattatatgttgatgatattttgatagcaagtaacagcaagagtgaggttgaaaaattgaaatctgagttaagcagggaatttgaaatgaaggatttgggagcatccaagagaatattaggaataaaaatcaaacgggacagaaaaaggaaattgttgtatctgtcctaggagttatatctcagaaaagttcttgaaaggtttggaatgtcaaattccaaacctgtaactactcttatgtcacagcaatttaagctcagtacaagtcaagcacctaagacatatgatgatataatttacatgaaagatattccatatgctaatgttgtagggtcactgatgtatgctatggtatggtatgtacttgccctgacatagctcatgcagtgagcttagtaagtaggttcatggcaaatccaggcaaagcacattggcaagccctgaaatggatactcagatatatcagaggatcacttggaagagttctggtttatggtggagctaggaatagcagacgaacaattgctattgaaggttttgtagattcggattatgttggctgtttagattcaaggaaatccctcacaggatttgtgttcacttctcttggcactgcaattagttggaaagctagccttcaaaaggtagtggttttatcaatcactgaagctgaatatactgctcttacagaagctgtaaaagaatctctgtggcttgaaggcattgcaaaggagctgaagatacaaaatgaagtgatcacaatacactgtgatagccaaagtgccattgatttatccaaaaattctgtgcatcatgagaggacaaagcacattgatattaaactgcattttgtcagagaagttattggtcaaggatcagttatagtcaagaagatttcaactgatcacaatccttctgatatgatcacaaaagttcttccaaacagcaagtttttccattgtttgaacttaattcagctgaagggtaattgaatcctgtttctgcagccactgtttttgttaatatttttgttaatgttttgttattgaaccaaggtggagaattgttgtatgttgattcattaacaacctttagttaggtctcttagactttaccaatttggtatttttctgttttctgttattctgttatagcatgtaacggttaagtagttttaagttggctagcttagttaggcttgaaatagtgcttctatttcttcttgcatagcctactataacagagttttttctgtaaccagaggaaaaaaaaaactgcagttttttgagtaaaagtggctgctgtgagttctgtgcagttttggttcatctgttttctgcatttttcttattcttgttcatacaagaaactcatttttttgtgaagtaaaatctgattttggcacaacaatagatttgttacatttcagatgagtgctttctccaagacatgtttctcaggtttagaacatgatgcaaccttattctgattatactaattcagtaatacaaaggaaatggtgataagttgtattctttgcagttctggacatcgattctgttggcacattcaca

SEQ ID NO: 2622 - DNA, 1941 bp, Glycine max
  Intron number 4 from transcript Glyma19g01470.1 (locus Gly ma19g01470) derived from phytozome v7.0 (chr-ID Gm19; pos 1089158 to 1091098)
aaatccggatcatcaaacatccgtacaccttggtggtaagatttttaattctcttaagcaattatatctatggtggcgcacgtgcctcaattaatctatcaaaggatataaagaaactcacactaccaataaaacatagtaacttcttctgccggttgtgttttactttccattattattatggcaggttatttaaaatgattaaatcaaagagtaatctttagataagaaccattatagtagtaaataatcatgcaatacgttttattcagggtaaaattaaccgcttcgtatgattttttttttaaaattatacgtaaataatcactaaagtagttattgtatatgtatacaaataaatgaatttgtgcgctgtgtgaatatatatgaaaagcaataataacttagatgaacaaaagtagtttaagttaaaatgccacttgtatagtggtttgtttctttaggtgtacatgcatgtttaatatgcttatataatatgagggaacaaaaaataaatattaataacatttggatgctacaaaaaggtttattcttttggggtggccgaaagtaataatatgcttatgtaatacggttgttttttattatcatgattgatctgatacataccttggtcacagattaattgtgattcaagggtactttttaagtttaatactacgtgcatgcatctgcatcttgtaacgtgtttgaagatattaatgtcgtggagcgagttgaacgtcacaaaaagatactacacgggttgaaaagtattattggcggcccaaggaatttaaaaaacaaaaaacttaattgtaatatttactttcaactttttaatttttgataaaattttatccaaatttttaatttaacacgttttacctttgattattttactactaacatattagatttttttaccctaacttatagtttttttgacaaatgtatccctaatttttaattttttttagcaaactttagtcttaactttttatatttttggggtatattttacccctaacttttgtgcttattgatagataaattaaaaaatgtaaaatttgtcaaaaaaattgagaataaaacattgattaagcctttaaaacatggaaaatgaggatttccacataggttttcattagaaagaataggaagatgactaccctcatgaaaaacggaaaagggatgggagcaataataggaatcaaattaatatccatagcttaattcttaacaaattacttgaatcgataaaattaataaattctgacaattgttaataattaatccatatgaagtttatacaagatgctgattaaactatattaccaagataaattaaaataatacatgaccaaattattaacgtcgaaaacaaaacaaaaaagaaatcacatataaatgtttagttgttaaacttgttcaatttgttgatataaaaattgtcgactaaaaacaaaactatcaatataaatataataactcaatgctaatgatatgatgtaatgtattttttttttcaataacaaaatactactattttctctaaaaaaacaaaatactagtactagtaatgatgtaatgtcttattttatttttattaataaaatattatatcaatcaaaccaaatcaaacaactaactattaataaatagaatttttagtgcgcaacatgatttttttaactatgcttgcagccttgcaccttgtattttatttcatcatctggaatcacttagtatatatgtatgacaatgacaacataatacatgtgctgtaaatttatgtatagcttcattatgacttttgaagagctgagatttatgtatatagttctattaatttaaactagaagtaaattattaaattaacttgtagctctctgaataagacctttaactttgcatggattttgttgtaaaaaaataggg

SEQ ID NO: 2623 - DNA, 9502 bp, Glycine max
  Intron number 10 from transcript Glyma07g13230.1 (locus Gl yma07g13230) derived from phytozome v7.0 (chr-ID Gm07; pos 11770103 to 11779604 reverse strand)
tcaggagaaaggaaatacgccctggagagtttcaggtataatttgttttcattttaatgatctgtgactagtatttttatttccattttcttgcaatcattaaagtgtgaggaatcatacttgttttttttttcctgttgttttctttaaaatttgaacttgggctggttgaggttccatcccatgtgtatatgtactgtctgtgcctccagaacttcttcatttgtctcatctcttttaattgagtgtccttcttgaattgttttcagttatggatcaaattcgataaaatttgcatgtgccattatactgctgctagtgacatgagctgaacaatttagctcgtgtttattctactagaatgacataagttgtaaaagagttctaacagatcatagaagtgagatattttgagagaaaagtttagaatgaagaagtgaaaaatgagtattagcctctgaactgagttacaactcagtatttatagatctgagtgattagttatgaccaactaattcaccaactaacttactaacactcataacagaaaactaactcctaactaactggcttaattgagagtgtagttgaacactgcaactctttgtacaatactctaataccccccttcaaggtggatgagactttgaaggagtctcaagcacattgagtttggtccttagaaataaaaatctggttggagagaggggcttggtgagagcatctgcccactgatcaagagccagaatatgatgaacaaccagctgcttggacaagactttttctctaacaaagaagatgtcaatgtccatgtgcttggtccgagcatgaagaacaggattattggctatagcaactgctctctgattatgacagaagataatgggagtgatgaaaggaacttgtggctcagttaaaagggtctgaatccaagataattcagcagtagtttgagccaaactttgatattctgcctctgtactggaccttgcaacaacttgcttcttttgggaccaccaagaaatgagattaggaccaaagtagatggctgaaccagacgtggatcttctgtcttcactatcagaagcccaatcagcatcacagagagcacgaagaggataaggtttccccagagcagcaggtctaaggtgtaatccatgcaacattgtacctttcaagtatcttaggattctttttactgcagtccaaggagggtctaaaggattggccataaactgacaaactcttttaactgagtagctgatctcaggtctagtaatagttgagtactgtagggcaccctctacagatctatatagagtaggatcagaaaagaggtctgaacctgttttagtaagtttgcagctggaagcaataggggaggaaataggttgagcttctgacatagaagttttctgcaacaaatctctgatgtatttcctttgagtgagaagtaatgatctgtcacgaagagtcttaacctcaatccccaaaaaatagtctagcagaccaagttgtttgagagaaaactttgaattaagttgtgaagtcagatggtgaaccaagttagtgggactgccagttattataatatcatccacataaaccaaaagatacagtgtgagagtgttagggtattgaatatccctaacagcagagaaaacaagagaaacagaaaatagaagaatatacagaaaatactgggggcaaactgaatttattcaagaaggaaaccttcttccaaggaaaaccctttacaatttctaattcttctctaccccttcctctaatgagaatactcttatttataatatcctaatccaactaattgataaagatagaataataaagattagatgatagaataataaagataaagatagaataataaagatagatggccctaaagattaaactaataactaattcgatcctatctcccgtgtaggggctttcttccttctagaatagaccctccagataactggtctatcttgagatctaacaatactcccctccaaagaatgaaccttgtcctcaaggttaaattcaggaaatagattctgaatcacatccacattctcccacacagatttacttaaaactgaagtagctaaccctttgctgaaatatgcaactggacgtttcccttgtgttaacacagctccgatccctgttccgcaagcatcacattcaatggaaaaaggttccttaaagtttggtaaagtcaaaactggagagtgggttaatgcgtccttaagtgcattaaaggactcagttgccgctgcactccaattaaaagctcctttcttcaacaaatcactgagtggtttagcaatcttcccataatctttcacaaatttcctgtagtaaccagttaagcccaaaaatcccctcaaagctttaatggattttggtataggccaatgaaggactgcatctactttttttggatccatagagactccctctctcgaaatcagatgccctaaataatcgatggtggtcctgcccaaactgcatttcttgctgtttgcaaagaaattatgatgaaagagagtgtgtaggacctcactcaagtgctgtagatggctctcccaatcgctgctatatactaagatgtcatcaaagaagaccaacacaaatttccgtagaaagggctgcaacacagaattcatagctcgttggagagtggtaggggcgttggtgaggccaaaaggcatcacaagggactcataatgaccttgatgagtccgaaaggctgttttgggaacgtcttcttcactcattcgaatttggtgatagcccgacttcaaattgattttggaaaagtatgcagccccaaatagttcgtccagtaattcttcgatcacaggaatgggaaacttgtccggaattgtcgctttattcagtgctctatagtcaatacaaaaccgccaactgccatctttcttttttgctaaaattaccgggctagaatacgggctattgctgggccggattatgccttcctgtaacatttctgcaacctgtttctcgatctcattcttctgtaagtgtggatatcgataaggacagacatttataggacccgtcccatcttggaggacaatcttgtgatctacaagtctgtttggaggtaagcctatgggtttggaaaaaatcgcttgaaaacgctctgtcacatgttgtaattgggtcaactgaagatggtcaagtttttgctcctcaccttgagttgctccctcttgatctcggagcaggtctgaatagaaaagtatcatggcagcagcctcaacatctgaagccctcccaaagaccttcgctgaaaatcccttcttctgcatgctatagtctcccgtgatttgggtgggtgacccttgatagcgaaaagacatggtaagagtcttccaattgtgttgtacctcacctaatgaagccaaccaggtcatcccgaggatgacatccacaccaccaagatcaaacaagaaaaagtctccagtgtaaacataaccctgcatctttaggatcagattctgacaatatccctgagattcctgtcggtgtccatttcccagctgaaccccaaaacttctagtaggttgaatcggccagttcatccttgagattaggtcccttgctacaaagttgtgactagcgccgctatcaatcagaatggtaaccccaacaccagccatttctccccatagtttcatggtttttggaggcgtaatgttcctctggaccagttgagataattccatccattggcagtggtattgatcccccactacatcattggtctcctctggttcctgtttgtcattctcttctatgttgtcgccttcgtcctccccaaggatagtgatccgcagactcccttctggacacttatgtccaaaaccaaaggctaaaccacatctaaaacagcggccctcctcttttcgttttaaaaattcagcgtatggcaattgtctagctcccttgtttcttgaaaaggtgccaacactgccgaaatgcgggttatttgatccacacgaagaaaccccttttggagctgtcatgatgttccgtgctccagtagtagctgggcgtgcctgggatacgctataattgcctgctgtattggctgctgaactcgctgggttgctaatcacgacgcttcccttatgttgaaaacgcggaggaaaaaaaaccctttgagaaggaggctgaccacgagcaaggcggagttcttcatccacatctcttgcaatttccatggcacgcaagacctctgtcggccggaaagatcgcaccctacatcgaatctccggctggagaccgcccaagaagtatcccagcatctgttcttctgatggatcagggatttgagccaccaaaatttcgaattctctcaaataaacgtccacggactcctcctgtttgagagtttttaaacgctcgaaaacattgcccttactaccttcaccaaaacgctgaagcatgagtggggttaaagattgccaagaaagagatggattgcgttttcgaatgaaacgataccagtgtaccgcctccccttccatgctaatgaatgccaatcgaatcttctcttcttctttcacttgatgtacttcgaaaaaaatttcagctctagctatccaagacagaggatctgttccatcgaagaccggtagttccaccttcttggtccaaaagcgtggttcaaaaaccacctcagattcggtattgctctccgacttggtatcggaggggtctttctgtagtcgttccagctgctgcagtacgtgattcatgatgccttctaccctctggatgccgcctctgagatcagctatgtcttctccatgggtcatcaaggtgcggtctaaggtgtctatacgtgaatccatctggaatggtagaggaaagagcaggtcggaccaattgttagggtattgaatatccctaacagcagagaaaacaagagaaacagaaaatagaagaatatacggaaaatactgggggcaaactaaatttattcaagaaggaaaccttcttccaagggaaaaccctttacaatttcttattcttctctaccccttcctctaatgagaatactcttatttataatatcctaatccaactaattgataaagatagaataataaagataaagatagaataataaagattagatgatagaataataaagataaagatagaataataaagatagatggccctaaagattaaactaataactaatttgatcctatctcccgtgtaggggctttcttccttctagaatagaccctccagataactggtctatcttgagatctaacagagaggaagtcttgtaaacaaatagagatggatcacatttactagcaacaaatccaaactgaataaaagcagactgcaggctctcaaaccacggtcttggggcttgcttgagcccatacaaggctttatttagtttgcagatcagagaaggattggattgttggaaaccaggaggttgagtcatatagacagtctcattaagcaagccattaagaaagccattgttgacatctattagagtgtacatatgtacaactgttaaaacagtttagtaagagctgttagcttttgctaacagcacctccgtcttagctattaacagctgcactctctaagttcagagtcctataaatatctctttgtaactaactctgtgactaacttttgtgatactcaataatatgagattctctctttctgttacacaaaatttctctcaatttatcttagaacatctagctgagtcagcatccattaatttgtgattgctatagttaaagtaagcctaatagtgacaggtttcacaactggagaaaaggtttctgaaaaatcaaaaccttgtacttgattataacctttggcaaccagtcttgctttaaatatgttaatagagccatctgcattttccttgaccctaaaaacccattacaaccaatagcattcctgtttgatggaagaggtactagatctcaagtgtgattctttattaaagtttcatattccaattgcatggttgaatgccaattctccaaagagtggatttgcaaaccttgaccattgtctatgaatatctgattaggaccttcaaaaggctctagttgctgaatgttttgagattcaccagtaacatagaatgaagcaccagaatctagaatccaattggtagaattggattgaggttgagtgtttgtgaatagcactatgattggactgaggattgttactgacagatttgtaattggtattagtccaaacattagcaggtctagtatcaccagagttttggccagaactgttactattttgtgaataactggtgtagttatttgaagtttgagtggaagtggtctgagaataacttggactgagaggatcatgaagaacaaaggacaggtttggttgataatactgatcatagcggtaattgcaaacagaagcagtgtgaccaaatttgaaacacacctgactctggaagttggcaaaatgaccactgctgcggccgtgaccagcaccaccaccacggcagtgagaactaccactaccacggccagatccaccacaaaaagcgggaaaactcttcggatttgtcttgtttggcagagaaaaaccatcggagctgatcgcagaagacatatgatgtgcttgtgaataattgatgaaaggtgaatcagactgaaactgtttgctgaatttgttgagacgcgctttgtgagcaagaagagcttcaacttgctctatcggaagcggttcaaacttgttccagttcaacatggaatattacttcctatttcagcctcaatcctgatctatctcctcttgtttcagcctctacaccttcactttccccaataccttcctccaattccacttccagtcattctcaatcatccaatataatgtcgtctagtgaatctatacccactgcaccctctcccactcatcctcaatcatcaaatactatgtctcataatgaatctgtgtctgcatcaactcccattcccatcaacactcaccctatgcaaactaggtctaaatctggaatacacaatcctaggctgcatccttcattatttcttactcattctgaacctaaaagtgtaaagcaggccttggaaagttcagagtggtttgcaactatgcaggaggagtataatgctctaatgagaaacaaaacttgggattagttccattaccagctggtagacaagctattggatgcaagtgggtctttagaataaaagaaaatgctgacggttcaatcaataggtacaaagctagactagttgctaagggatttcatcaagttcatggctttgactttcatgaaatattttatcctgttgtaaaaccagttacaattagagtatttctaactcttgctctctcacaaggctgggacttatttcagcttgatgtcaacaatgcctttctaaatggattacttgaggagactgtctatatgactcaacctgcaggttttgaagttgaagaaaaatccttggtttgtaaacttaacaaggctctctatggattaaagcaagctccaaggcagtggcttgacagtaatacagattgggtttgtaggaagcaagtgtgatccctctttgttcatttatacacatcaacaacacactgtctacattctagtttatgtagatgatatcatcatcacaggaagttctaattctctcattcaacagttaacctcgagattgaatatagtcttctctctcaaacagctaggtcacttggactatttcttgggactggagattaagtatccccctaacaggtctattttgatgtctcaaagcaagtatgtcagagatctacttcataaaactcaaatggctgaggcacactctatctctactcctatggttacaaactgcaaactgtccaaacatggagctgatctatttcatgatccaactctctataggtcagtagtgggtgccctacagtatgccacccttactagacctgagattagttatgctgttaataaggtttgtcagtatatggctaatccattggattctcattgggctgtggtcaaaaggatattaagatatctcaagggtactatatttcatggtttattccttcaacctacttttgtttcaaaacctatggctctctatgctttctgtgatgctgattgggcatcagatattgatgacagacattccacgtcaggagcagctatctttcttggctcaaacttgatatcctggtggtccaggaagcaaaaagtcacggcaaggtccagcactgaagctgaaaatcgaagcttggctcaaacatctactgaattaacctggattcgaactcttctaacagaattacatgtttcttttcaaactcctgtgatttactgtgataatcaaagtgcagtgtccatagctcacaatccagtgttccatagtagaacaaaacatatggaaattggtgtcttttttgtaagagaacaagttttggccaaacaactctcagttgtgcatcttcctgccttagatcaatgggcagctgtcttaaccaagccactttcctcaataagatttgaagcactaagggacaaactcgatgtgaagcatttttctgtagaaaaaccttccccttgagtttgtggggggtattagaatgaatgtataaaaataactgattacaaacagttattgcaggacagttagacagctaactacttttctttcactaacagaattctgttaattagttgttagttagtttgtgattagtttcaagggctagaggtttataaatacctcctttgtaactgcattaaatgttaactttttcagaatcaataatatcagtttttcttttttttctgttctctctgttctctaattctgatacaactcagtatttatagatctgagtgattagttatgactaactaactcaccaactaacttactaactgactcataatagaaaacgaactcctaactaactgacttgattgagagtgcagttgaatactgcaagtctctgtacaatactctaataagctgaataatttacgtcgtgtttgttctacttgaattatgatatgtactaaatgcttgtgcaagttagcaaattaattttaaacttaaggtatcaaagagagaatggtattaacgtgttaggtatataattcaggatctgaaaaaacgaagatagagtgaggtgtagttatcttactttttttcagttacatatataaccttgcatccgttgttactttatttaacatttaaaataacttttagaatcttgggggcaaatgatagtgagccaaagtttagtttcttcatgtacctttctgtatgattttggttgtaactgcaattctacacataaatgattattatttctcattatcattttttttcttctgaatcctacagacagttgatcttgaatttcccaatactactgaaag

SEQ ID NO: 2624 - DNA, 6761 bp, Glycine max
  Intron number 1 from transcript Glyma04g43650.4 (locus Gly ma04g43650) derived from phytozome v7.0 (chr-ID Gm04; pos 49211853 to 49218613 reverse strand)
agcaatctctctcgcacgcacggtggtcataattggttcatctctcttcccatctcagagatcaataatttgtgtttcattttttctttgattgttgtttcaattttgattttattgatttatattttgttttctatttcattgatttgtttttcactgattgatttcttagtgggtgtggatttggatgagtttggggtcgagctaggtggtgggcaccgtgtgtttgtgaatctgcatgaaagggaaagtgagaaataattgattgattggtgcggagtatacatgccgcaattctttcaagtcagtatgtttgatgcatttgtacttgggtatctagtttttcagttttggtttgaagacatgcacatagatacagggtgaggctttatctcctttgcaaaacagggcaaattccgaataggccaaagtatgaattattggtagtgtgtgctaaggtttgagttgattgttactgttttgtttcgattgaggcattgaatctttgttgtttttgtgcctatctttgttatgtgttaattctaatcttgaaaacatacaaatctatacatcataagttttaatctaatgcaactaacatactaatctactcttgaattctcataaatttggtgggaacaaaattagaaaacagagaatgacatcacataaataatttagataaagatttagtagatttccttcagaatgggatacccaaatgactgcataaaatgactagagaaaagcgtaccttagcaacctacttttccaagttcacagactgaaatcatagaaactgcaaaattggattaaattgcctacgattagattaccaagattggattagattaacaaaatcagattaagtcgttgtagacttgtggttataattcatgagtataggacaaaaattgttgactacctgcacttcaagaagctggcttttgaactctgaaaaggaaatagtattaattgtttctgctggatattggacctggatgactcaacagcaatcataagttagtaagccatgtcttatctgtaacaaccgtgatcacatgaatcagacagcccattgcagaggatataaatgatagaacaatacagatacagaagttcctggaccaagtggaaaaatataatccattttttatttcattattgaagcacttttccccatttctgcaattaccctgtgtttggatgggggatttaaaaattacttggaaatttaaatacacagcattttgattgccttgatttaaatttcttttatttgtaaatattttgtttggatgaggcaattcaatttcttgtattttaatttccttgtttggacaaagtaattcaatttcaatgaaatttaagtttccatttttaaatatttatttaaaaattaaaatttcaatattgaatgaaaataaatatgagtcattttttaaatagttaaatattcaaaacaaatttaatgttataaatatataataataattttttttaatatttaataattaaataatcaaaataattgtaatgctaaacaattttgaatcttacacaatattcttgtagtaacacacaaaaaaaacttggattaaataatactgtaaaattaaaagatgaatgatatgtaattcctttttcttgctaaaaaaaattaattacctagtctcttaataattttaaaaaacatattaaaattaaataattatgtaatttaatgataattatctcatacaaaattcaaatgatattaattttaatggaagaaaatacttcaatccatgtcaacatctaaaatcatatatcatcaacattgatatcacttcacttataatattcaataattcacgaattattttacaaattagaggatccaaaacaaacaacataatcaaacaattttagaataataaacttttttctcttgctttgtaagaatacaattcctctctattccttgctcacgataacctgacatagaagaaacaagataatataagtcacaacaggaaagacaaataactacagggaaaatatcaaagataaataactatagtgaaaatataagttagagtaattgcattgttaactatgctaggatccatttcttctcaatccaaattgcatgataatgatatacgataatattttgagatttaaaacaaatatgtagataaaaaatgtaaataagctctaaattttaatgcccatatttttctacattaggtgtgtcacaagcaagagcctagaggttaactttagcagaatataaattggatgacaagaaatgtctcttaactatatatacacaacaaaaaaagaagtcaaaaaaagaagttttttcttttttctttttgggtttgattagacacctttaatcaaaatctgtggagtattccccaagctcaacacaaatgttttgattgagaagacacaagtcctagagctaatgccaattagaatctcaaatagttcaaatagaggcataaggtctctcccaaaataaaaagtaatgatgtaaatgtagctataaagttgactatcatttcccactacaaagcaaaagtgaaaatataattattcaagaatggggtacaaaggaacatttcaaccagacgaagcttacaaatttatatgttacaaactctgtatatagtccaccccaagaatttcatcaaatatcttattttttatgttttaaaatttaacctatgtatttaaggtgtaagtataacttagctgataatataaactcaaaataaaaactttaatatatcaagaatgtaaggatctttagcacgcccaattctggctttcgggtgagtgttttctctccatcatctatttcactgtgcttttactaatttcaaattcatcatcaatagtcctgacatgtttgtaaagcttaaacatgtatttactctattatgtctgtagagaaatttatcagagggaacaaataacaaatgtcattcagcctccaatgaatttaacttcatcatctacctagtagtggtccacatttaagtagtagcataataggtcagttgagatattgaggagtttacaaatatcctgagtgccttactttttgcctaaccatcttttcatcaattgctattgaccttggccagaagttttcttcattaaatttttggttaatttatgggactaaacagcagcataggggatccgctccttttaacccgaatttttttcttctagaaatgaggaggattgcaggatcaaagaattaagtatgttctatctatggtttcatctataaggaagcattttagaacataataaggtaaaaggcaatgctgcaggctgcatcaacaagaaatacctaccatgattgatattgattatatgcaaatatcaacatctttagttacttacatctgtccagaagtcagtacattgggtagcttcttgcagctcatgaatgattttaacttttaagagaataactctaaatttaacaagccatttttagtttcttttttccaataataatgtcgacaggaaagtttgaatttataaaccaaattaacaaatctactaactctaacttacaataatgcaataagcacatatttatagttttaagccatgctggcttttcgtctttagactaaatttttttctaaataagacaaaatcagtttcatcaggcaccatcctttgttcacctacgcaataactcaaatctgattaattcttctaaaaaacatacccttgtctgttctgcaaagaatgccctctatcaagcacatgctcaaatcggaggcatgggtgggttacaaagctagatttataaaccaaagttcttatagaagaataaacacaagcacctacagtgcgtggtctgttcctaacaaatttgcaaaaatgcccacagtacagattaacgaaatcaaacaatgagcaacgaaatcaaacaatgagtatccacagtacaaaaccaatgaaatcaaacaactaaataaaaaataaatcacaaattaaagaaaaaaaatgaacacaccatggcactgtgagagtgggtcgaaatcgcaaggggaacttacttgagagagctaggtgtggtgcgtgagggtggctgagagggagagagaggtacggagagagctagtgtggtgagagggagagagcgtgctagcgtcgtgagagagagcgtgcggctgagagagagctattatcgtgagagtggctgagacttgagagggagagatagcatgtggctgagagggagagagagcctgagagtggctggaaattttaattcctctatttttggtgagaatttgaaatcctgccaatttactttattaaaatgcttcaaaaaaatgatgacattttaattacttctaaaataccttatccaaatagatcattttacaaggaatcattttaatatctcagttaaaatactttactcactttaattactccatccaaacacgttaattttgtggacatcatatccaaaaacacaagttcctttgagaaagaaacaccttttgctgaggctgctctcatggagatccctcaccaggttgtgtttcttcctgtgttggttggtgcatttcttaatcaatatttccaatctcttgttatatttggcatgcaggtaaagtcaatattttataattgcattattaagcataggcagcttgctgctggctaccttttttgtgaatgttggttcaatttcacatatctgctgtatcacatagataccagggcagatattgagtttttagaaatgaagattacacttttatttcattttctggttcagtacgtaacaatgtcactctcaaaaagctagatatcttgaaacaccgtcatttaccaaatacatgttgacaattttttttttgcaaattattaagaacagaaacataaacttgagtaattagatagcaatttgttatgcatattataaaaatgaatgcactaaaataattctgtaattgactgttcaaaactgtaagatttaatgcatttttatctaactaaaattgtgtttgaataggtagagtgtatgccagattttaacattgaattattctttctttttaacaccacatattctgattgttcagacttcagtgactattcccttgcattgaatgttctttaaatgtggttactacaagtgttctcacatctttcgcaaactcaaacccttgacttgaatgagacctctttgattgaacacttctaccaaatcttgtgacagactctgctgtgaacaattgattgagtatcattctttgttttcttgttttcctcctattatttaatctgtttccttgtctgttctctctattttttctatattttgtaagagacactctactcctttgttctgtgtgtctatctattcctatgtgttgttagtctctacttctctttgttctctgttctgtcctttctgatttaggattagtgggtctatctattcctatgtgttgttagtctctacttctctttgttctctgttctgtcctttctgatttaggattagtggttctctaatagagttttgtgaaagagagcgattgagagtgaggaagatattattattcaacccatgtcttcaatcaatacatgctcagtttatatacagcttaacaaacataacagaactaactgagtaactaactgtagttatttaattaatatagttaactaaattaacattttttcttaattcatgtgaatttgttaaaatggtgctatatatagggatgtgtatgttgtatattgcacgtacatgcgatgattgaataatgaacaaaactcaatttgccattattgtccctgtattttgaggtattatattatgaatctttgtattttttatttgtcttttgtcatgttattttgccatgtatacttatattcatatttaggggtgacaaaaaaagttgaattgacaaagttaagtcatctcataatcaatccgcaaacatttatagtaatagtgtcccatcatatcatgcaagactccatttttttaatacggaaaggaagtataaacttgaattgagattattctgccaacattagagaatgttgattcagaaggaattaatacatgagtacgagaaaattatttttcaaaaaagacatgttagtgtataaaattttaaattatcaacaaattaggaatcataatagatttaacttttaaggtgattattattaaattcaattaatgtattttttgataattgaagaaatcaccttgttgatagacatgcaaggatttatgatgatagaccataaaataatccaaaaggaatatattaagatataaaaacttcacatccaagttcctacccttttgcattttgtactcatcattatttattgtggtttatgtgcttctctctcaatggtaaaatgaaactaatgaatgatcaatttttatggtaacttttagagataaaaacaaaaggataaaaatgataagttggtccataagcccagcacccagcacatgaagttcacttttgccttatagatttatcatgttattctttgtgtcatgtcataaaaatagtgataacttcaaagttcaaaagactaaagtgataatttacctttaattaagctccaattcttatgaaatgaaaatgaataaatatctattttgttccttaaaattgttagagactaacaggatggaaaatttgaatttagtccatctgcagtttagtttgttcccggtggggcaa

SEQ ID NO: 2625 - DNA, 2314 bp, Glycine max
  Intron number 1 from transcript Glyma14g10580.1 (locus Gly ma14g10580) derived from phytozome v7.0 (chr-ID Gm14; pos 8780401 to 8782714)
catctgtcttttacaacaggcaaatccctagccaggtatgaccatatccatcttatgctgctatctgttgatgaaactgcatttgctcatttttcccttgtagacaccccccctgatctgaagttgctaatgcttaattgctttcagtttagtagttttaacttctatgtatttcatctctattcacaaatgttatgtcttcttttaggccttgtttgtgcttgtttaaaggtttttataagaatttagttattgctgatggtggcatctatgcatttgattatagttaacatcttactttctgaattcagtctggtggtggtaatgttgattttcttatcagtgttacttggttagtgcatcaggttactagatttttaggtaaggaattcaggaatagtctgattaggggatgcaaaacatgcaggtttaccatgttgtgaatttaggtttctaataggctctagtaatctttcaatagcagtgcaaatagaagaattatgaattttactgagaagataaagttggttttagaatgtgtgtttacatggcgatgagtcctggtatgtattagccttgaagatgagtgggaacatagaaaccagtgagtatagtacctaatctctatagcttattacaagttcagaattgtaatatcattgtatctgcaaatcttatgtaaagttctatatgaaagacataaggttgggagaaagagagaaagattatccgggggttaagcttgagcttgcttcctaggaggtatggcagtaattgacaattatttagtcattgtttccttttgtaattcataggataagtctgtagctggggttaagatattgtcctactggattgtctacacatttaggattttacaggaaaatggaaaagttagctcaataaattttcattatgcacaattttaaccagggtttgtcgatctcaatggtctacttttctaaaagcttaagctattagggaaaagcacaagattggttctaccgccatttgtccttaaggtgtaaacagtacaccaaaacactccattttgtgtggaaattcaactcaattatacagaataagggtggaaaggatcaaactagaaatcacttggtcatggaggctttaatattatataaaggactaactttcctaaaagattacattgctagatgaaggcacaagattagttttatatctcaatttatgttcaagggttgttatttttcatattttgcatgtttttagtcttgtgataaggggagaaagaaaccaggaaggaatttggaggaagttgttaagaaagatcttatgttgaatatctcttaaggatttggtctttaactgagaccaatagcattgtatgatttatgtagccaacctcacctagtcggataagctgttgtttttggttgttgcttttcatattatggattcacagccttacatatctgattgtcttgttaaagtaactacctgaatgtagcttccacattaccagggtgactactgtaatccatggcaattaacataagatttagggaactcactgacttgggtagcagctttgagctcaatgactgattataaaatcaatttcaccaaatccttcaacgaacatgaaccacaattaatttaactggctggttaactgtaaaccattaaattttatgttgagaattagtgaagatacaagttgtaaacaggtaggataagatagccagtaattttttctctgtttttttagtgctgagtcattataaaatataaatctttgttatatctttaaggaaattgccaatttatgcgggatggtttagtttcaaataagtatgaagaaatgtttacacgtgtcttgtgcagatccctagtggttgcatccattgtttttacttaggtgttaacataggtcatgtatagattcatttgtccatattatatacactcagttgtatcataaatgcgaatctttaacctaagagctcatgaatgaatcatgagcttttactttacaccatgaacttgatgcattttagagttcagagcttaagattattcttgtgtcattgatttttgcttaacctctgttacatgttttgtagcattgagtttttcatctaaacatttaacatccatgaaagagtatactgatgtctaatttatattaactttgtgaccatgaaattttttgtgcaagagttgatgatttcttgtgagcattgaaattttcttgtgaacattcatccaatttatttacgcctctgacgatgatgttttggtgtttcttgtgcaggtttctgagtggggaagg

SEQ ID NO: 2626 - DNA, 3758 bp, Glycine max
  Intron number 4 from transcript Glyma12g23950.1 (locus Gly ma12g23950) derived from phytozome v7.0 (chr-ID Gm12; pos 26694308 to 26698065 reverse strand)
ggacaaaagttggtgaagggaaatccacatttcaggtgcatggctatattttgtttgctttcttttcatatttaaaataaaacctgaatttaattgctttcttttgtggaagacctagcttcaatgttgaattttataaattaatttcctgtttgatttggttgcaaatcttaacctaaatgatgactacgtggtttattttatttggtgataaggatcaagacactagtacactgagtgtcaaatccattaaagatactgttttagaaaaatgttggaaagttgccttaattgcggttgcccctaacctaccttgtttgcagcctttttgggggttgcgttaattgcttggtgttttgtgggattgagtaaggccctaagcccaaattctaagacaattttgtatgcgcttttatttatgtatgacattgttttggttgctcatgcaatggaatgcttcttaatgcttgtgagtattttgttttaaatcaaatcttgcatgtccccttttaatgttctatgaaatactgcatcctttatggaaatgtgtccccataaaagtcagactaattggatcttcaaggaatgcagatggacatcactgtaaatacattccttctgtgattcttgtcactcagctttacaattgtatttttataaaagcagctagaattttttttctcctgacaccacttatgctgggatttgtttttcaacattcttttggtaagactattttaattttttagttgtctactataaaacccttgacaaatgtatgcacggccaaatttggtaaagctaagaaacattaagaagcttctcattatggtactctttgagaaggatatgaatctccttgcaaaagttgtgtttcagaagataaccaattcggtaaaatcttttttttttttttatcagcaaatgttagtttttttttgttagcaacggggattgaacccacaacccttcctcccttcccttctcccttaaccacttatgacattgtaaaatcaattctcaaaatattaaaattagtcaaccatacattttcctttagcagcctctcacaatcacctgattacatttgggtattgacactatcgcaacccgaaggtcaaacaagaattatgttatcaaatttagatggattttatccaacaagaaggttttaatgatttgctggagtccatatattatccaaatccaaatgtgcaatagagccagatcttcagccccctgaaataaacttaaaatataagctggatatcacgcaaatactgaaatatttttacctctgaagaatactgtaataaccacatttccattatgaaaatgttattaacagctgtagtgagaaattgtcatgatatgcttagttaggtgtaacaagttctaaaatgctcctcttctttagggcttgatcttcattcaagatatgtttgcccctttattctagttttgaaatgtgttttgcatttaatattactttgcttgaggatccatgcacattttttaattaactttcaggaaaaatacattttttttcaaaaagttctatcagaaagattttgaatgtattcaagcataaaataacttattccgtaaagacacaatataagtttctagtatgcacaatcaagggttggtatgtagcttagtatgtctctagaatttccactaaaccaaatattagtcttgatagttgaaataacaattgatatctggaggaggattttgtgcctgagaagtaccatgtcatctccccaccattctttatgttgtcactggaatagttgatatctggtagactgataagatggtctgtggcagttagtaatcaaggacatctctgtctgctgactctgctctctgatacttgtatggacataaaagaatatgattataaaacggatgatttttctcttatctgggcattttataacttccattcttagatttaaggttgttatgtttaaaattacacctaagttgggcatggtttcagattcctttggttgcaacatgtgatgatgggagcatcttatttgtggcttttggggacacagtggcagatctaggaccctgagtagtggggacaatttatttaaaaataataataataactaattatcatacatatgaaaaaaatagacaaatatcaaaatcaaatgcagtgagttgaaaagggattaaaatgtccaactaaataaagcatagaagtactcagtgagttgaaaagggaactaaatgtaaggaaaaaaattagccaataaaacacaaaatttgacaatgactgaaaaaattgggagcagcgagttcaaattataaaaatagaggggacaaaaatataacaacagtagatatatacttatattcatggtagttaaaattgagatcttactcaaggtcagaaaggggactatggatcataaatcgggatatcgtaacacggattgtaagatcctacaaatttatgaaattcatatataagcatatataataatatatatgtgcatatataaagtaacaaatcattatatcacacttcaaacacataattgaacttcaattcatcatgataagtaaaaagcagtataatatgcatatataatcatatatatgtaatcccatcctaattacaaaacagtaaaaaaaacataaaggtacttcaaacttcaaaacaccaagaggtaagtggagttgagatgagacaaaacacagtaggtggagttgccaggcttctacacaggaaatcatattgttaaaaaccaccttggtgcaaaccatctattaaaatttttcacatgcttaggtcgtatttccatcatttatggtaggaaatataagtaataatgggttaatcccttccaaatcagaggattagaaagttgtattgttagtagtatgatcctttccttctgtattttgctgagaatatgttaggagtccctcattgatgtggtacttaagccttgaggttctctcacctgttgggttggactctcctcttgtgcttaagtcctaacaattggtgctttcattgagagtcaagtcacggaaaggctacttataggctagattaaggtgcaaaccgaatactgatagctgagtgaaaccgtccaagggaaaagggctaccattgggttaatgtcgatagagtgatggctgtcgtggacgtcggcccttaaagggggtgacaatgttaggagtcccacattgagtagaataaactatttgatgtggtacttgagccctgaggttctctcacctaatggactagtcttttgggttgagctgtcctcttgtgcttaagtccaactttaaggataaggttgacttttaggaggggtgtgtgttgttaagatataaggagaagggagaattatttaatattgttagccttctaagaagttagttagtcagtaaggggtttattagatataaataggggaagaaagataggagagagggggatctcatgatttgtaaattgagcagtagcttttgtgaaaggagaaatcctttgtgaaggggaaatccttggaggaaagttttctctcctattttctgttcttctcatcatgtagggagcaaatattttaagtgatgaaacaacaatctcgaaaagttttaaaattccctttatgcctttatatgggatgatgacttccttttttgttctatttggctattgaagtgtcttttttttgtggttatcaatgtgatgtggcttgaattttcagaaactactacag

SEQ ID NO: 2627 - DNA, 2624 bp, Glycine max
  Intron number 2 from transcript Glyma07g31650.2 (locus Gly ma07g31650) derived from phytozome v7.0 (chr-ID Gm07; pos 36612250 to 36614873 reverse strand)
acaaggtgagtatctcttttgctagaagatcctaactcctagtatgtgtgttagtatgattggcttcaggtagagggttatttttaaaatggtattctttcttgggtgcttacagatcgtctgttgttacaaactttaaattaaagaaggagaatggctgaggaagataagggcgtgaattgtgtcattataattttactgtgtgtgtttacccatgatatgtttggaattgggtatttctatttcattaaggtcttattagttactactatatgtcagacttttatcccctgctcatccattttcttcttgagtcttttcttgttggctaattgtttttatgatggcatctgtcttaattttaaattccttcgtgttgtaagatctaggcaatctattatatttcctattattgaagtgtaatagattggttatgatgaatgagattattgctattatgggggtgtttgagatgtttcacattaggaaagcattccttaaaaaagcaaaggttccaggaacagattgtcatttttatttttatgaaatgaaatgcgagtttgttaaaagtggaaatttgaattttagttcttttagcattgtataagagactataacctactccctgtttgtgattgctattactttttaaacactgttattgcttgacacgtgctgttataaattctacgaaaagtagtttcgaattttgtttggtaaaaatatgataatatttattgtgagaaatgtactttgttgccaccaaaaataataagcctgctcaagctttagctattgcacttttagcactttagctcaacaatttgttttgggctacatcaatatttaatgttataatgagtatatttcaaataatatttggcatgaaacatattaaagtagtagaatacagttgagatgaaaaaagaaagttaaaagaaataatggattgtcttttccccctaccaaaaaaagtaaggatagttgatctgaacttatcagattgtatgacgtttcactaatatgattttggtgacatttaacattatttgaaaacattattgttgaaatacagttgttgcttattccctacccaatggtaaatggcttgtgttactattgttacacagttgcttcttaccattttgatagttctacaaactagtttgtttgcctaggttttgtaattgcagtatgtttgtataagtgtcagcagtcttattaaataataatctatggcttgttttctttgtactaattatttgctattttctttgttatagaatcttccatgccagttaattgaatattccattgcatttttgcccattgcagttgattttgaacaaagtactattgcttggctctgctagtcagacaattgttggcagacccatagtaccagatgcagctgttcacgctgttgttgaggagcatgttagtgtagaactccctgtttaaattatgcagaatcagcttttttacaatatgtttggttgaacttaaaaaacattttttagaaaatgttgctgaaagtatgcccaaatccaaattctaaaaacaaagaatagtcgctttcagtgttttcctatcatgttccaattcaacatctcaatggttctgaatgctactggtacctctcaacctttattcctcactctcttttgccactcatcatttgctcaaagttgacaaattttaaaaccatttgtcataatatcattttggtccatcccatccattcacttcatggtagccgtggaggcaaaggggatatcttggctctaggtgctagttgaagaggatgttgttttggcaaggagagatggagaagatgagtggaaaatagatggaagaagagtatatgcctcatggtgcatagtcaagtgaccctttaactctttcatatgttgagcacattgagttttggtactaaacacttgtctaatgatggaaaagataatgtccaaaaattctttcctggaagtttgaaaaagattcaggccaaactcctggtggaaaggttgcctcaattcatggagttttattttattttttaaaatttgtgaacataatctcattgatgatggaagtgcagaaaaatggaaatgcaaaattagacagcaatggtggatatgatagcacaaagaggcaacgagctaggcatagtttgaagacaaaagcagaaaagaggagtttgaggcaagagaaaaataagacaaacttataaaggaaaaaaaattagcaacgtccctgtgaaatgttttgtaattggattgagtctcagaatctgaccctggaaacgaaatagttagcaaatataatgcctgctcaaacataatcttcttgtgatttgttttttaaaatggtagaataacggtgctcgtaatgatttccttttatcaacatggtctgtgtgctgcactgctgcccccttttcctgcaggctcccattgcctattcctctgttatctgcatccatgcattataattatcctttttctaatagcttttgatttctatgtgatgcaataatgaaaattttctggtttatttaaccaatttttgttcttctttctatacacttgcatgtgtgctcatttttcctttatgccaggcactag

SEQ ID NO: 2628 - DNA, 2329 bp, Glycine max
  Intron number 4 from transcript Glyma04g41850.1 (locus Gly ma04g41850) derived from phytozome v7.0 (chr-ID Gm04; pos 47675724 to 47678052 reverse strand)
aggaacttccactaaaaccaggtgaaatagtactggtatgtttgttcctcattcaatattttgtccttttatttattgttacaacagaagtaattgaagttctgttaaattcgaatataaatcaaatggtattaggaaaaaggaaagaaaacttaaagccatttgaacccaggcaaaaattttgcttttcttcctataaatagccctgcttttacttttgtataagcaaatgaaatttatcatagcagagtaacagaagtactcaaacatataccaagtttattgaatgaagtatttaatggtcgtaatacactgttaatataaaaagtcttatgtcattaactaattaaaaatcatgatagtatgatttttatgataattactgcaaaagttaagatacttattcatatcaataccatcttactgataattaacctgcttctgtttccaccatctaccaaaaaccaaaacaatcacgaggattcataagccagcacgaaaaagagtaatgaaaatctgatacctaagctttaagccagcacgctttctttttaattagtatctagtgatattcatgtaaaattcacacaataattcgtaatgttctaaaaattctatgacaaagaatacatcactaacatttttctttattaaaatcctgcatttcaatgcattcatccaactctggtgattaactaattaggggctcatggctatatatatatatatatatataaaaactaattgggggctcaaatctctgtactgtagaacatgttaaaagcgattcgtacgtttttggacagctatccaccaatggctaaaggtacatatgtcttatccctttcttaattatttcttctagttttttgtctataatttaattttataatacactatttaagaaaaataattaacctctttattattattattattattattattattattattattattattattattatcaacttttagtatgtattcatatctttcatttattattttgatattttatgtgattttttcttctcctttatgagagtataagtaaaaattataataaattcttagaattttaaaacatagaaatagtaatatttagacatcatcctttattttcagttaaatgttcacacaaaatatatgatatgaatttgaaacttttaataccgtaacaagttggtatagtatgatataattattttcttttttattgctaacaagttggtatagtatattttttatgggaaaatattagtttgtaaattttgttagaaatattaattggcatagtatgatataattctaacaaaataaattttgaatttggtgcttggcagcgttgcttaactctcctgcctttcgagacgattgatagcacacatggaacggggaagtccatgacatgcttcaaacgagttaaaatctgctgttacaaagtgaagaatatgttttagaggataaagtacaattatagttatagattagaaaaacaaatgttaaaattgtatgaaatttataatttattatatatgtgagtgttttcataatcagttgatttcctaatcaacaattataagtatacatttccctttcaaggaatctctctcatttgaacaatagaattcaaagatttgttgttgatgttgaaaattcccgatggttttcagaatgctctccgtataaaatgaaacgtatcatttgcttacaaaaatttaaaaataaaagtgaattacattttgatgactcgagtttaacatctcattgaatccattttctttccaccgtgttgtaatgaaactaataaaattgctaatactaatggtgatggtaactttggactcatattcaattgatatgcttacaaaaaatacttacaagtgacagaaaaattatctaataaatgagtttaaatttaagtattattgaaaaaaaaacttaagtctcatattagtcaaagataaagatcaataaataatatataagtggaagacaatttttattttatgagttaatttttagagttgaattaaatttagatctacgttgtaaaatgatacaaaaatctatcatatattcatttaaagagttaggggctaagttctggtactcaggtaccagggccccagcacaagagaaaaaagggaataagaagcaaataagagaaataatttcaattcattgcataactgcttgttatttacattgatacttataatctccttcgtaacagaaaaggttctagaagattaagcctaacgaattttattcttcttgtctcctaggatcagacaagttcaagcaaggaatttcctaaagg

SEQ ID NO: 2629 - DNA, 1419 bp, Glycine max
  Intron number 1 from transcript Glyma18g51560.1 (locus Gly ma18g51560) derived from phytozome v7.0 (chr-ID Gm18; pos 60414574 to 60415992 reverse strand)
tttggttgagagggtttccagcctcgagaaagaggttggttagttaattattgtagttttttttggttttaattttaagcgattcgttgtcgttttgctgttatactgtgacgtaggcgtgtggattaatttaatttttttttgtggtgtttcaagttttgatagcttttggttttgatttgaatttcttgggtttgtagtactacggtggaaattgagctattgctacggaagtgttttttctaaaaggattttgaattatgggatatattctgggttggtcatttgttaaatttgggaaatatcttctttttttttttggtttttgtatatttggtttgggcactgaaaattgaagcttgattctggggtggtatagcttgttatgttttgtttcacaggatgaggtttgaagatagtaattactggggatttagtttccgctttttaattccgtcctctccctttctagtcttgtgatgattcacatcagaagttggcggtaaagctaaatgtggtattttgtctttggatctggctgtttttttagattgaggactgctagaattttcaacaattaaatttcaaatttacgtttaatttggactatttgaactggctcatttggattctctcaaatgcttgaccccaacctagactcttgaagtgtctatttactatgaattcaatgagattggggatttcgttgtattataattttttttgttcttggctttgtcgtatcatcatttttattgttctgtcatggaaggaagggaatatttggcattattgtaaataattttatttttgatagagtatctggagactttcatgattgagaattaatgtgtttgtttgtgtgaatatggctgtaaaagtaaatagaaaagagatgcatttcaatcttcatgttctattttattgaagtttataattgagcagcaatattgtatgcattgtttatgttgacctatcattaaaactagggtcagacttgtaggttaggtataaacagtaagttttagcttatatgttgtttgagtcagtgcacttttatttcaaaagaaattatctcacaattttggtagttccaggtgttattctttcattttcattcacccagggttctccatttctctaaattttttactgtgatgaatactgattggctttaggatgactacgggatgttaagagggatcttaaaatgaaaataaaatatatagaaggggagcttagtgaataaggacaatcatatgctacttatctttcttttcattaatattgggctttttaccaatgaaacacaggaggacactagataagcaagttttcttgtccaactttaacagttttattatttttccaattatattttgtggtttgacctgattataagttttgtgggccagcttt

SEQ ID NO: 2630 - DNA, 2542 bp, Glycine max
  Intron number 1 from transcript Glyma02g10530.1 (locus Gly ma02g10530) derived from phytozome v7.0 (chr-ID Gm02; pos 8418598 to 8421139 reverse strand)
gcacgtcgcaggagcagtttgacaggttcaccgaggttagattgtggttttcatgcgcaaaccctaggtttttgctttaatttgttttcccctttgtttaaggctcaggtgatgttttaccgttgagatgtaattgaaagctttaattgttgaattcatggacaagctttgttgttattagactgggttgggggtaatgatgatgcgtatgtgcatatagcttgtacatgtaggttttcgtttctgatagtttgatttggttcacttggctagctggtgattgtcgaaggtattgttagggtttaaggctttaagctatgtatttcaaaatgtgtcttctatttttgttgttcttgtagtcttctaggctgcatgtactgttctattagttttttggtttccagacaaaattggtcaatatgtgagaacttccgtgcggagaaaattagaaagtttgtcgatttacattttctaaatcattaactcctgctgtttctgtaattgattggacaatgaggagttcaagaaaattgtttagttctgctgattttgtcgttgccttgtctgcttttgaaaattgattattttcactggctgcggtggtgcactttttgttttcataatttctcctcttgcattgaattggtgcaatgttgctttagatatttgatcaattaaattttcatggaatgtctgagccttgtctagtctgtatgcaattgtaaggttagattgtttagtacttttgagatatttggtcgtatcattttgtagtaataaatgaaatcatctttgactatctgccctgtccataacagtttgtcagttgtcataaataatttcattactttagcaatctgtagtttatttcaactcaatgagttgattcatacaagagtgagtctcccatggttagttgagtcatggagctattatttaaacctatttttcaaccttgagcttttggaagtgaactctcttcttaaactaattgcctgaagtgcattgctagcttacaatttttcttatctcataaacatacaaggatgaaagtgggttaggatttaattggttatctttttctagggtgaatttaagtttagaaacatattgaagtttcattgaggttaaatgacttacaattttctgaaaataggaagggattttaaagaaactttcttttgtatttgattgctgtagaaagtacccgtggaaagatgactttctatttgatatctttagggttttgatgggattgctttgtgttgctgtctgccaaggaaaatgaatctggaaacaatacaaaattaaagaaagcaggatcatgtattggagaaacctaagcactgcatttcacatctagggtttgattgcattacgagagtacacttggtcgcaatttgctgccataattcatgaaactgataattttattaagaaagcaaagatgttacaactttttaaataggactcttatactataacttatcctccaatggtatggaataaagtattctgtaaggatttgggcctccagctattatgtagtcaaaaatatcttaacaagatcggattcagctaaataacataagcccaatcgcaaattcaacccaagacgatgaaacgaaaattatgatatcccgttgggttgaaaattcttgaagttttattcccagatagggtggttagaatcttctacagttctacttgtatttgtcttgtgagttgtgagtgttggcctgattctttctttttgatttttgcaaaggatggtaataattatggtggttacaattttgtttctccttgtcaagaatatatagagtcaaaaacaggaaggaaaggtaaggaagtggttaatatattgaataaaaggcgttgattgtactgatcctactcctgtatttgtattgaggatattgttattagtttcacaatggcacatatcctttcagttagagtgcagtacaagcagcaacttccttaaatccataacacttccctaaattaccgaaccgtatgaaaacttcagacaataatacatatttgtgacttgtgttaattgttatctggtattcttgcgttgtaagtatagcttcaaaatacattctgtttgtgtttggccttttcagctcttggaggagagagagtagaaggattagaaggctttttttttttccatgcaattgatttggtttttctattatttgggggacctttgagatagaaagcatgaaatgcttaaagtcaggggaacatacttttcctctccattaatgagcatgctgaagttttactccattttctactgttgtcatggtttctcttaactttttcgtagttgtgtctctcttattctttgttggtttgcttttggtataccttttgttatttgaaattttgaaaaggggaaacttcaggggtgaaattatcttcagttttctgcaaggcattgttgtttgtgaatcagtggactttggctaacttactttttttctcttctgcagcttgctttaactattgtttatattgctgcgggagt

SEQ ID NO: 2631 - DNA, 2099 bp, Glycine max
  Intron number 1 from transcript Glyma05g35000.1 (locus Gly ma05g35000) derived from phytozome v7.0 (chr-ID Gm05; pos 39163951 to 39166049 reverse strand)
ggttctgaaggttccactgtcgtcggtcagtattcaacctcttcacatccatcttcatttcctaatatcttttttccttctctctatcaattactcttgtggttcgctaattataattatgagtttttggttgttctggatagagtctacaattactgttgtatatggataatgatgatacaaatgctttgtgtttgaagttgttactgtgttgcgtggaatttgtgctatattgttaagataaaccacaaattagtggtatgataaacaaacagcaagagcaaaacaaaacaaaaaaataaaaaagccaaaaagctttgattttaaagagtagtgtgtaataatgagctttgagtttttttttcttttcctatttattagcgaatatattttctttttcagtgttgttccttgctgagattgtacataaattctttgctgcttagtttacttagtgtggaaacttaggcaccatgctctagcatattctctctatatttaattgcatcttgcagcattgttgttctgtcctttaaccatgccactgactttggcatcattccctggcactatatttgaatgagctcacaattgtgtgcaaggttaggaaatagtttaaatacaaagattgaaagagtagagtggaagtaaaattaggaaaaaactggagggtcaaagtggtgatgtaattctctattaattttataaaaataaaattcaatctttttaaaataaattgtcattacatttacaaacttgtatatccacttattctggggatgtgatgcaaaagatggaggagattatgaaatactttctttggtcaggagcaggagattataggagggatcaagtctgctaggaaatgtcttttatgacttttgaagtcggatggattagactggccctgggaatctggtgtctaaaaatatttccttagtggttattggttaatctgttgatgcttccctttggacctgtgttattgaaaattagtagttatttgacctacactagaatgggtggcatgccacatgtcagtttttggtagttatatttgttgttacacctgttattttatccttttctggggaatggttttgctttcgattttgggaggatgtgtgattggggcaaatcctatttctttgaaatctttccttttcttgtcacatttactctctccatcatagttgctaaatttgctcctaccacccttgtcctatatagcaaagtttcaaaactaaattgtggtacttttgtgatctggaatgcaatttagatcttgcaaaatggtgaaccaacttcttgaacttaatgaaatatgaggaaaaaaaataaagacattgaatggaggaattgtcatccaattgcaaaaacgaaaaaaggaggaaatgagagcacacaaatttgccagttgcagagatgaagcaggggaagaatgtgctgttcgtggtgctggcggcatatgatgagcaagaagatgaaacctaactattcagctaaacatagttttgtgtaacatgtactgtaaaattgtcactcttctaaagatcagttaatgggatttctgtgttgacattggttctttcttttattggatttgaaggaacaatagactagattcaggcaggtgaatagggacctattaggctattattaataatctgaaattgggccacttgcttttgggctgaaatcaagcaagcttgatcacgtgtgggctaataccaacccagcttgatcacacttgatctaaaatcagaccaacaacttttgggctgtcattgggccaataactatggtactaaaattgacagtatttggatacagtcattctccttttatcaatcatagtggatatgtgaactcagatattgagaagtgaccaaatatatgctcaagttatgatgcaatttaatgtttttgcatatgctcccttttttccaatttacttgtaaatttaacttatcattgattgtgttcatcttttgttgtaactttttttttttaaatttgtaattggcacctatcttgtcaaactttttttgtctatgtatgtagttcctaggaacttcagattattggaagagcttgag

SEQ ID NO: 2632 - DNA, 2046 bp, Glycine max
  Intron number 8 from transcript Glyma05g08630.1 (locus Gly ma05g08630) derived from phytozome v7.0 (chr-ID Gm05; pos 8469784 to 8471829 reverse strand)
caggtctaaagataaatttgattattcctatttgagctgtgctttaacttgtccttaaaaagatttatattctccaagcccataataaatgaagaaattgaagagaatttttaattcaacttaggaggcatttggaagagcttgtagggagtttgagtttgtggaaatagcttatgactcttataagctctttttagtttatttcaataagcttctctaagaagcttatcaagataagctctttttagcttattctaataagttttatgtttcaaattcatggcataagctctagtgaataaccacttagttaagcttttgacctgaattcacccttaatctaaccatgttcatcttttcataactttttgtgctcttttaacatgtggttttaatatgtgaacatgtatttgtcagattatgttaaattatggagaaattgaattatacataatcaacagagttgtcaaacccatatgcatgcaacataggttattagtaatattattatgtacataatagaattgtaagaagtgactatgctaatccatctttttcattaattgtttctcttttcttagataaaactgtaatatgtatcagatattaaagctattaactgcttctgtcaggctgatttttgttgggataagtacctgattttaagaaactgtattcattatattaataatacccatgaagacgtttaatgagaatcaaacagctatgtagattgtacctaaacttggaatattgaaccttgtgagaagaaagttgattttaatttgctatattgggtttggtgatcagtggagtgatgatcttattactcagccttttggttgagctctttttatgaactctgaaacatgtgttacacttgcatctatacattaccttgaggaggaatgttgggaaatattattcttagattttgggcctaactcatccctacaaaaccaatttttaacatgaggattgcccaaacattatagactacaagttgatgtgagttctcaacccctaaagaggcaacattgtaggtagtccttcccgagacattgataaccaactccgagaagccacaattaaggcgggttagtggtgatcgcaattaaggcgactttccaacacccccatcacatcaaggctatggtccatgagcgtggcattgcccgtggccttacaatggatttgggataaactctgatatcaatttatgttttgggcctaacttgtccttacaaaattgacttggaaggtgaggattgctcaaactctataaggactacattgactatatctctagtcaatgtgagatctcaacccttgaaagttgacctcctggtggcttcacatttcgatgcttcagtcagattttctggtcagccccttcataggtagtcctttctaagaaactggtaatcaaatctgataagccacacttaaggcgggttaggggtaaccgcaattaaggtgactttccaaaaattattaacatggtctagtgtgtaatttgttagagttattaacaatgctatatgtggataaagctagtctaattggttattaagttgaaaccatgctatatgtgtaatttgttagaattattaacaattaaggcgggttatgggtgaccgaattaagctgactttctatacaattccttccttttcttttataatatctaaaataaaacccaacagaggttaataagttgaaatgttaaaaattgagtggaattatataacactattttttccactagttacagagcattcattttattttaagagttgcagcattgcagtattttacttgtgtaatgtatgtagcttctgtacttctttctggacataactgtgttacctgatcatattggcattgatgattctccactgcattcttccggtacccttttctttctgcatgtagccatgtatatgccagtgtatgtattgataaactaatgatgaattaagtttgaatgactgtgtttcagtttctgatttttttttttgaaaaaaatgttgtctacaggctgta

SEQ ID NO: 2633 - DNA, 6140 bp, Glycine max
  Intron number 3 from transcript Glyma09g09190.1 (locus Gly ma09g09190) derived from phytozome v7.0 (chr-ID Gm09; pos 8757348 to 8763487 reverse strand)
aaagtgtcatttaacaagtaagttcaaccatgcctatatatgtaattgtaccatgcagttttttccattatttgtgctggtgtagttacatgcttcttattatgatatttaaatttctcctcagtttggtgttctagaatttactggtgtagtcacctctcattaagttattaaactgtatacagatgaacttaaaatgtgaagctgtaagaactaagaagtgcttttctatgaggaagggagcgggactttttctttttgaatacgcgaataccttaagtcaaatgactttaaactttaaattggtcagatttattttgttcttaagagtagtggtttgagtaatttgcattaaattgttatggacagcaactgtttagtttaacaattgagtaagttgtcactgaatccagctcaaattcaagttaaatctttgacataaaccctgaaactttggtggttgttctaagttgagtttaggtcagataaaaggccaaatgtcatggtttgagtcaatttgatgtttaaaaggaaaaaaagatgattatttaagatggaggtgttgctgggattttctaattcctattttggatatatgaattattaattgtagcctaatgtcggtatatgttgctctctcgcgtggtacactggtactgccagactggtcagtctaccattcggcatttacgtggtagatgtatgtttggttttatgattagcatataagtggtactttaaggagttgcaaactgaaattgggtgctatttgaagaggaaagggactgaaatggagtttctgctaaattcaaatagtaaactactaaggcctttttgaataaacttctctataagcacttataagaaaagaaaataacatagtaaaataaattgaacttctcccataagttaaacttaacttatgtgcttaacttctatagaagttctcttattttacttctccaagagatgaaatgcataatttgattttagcttaggagaaactcaatttattttaccttcttatttccttattggtcataagtttcttatctgaagccattggttaagctagttacttagtctaacatttttatgacatgctatattgaacacttctgagtttgttatgtgattggtttttgggtctgagaatctgactttgttccacacggaggcttggaaaaatgttgggtgtattggaactgttacctatacttatgattgatacccattggttaattacttagttagtagttggttgaagaaataaggcatgtgcctgaaaaataaggggaggtgaaagagtgtatcttgtcatttgtgagataattggggcctttggatattgggaggtgtagaccctggaagttttgtgagttaagcactgtattgagaggaggaaacccttattctttctaataagataccttgtttctatcatcttattcatgcatgtaaaattcggaatcgtaactattctgtggttttggttggtttcttttgaaatgcatcccttggttcttgaagcagtcttaaaatgggatttatactatccaaaccattggatttccaactagatataaatatgtcctacactcatatccagtgtgcctttggttcagaatagatgttttaatgtaggtattccttttaaaagattgttgatatcccattattggaaaaacaatctgtttagattgtagtagcaacttaatcaaggttttaaattgtggttgtcattgtgattgcaattaggactgaggagctagccttgatcttggccatcatatgccccttgattggtgtgaggtgtgacaaatgaaactgagaggacttatgagaaattcaacttaacatgttgatataacaccaagttttcttgttatgtgtgtttcaaatggagagtcccctattatgtatgtataacaaaaggggtgagagagcaacaaggggaatttacctataagagggttatgacaaataaacagacaattagtgggagtgaagagactaaagagggggcagcaaagagcatttaccaaagtgggatatggcaaatgaatatgcaattagtggaagtggagagaatatatagggaagtggaggatggtagagggtagggaaaaatatttggatattgggatacctctggcttagaattctttccaagaggacacttagagcctgtttcttttcatttacaaaaaacagttttctagttttttgaaaattaaaaaaaaatcaaaaatcttgtttgatagatgaaaactatttgtttggggtggtttttagttttaagttttgaaatattaaaaaataacaactagattttagtattttagttttagtttcaaaatttttttaaaccaacttttaattagtttcaaaataaactcattttaaaagtttcatatcgtattataattagtttaagagtgcttttgtgtggtgatgatgacaatggtgatggtggtgatgtcagccgcagcagtggcagtagaaataccaacggtgatcgcggtggcagtggcgatagtggcggtggtgatggtagcgatgttggtgggggtagttgtgacgacgttggtggtggttatggtggcagtgatggagatagtggtggtggtggtgacaatgccggtggtaatggtgatggcgatgaggatggtggtggtggtggtagtggtgctggtagttgtggtggtgataatgatggtggtgtggcggtggtggcgatgatgaaggtggtattgatggtggttggaacaaaaaagtcttagcgtcaaatgtgggtgtgttttcttaaactagaaaccaaattcacaacttttttttcttggttttgaaaatgagcgtaaaaatgtttcgaaaatgatttaaaaatatttcagttctatttttgtcaaacatgttttagtttgaaaattgtatttgaaaatcaaaaaccaaaaactcgcaatcacctccaatgaatcctaaagaagttttgttattttgataacacacgtggcacataccccaggcatttgacatggtaaaatacagagtgaggtctaaggcaattgtgcaaattcatagcaaccacgaagatctccaacaatgcaaagacatcacagaactctcctatagaggtttgcgctcctgtatctcctacagtaaaatccaagtccacaatgcaaactcaaaaagagaaagaaaccaaacaaggcaaaaacagaagagaaaatgagaacatcttccacctgtttctgtttatttatttttaggaattgttctagagacaatttttaaaacttaatagactgtagatcggaaatcaatggttgggtagtctaaaactgttatagagaacagtttttaaaactaaaaagagaaaagggaatcaaacaagctcttatctctccccacgctcactaactgcctgttcatttgccacaacattcttaggtagaatcccctttctgcccttctcacaccttctgttatacactttaattataggcctatcacaaacttcccttgcccccatgctttcttgtttctcatttgtaagaaaatgttaggaaccaagaattgaaatgagaaatagaagaaagaattttattgactagtaagaaaagaacagaaaataggagagaaaactctcctccaaaggttttacattcagaaaggatttctcctctcacaaagagctaatgctcactcaatctacaaatgataagatctccctctctcctatccttcttcccctatttatatctaataaacctctctaactaaccaactagctcgttagtagtctaactatatcaactaattctctcttctccttatatcctagaaagacacccttcctaaaataaccttgtcctcatggttggaatttgaaaactggaattgcacactgaaacttcctcaatttttcttcgattgctgaaagacaattgcaccccttgtagcttaactaggaatgacccactgcccttgcatgcagggttgagttctatggctccattggaggttgggatggaagcaaattctgaataatccggacctctatgtgtggtgctgcatcagctacacagggctccaaatttagtagtataaatcttgctgcccagtttgaacgcccagtttctgctcctcttgaatcccaatttgacagcccatttgggcctgacccactacgtaaaaattggaaacacttcgtagaattccaaaaattccccttcatctttctcatccttcagaactaaatcatttactctaacaagatgtacctctttggtgtccctccatgggggatcaattgtaaacccactaaccacttcatacaaactcaggtccgacagcttcaatggtggtgggggcgagggtggactccgtataacctgaatcatcatgactgcctctgtacatcccttctgccttggttccattgtcagtctgttatccatagacacaacaaagtttaatgctaaaggctcacccaccaagttgacattccaagattccgacaccattgatgttccaaccaccttcatgaatgatttttgtttcatcataacaacctttttatgaaaatatgaatcttgaaaacaatgaggcttggttgcatcaccagcttcgacttccttcttgatcatatttgttattgggttatcaagaaaattgtatttacagcccacatcatcactctattttccttgtgcttctccctctttaacaatggatcaacttcttcctccataaccttttcaatctttgtttctcttactaattttgcttcatcatttttggtttcttctccaccacaaagtgtgtagttcttgattactgtacctttacttttgttttctgatttcaagaactgcaatgggtcatcatcacacccaaaactcttacccttcaagtcagttccctattttgtgcttccatcaaaggtgggtaattccacctttcttgtccaagaactagcctctacttcattgcgttctgacccacttccccccatgctatttttgtcttgctcagttgcctggcaatcagcctcttcattgaataatatgcgcagcatgcgtttcagctctgaaatgttggtcctctctttcaagaacactgtgaaagtcttcctttcttcgattcaggtttctgtcacagcttgctcttctttcttctagatagtcaatctttcgaagacacgactaccatagttatctccaaatcttttgatcaaagctgtggaaaatgactcccaatctgaatctatgtttcttggctccaaatgtagaaccaatgcatcgcaacaccctccatgctcatgaatgcatattgcagcttattgaatgaaggaatttcatgtacctcagaatttttcagccctagcaatccaaccaattgggccttcccccacaaatgctggcagcaccctcttatgccaactttgtgcttcctccatctctaacattgttggtccctcgaagatccagtaggttgaaccaattgttaggaaccaagaattgaaatgagaaaggaaagaaattttttattgactagtaagaaaaaaacaaaaaataggagagaaaactctcctccaagagttaacccttatcaaaggatttttcctttcataaagagctaattctcaatctacaaatgataagatccccctctctcctatccttcttcccctatttatatctaataaacccctctaactaactaaataactcattagtagtctaactatattaactaactctcccttctctttatatactaacagaaaaccagataagtccaacatggtttcatattatgtttcttgctttctctttgcctgctctcattaacaatcggaatattgaagaaataaatttaatctaatggaggtagaactagaagtttcacatgcataataaactagtcgatgcctttcacattttacttttggttcaaaaagtggtctgtcaatgtttcatttgataataatctcatttatttctgcttttgggttggaatgcagtatgcacatgatacaaaaaaaaataatctgtttctttttttattcaaaaaatattctgttatcttacacctaatgctggtatttccagatttgatttttcaaactcatacat

SEQ ID NO: 2634 - DNA, 1127 bp, Glycine max
  Intron number 12 from transcript Glyma09g04710.1 (locus Gl yma09g04710) derived from phytozome v7.0 (chr-ID Gm09; pos 3541950 to 3543076)
gattcctgtatgcatcttaatttttctcttctttactttattttatctgtattttgtgatttcagaagcttttcttatccatctatcaggtttgatatattaccaattcctcatgattttcaataataggcatgaacttatttgttatagtcttatagaccttgattattggtatattagtattttcaccattttctactttttattgtcaaagttcacactattttactagatagtccataatctcttttagtgaatactagtcacaggataagttaaatttaaggcttttgatgtgaagcactcgaccttatacaaaattaatgcttttaagatttgtttagaaagattattaaatatacaccttagctcaaactttgtgagttgtacattgaaatattaaaatgccaatgcagaagtttcaaaatttggggagttatatgttgaaattatttggattatctaataatacaatactaattactaaatcaatgttcttatttgtactaatagttaggtaaaatacttgtgttgcattactagtcaacccaagctcacaaataagactactaagcctaattaaattaaataaggaaataaatcaagaaatataaggaataggaaataactcctaagattgcctcctcaattagatattttcttgattttgccatatattttaataaagatcatgtaaggtattctaaatattcaaagatacaacacaaatatgagatattttgtagatatcctaccccctcccactctcaaaaaaaaaacttgataaaatctaagcttgttaaaaaaggatacttaaaaaagaaaataatataaatataaagggtccatgaaacatgaattgaaaaagaactcatggatgctagagatgctggagggatgggcatttctagaaaatataactcaactggacagctaagaaaatattcagcctgaagagctagatggcctattgcaatattaaacatttggcttctatgattattttttaaattcttttattagctttcagtgttactatgtttttttgaaaggaaaaaaaaaggtgctctgaatgtatctgcttttatgcagcttgatagtgctgtgagagcaagaaatcttctctt

SEQ ID NO: 2635 - DNA, 1639 bp, Glycine max
  Intron number 1 from transcript Glyma17g04180.1 (locus Gly ma17g04180) derived from phytozome v7.0 (chr-ID Gm17; pos 2782055 to 2783693)
tgcgccagcagaactctgctgtactcaaaattcaggtttaagtgcatttgcttgattttatgttttaatcttgcaatttcgttgtgcatcagtgtttctattatacatttgtcaaattttgtagcaagtgaaactagttggattcttctaattgtaatgcttgatggtgtgaaattgttgatgtgtttagctgcctccggcaatttaggttgtttttgtcaagtattgctccactgtttcaaattccatcatgttggaatatgtatatatattttaaccatgttggtaaggagtatccaccgcctttgctgatgattaatctccgtctttgaatccgttgaccaccttcagtagggttctttcctcctaatcacgtttttcccatccagaaggctcgaacatgagatcttgcttaaggggattggataccacttgaactaatgacttgttggtcggaaaaaatagaagtttagaaacccaaatgtgtatatataatatagatgcccatatgggtatatactactcaaattcttaggtgatttaaagagttttttttttatgataaattaatagtttttaattaaattcttattaaattaaatgctctactaatcaaaatattataattaaaaaaccgaatattatagtgtcacgccaacaatttagcagttgttttcttattaatggtcaacgtcctgaaattgacggttgaaccaaattccttgattttaaaaaataggaagatgaaatgtctctatttttttataggatccaaaattgtattttagccaagaaaaaaagactttgcttcactagtttctctgtcactcaagtttttgaggaagataaagttccaagagaaatcagaacaccaaacacaagagaaaacatttttatgggcaaattatacaaatgttcttatatcctgattcccactttcactctgtaataattttttttgctgtattatgccatgcatcacggttgtgcattaaatcttaatgaaagttgcattgcttgttttaattttggcaatggttgatgctcctcaatttgtatggtttcatgattcttttattttaaatttaggtttaaatatatttttcttccttgcaatttagcatttttatttttcgattttgtcctttcaattttttttttcgtttttgtcctttcaattttttttccgttttagtccttgcaaaaagtgtttgtttcatttttttcattcttaaagcgcttcagataacactttttttactattcaaaatacttgtttactgttcaaagcgctatctatagtactttaaggacgaaaaacaaaacaaacacattttgaaaggataaagaattttttttataaagatgaaaacgaaaaaagtgctaaattgcagtgaagaaaaaagtatttaagccttaaatttataagtatattcactacttcatgaaaaatgaaaacaagattgcagtgtcatgcagttcctaaagtttagctgcctagattgtagtttgacatgttctatatactgtgtggaaatttaatacaatgaatgcctactgctgggaaggctcattatgttggtgggagtcaacatctttcatgtgtcatgcaaattgttgactgattctagctacagaa

SEQ ID NO: 2636 - DNA, 6180 bp, Glycine max
  Intron number 8 from transcript Glyma20g08880.1 (locus Gly ma20g08880) derived from phytozome v7.0 (chr-ID Gm20; pos 12618198 to 12624377 reverse strand)
ttctcattattaagcagccattgtgtagtttgaagaggctgctgtaaaaaaaaatatacatatactgatctaaacatgcaaatcaatttaaatgacatatttagatcaaacaacggaaattaaaaatagtacgagcgtacctccagccattgcaaattgaacgggaagcagcgcacacacgaacctgaaagacagttttgttcttccagatccttactcactctgaatagatggcgtatttttttctgaatagagaagtgggtttggtgatacaaaactgagagcacctcaccctatttatagagtttgtccatcacagagttctcaacttgttatcagaacgtgagataagaagttattcagtacgtgagataagaagttatcagtacgtgagataaaggatgtgtacgtgatttgttactgaaggtggttgcaaatatatttgcaaagatatgggatgaatgtggatggaaaatggaccagattcataaataacaaaattttccaaaataaaaaaatgtagaaagaacgtgcaacgtgaacgtaacgtgcgcttccaacattctcccacttggtccatttaacccaacatcaaccataacaagaaacataatatatgagtcatggcgataggtcctctgatgatgagtagtatcttccatgtaccacaatatatcaagtctctcaacactagctctcaacttaatgaataaaccatatgtttattctatatctaaaccgaatgatttttctcgaaataaataaatatgtgcacaaaaccatatgagaaaatatctaactgaataagagtttcattgaaaataacaaatgtacgtacaatgaaattacatcatggaaccaagtctcattcgtactacatgatccttaaaattctttggtggcatgcctttagttaaatgatcagcaatcattaactcagtgttgacgtgttcaatgaccactatcttttctttaacacgttctcttatggctaagtacttgatgtcgatgtgcttacttcgacttccatttttattgtttttagtcataaacactgcaacaaagttgtcacaatacaactttaatggcctagaaatagagtccataactctaaggccagatatgaaactcttcaaccatacaccatgcaaggtagcctcaaaacaagaaacgaactcagccttcatagtggaagtagcagtcaaggtttgtttggcacttctctaagatacaactccactggctaacataaaaatataaccagatgttgatcttcgtgaatcaacgcaaccagcaaagtctgagtcggagtagccaatcacttccagacaatcagtttgtctgtacatgagcatgcaatcctttgttccttgaagatatctcatcactttctttgcagctttccagtggtcaatacctgaattactttgatatcttcccaagactccaacagcgaatgcaatatcaggtctagtgcaaacctgagcatacataaggcttccaactgctgaagcatatggaatatttttcatgtgttcccgctcaaaatcatttttggggcattgactcaaagcaagtttgtcacccttcacaatgggagctacacttggtgaacaatctttcatattaaatctctctaaaactttgttgatataggtttcttgagacaagcctaaaatgcctcgagatctttctctatggatctttatgcctatgacataagatgcctctcccatatccttcatatcaaagttctttgagagaaattgtttcacctcatatagcatacccttatcattagtcgcaagcagaatgtcatctacatataatacaaggaaacaaatcttactcccactgaccttctggtatatacattgatccatgacattctcttcaaagctaaatgaagaaatgacctcatgaaattttaaataccattggcgggaggcttgtttcaatccatagatggacttattaagcttgcagactaagtgctcaccaacactagataagaatccctcaggttgtttcatgtaaacctcttcttctagatcaccattcaggaatgccattttcacatccatttgatgcagctcaagatcaaaatgagctactaatgccaaaattactcgaagagagtctttcttagatataggggaaaaggtctctctgtaatcgattccttctctttgagtgaatcctttagcaacaagtcttgccttatgtctctcaatgttgccttctgagtctttctttgttttgaagacccatctacatccaatggcttttacaccaacaggcaactcaacgagatcccaaacttggttagatgccatagaatccatctcatccctcatagcattataccacaaatttgattccttagaactcatggcttgtgaaaacgtctcaggatcattttcggctccaatgttgtagtctgattcttgtaggtacactacataatcactaggaattgctgtcttttttattctagtagatcttcttaatgttgtttggtcatcttgctgaggaacttgttcaactggttcttcaccagtttgttcaatatcatcatgttgttcctcacaaacaacttgatctacatgatcactttcaacagcttgtggaacttcaatcaatggttgtctaacccccattttaacttgaggggtgggaatgactattacttgtcccagaaggttcagcttcatagtgatccctttcagaagaaatgttctgaaattgatcactcccactgatcaagtcattttcaagaaactttgcattccttgattccacaatcctagtgttgtgggatggacaatagaacctataccctttagacctttcagcatatccaatgaaatacccagtaatagtcttagggtctagtttcttctcttgtggattataaattcttacttcagacgggcatccccaaacgtgtatatgtcgcaaacttggtttccaacccttgaataactcaaaaggtgtctttgagacagccttggttggaactctgtttaatatatacgcagccgtcttaagagcatcaatccacaaaaattgaggaagctttacattactcctcatgcttctcaccatgtctaataaggttcgatttcttcgttctgccacaccattctgatccagagaaccaggcatagtgtattgggcaacaatcccatgttcttgaagaaatttcgcaaatgaacctggtgcttgtccatcctctgtgtatctaccatagtactccccaactctatctaatctcacgatcttaatttgttttccacattgtttctcaacttcagccttaaaaactttaaaggcatctaaagcttcattcttagaatgaagtaagtagagatacatatatcgtgaataatcatctataaaggttatgaagtatttcggactatttgcatccatgtctggacaacatatgtctgtatgtatgatttctaataaattagaactcctctttgcactctttttagacttgttagtttgcttacccttaatgcaatctacacaagtctcaaaatcagcgaaatccaaagtactaagtactccttcatttactaatcgcttgattctctcaatagagatatgtcctaatcttcggtgccacaacatagaggattctttattcacaatacatcgttttaatccaacagaaacgtgcatagaagtagcgttgtttttcaattcaatcgaataaagaccatcaaccaattgaccacaaccaataatttcaaatttatttagtaaattaaaaccaaagtctgtaaaattaaaataaaatcccaaaggtgcaagtttagaaacagaaattaggtttttacagaaactaggaacataaaaaactttctccaagtgtaatttaaagccactacttaaaactaagacgcacgttccaatggcctctacatgcgagctcatcctactccctgagtagatgcactgctcacttcacactggcttccttaggctttccataccctgcaaggtattagaaacatggattgtagaaccagagtcaatccaccatgtattatgattcacattaatcatattagattcataacaaacaaaggcaaatggtgtacctttcttctcaaaccaacttttaaatttggggcagtccttcttcatgtgtcctttctttttacagaagaaacactttgacttctttttgattgttggttgagtcggaatctttcctttattggtgcctacagacttcttcctatcctttccagaagtagaagtagtcaaatttaccttctcaccctcttccattatcaatttctcctcttcttgaacacacatggtcatcaattcattaatagaccatttatccttatgtgtgttgtaggagattttgaagggtgtatactgttgaggtagggtgcacaaaatgaaatgtaccaggaaggattcagacatggtaacttccagggttttcaactgagccactatgtcccttaagcgcatgatatgttcacgcacacccctcgtttcagtaagcttaatggaagagaattgcataatgagtgtgctagcaagcgacttctcagaggtcgtaaattgttcatcaatggctttcaacagatctctgaccttatcatgctggtcaactgaaccccgaatactagcggatatgttggtttttatgaacataacggagagacgattagatctctcccacttttcataaagatcaacaacattaggttcgctagtttcagtaatagctggtggctcatccttccttatagcatagtcaatatccatccagcccaaatgaaggagaactctttccttccaaaccttataattaacacctttcaaaatgggaaggtcacaagaaatattcatagattgtgaaactgaaaacaaacacacatgctcattaagaaaatttgagactaaacaaatgtcatgttttgccaatgcaaatcatgtctcaatatatgaatctagtgacacaaaacttgcctgtgggctaaagtcctactcaattagattcatcatgcaactttatgataaaactattaaatcatgttcttttccttaattcctgtgggtaaattaagaaatataatttaatattttatcctaattaatcatacaaatataacaaaattcctgtgggtagatttaatcacattacatatgattaatcacaattaatatttctaatgtgattataaatttagcatataattttactcaattaaagatgatgtgactattctctaatttaataaaattatattaatcacttaacattaaaaaataatccttgcataaacatacttaataatgcaaatatgctcaatattgaatcataaaaattacatgtataccaattcaaaataacatttcacgtatattcattcaacatgtaataaactttaaaggattaaatccaatgcatatcggtatttaacataatattgcatattcagcataacttagagacacacaattttaaaccgtttgtgtataaatgatttatccttcagaagttataaatacacatgaactgcagttaataaacaattaaattgcaatagcttagtggcaaagggagtcctttcatgcttgccgatcatcggttcaaaaccagcccaaaatgttttcgcgttccttttaattaattaaaaacgaaaacaagcaacaaaaggctgtcaatgagattcaaacccagaacaaagaggtaatatatattgcatctaccactggaccaacttgtgctttgtttaatattgttaatttaaaatgtacattaacaattccaagacagtaaacaaaacccgcaagacttcgtcttcaacctccagcgaggttcaaaaaaagttattattacctcgatttcgaaaaacccacatcattatatgcattttagacacccaaaaatacgttttaaatcatagaaaaattagaaaacttatatcattcctaattttaatgttattttgaattaaggaggcttaaaacataaccccatatactcagaaaataaactccgcataatatgaacgacccaataagcaagacagaggtacaaataggctctgataccaaatgtaaaaaaaatatccatatactgatctaaacatgcaaatcaatttaaatgacatatttagatactacatagcaaggctg

SEQ ID NO: 2637 - DNA, 1788 bp, Glycine max
  Intron number 8 from transcript Glyma19g35080.1 (locus Gly ma19g35080) derived from phytozome v7.0 (chr-ID Gm19; pos 42655465 to 42657252 reverse strand)
aacagcttgaggtatgaactctgatcttttaggaatttccttctgatgtgttcattgattgttaaaagactagaaatttgattcaaaggctcgtttgcaagctgcatttctgccacagttgtcatggctatcaaaattcatcatttataacttaatggaaatagtgagaatgaacttttaggacttactagcattatgaacttcaaccgatgtttgtgagcatggtgaaaggaattgaggaaagtaacttgcctataaagaaaggagttaatattgtttactgtttattcttatttttttgtttaagtacaaaagttgtctaatttcttagtggcatatcattctcaaaatctcaataaatgaccagtctcaatatataatcattagattagtttcatatcattgtagataattgcggtaccttttaagtagagaagaattctcttagaatgtgggtttgggcttaacttaaccccaaaaagttagcttatagggggagggttgcccccccacatatatactctatcttgacactatctttagccgatgtaagacttggatttttctcaaaacatcccctccacctaatacttttgggcttggtgcatggataatatggtgggtggctcttttaatggatctaggataagctctggtatcgtcttagaatgtgaatttgaacttaattcaaccttgcaaaaccgacttgtaaggtaagggttgccccccacttatatactttaatttggccttatctctagttgatgtgggactaaaccattaaaccaccacccttagtgttgcacttcaggcaaaacccccaaaggggctgcaactaaggcgggctaaggagtttccacaattaaggtggcttttccaataaattcattaagaaaggaaatggtagaaatcaggagaatcctgaatcttccaaaagctacaaagcaaacaacagcaaagagagtgagtgaaaaaatcagctcaaaagaacaacccatcccctttgcaagtcttggattcttagaattacacttaaaaaaccacaagggaaacctgcgaagaggctatgaaagtgcgtcccataaaagttgaggaggaattaaactctaacataatacactgggttctttcgaaaagtggacacttccatagcattgatttgttctttctactccagaaaccttcataacctgcaacatttggtaatttctgaacagccgaaatggcttacagccttgcaacaaacttgccacgctacctcacaaaacaaaaagaggtgatattaattttctttatgttcttatcaattaggttgtttctctttgctattgcttaaaaattagatactaaacataaacacagcatgttaatttataggtgatgcccatacccttgactacttgtagaacagatagaactatgctcattaagtcttgcaaactttcttttgaaccttttttttttttacccttttaattttaagaggaataaaagaatatggttactatagtttgccatgtggactatgggtatccctgactacaatggtgagaacttttgtttcttctttgagcatgaaactaatttctgtaatattatttggcatataggttatgcctaatagaatttcggggtatgggacttttgttatatcccatgcatgaaatttccaaggcatactcacttctctcttatggttgttcctttttccacggtatgatctgatacagttctctcctattttctatgttagattcaaagaaatctacagttgcgaatagaagaaca

SEQ ID NO: 2638 - DNA, 1630 bp, Glycine max
  Intron number 4 from transcript Glyma03g01080.4 (locus Gly ma03g01080) derived from phytozome v7.0 (chr-ID Gm03; pos 806108 to 807737 reverse strand)
aatcttctcagcttgaggtgtgaacatttcctttcatcctattcaactgcaagctggttttcctttctgatatactgtgttgttttcatatggaattgtattatagaaaaactctttttgggaagaaaagtcttcaaataccttatatagaatattaatctcaattccgtcaggtaatattaataatctatattgatatcaccattagatttttctacgtttgtgtataaaaaaagctaacaatataatgtttttaatttactaaatttaattaatcataattatccgtgtgtaggaaaaaaattatattatgtattgtagaaacaaccttcatatagcatataaaaattcatgttggatttgtatttgatggaatattaaagcatgtatcgtaaagctgtgatcactgtgacctttcttgagttgctacaacgaggtttaactgtatttttgctatagtgaattgagctgtattataacaatcatagaatggctttgtatatcaaggactacaatgttttttaggcttatgaactaagtattaaaatttgatgaaataatttgtttagtaattcaaaatttgcaggctagctcagcaactgtagatgttattcccatgtttcttgagagtgcttgtgatcttgaaattgattctgaggatttgattatctcatctcccttgattcatgggaaaaacaagagacaaactgatcatacagtttgcattcagcatatacctactggcataagtgtccaatcctatggtatgcatatgtttgtgttgagatgttggcttcttagtttctgtttttttccattatatattcaagattatgttttctgtttccattttgtcttttacaaataactacaaaaactatgaccttgtcttcattttgtttccatttttcaaaggttagtataggaaatgttgagttttcccttattttgactttgtttcctatttttagaaatttgtattggaaaatcttttaaaacaagtgaaaaatgaaagcaaaggtgacattttcccaaaccaactagttcctatattttgaaagcttatgtaaattacaaatatttagtgaattcaatcatcaaatgggttcatataattcaattatccattgggtatttatggctgaataaaaattataaaagagattaagatgtcttttgctacattggtctaccttggactgccactatattatggcatgattgatacacagttgtaaattctcaggcctagttagtactgttcaatttgtgctttagggttgaggaccttgaaaattgtttcacatggctgcctaaagagatgaaatggttaatagttgtaccaggcatcgtctgtataattggccatggttaatccagcttgcagttacattaatgtaacacatggagaaaactagccagtgcatgaggaagaaattaattttttgttcactcattatttgctttttaaccacatgtcctgacaatcattccatagaactaaataactaccaagtcagtttcccttatttttgaaaagaaaaatctgctaagcataaaaatggggattctacttaattacattttatgttgtctttgtgcaggtgagagaagccactttgcaaataag

SEQ ID NO: 2639 - DNA, 2601 bp, Glycine max
  Intron number 2 from transcript Glyma03g25210.1 (locus Gly ma03g25210) derived from phytozome v7.0 (chr-ID Gm03; pos 32256254 to 32258854 reverse strand)
cattacaggtatgagactcaacaaattccttgagaagtaatttctgagaatgacatataaacttttttatgtttaaactttagagagcatttagagctccttggtccccatttccagatgagtaaatataaagagcataaattcagtttagataaaatggtcaaggtataatttcttagttgttacctctattttctttgatgttgtttttattcatgtaatgtggtccatcacagaaatatcacccagcttttatgtagtacttgactatttagagtttttcattttagtttagtaattttcaatgtcaatattcatagcccatggacttggaatcctcacaggtaagaatacagagtccattacttgatgtacctccaaattctatttcagtaattttcaatgtcaattatcggttaatgagatgagctctctatcttgatggcaatggactctttcctgtaaaagttttacttgattttgtcatgcagaatttttggtcagtctatctcttgatggattttcacaaaactagacgcatggtctttacatgacaaggtcatatggatatcatatatgagaggatccattccctatcttaactactcaaacttgaacaatttgccaatacttaggggaattaattgccttaaattcaccaagacaatgtggggagtcctaccttaagatttgcttagggagagatttggtctgaattgatatgaaagttgatctaaagatacatgtacggtcaatgagaaaaagaaaaagtaaatttccaaattccttaagattgtatcatactatttttaattcttgtgcctataagatcaggtcaaacagataaaataaccaaaaaatggtttaattctgtgcaaaatacttcttcaccattgatgaaccatgtgtgtagaaccagtctaaactacatgtctacaacataaacaacaaaagccttatcccactaggtgttaggtggaaccagtctaaattttttactacaagttgaaaaccttaattactacagtgattgtggcattttcttattcactgttggtgtaaagttacactgatagaaatagtggatcaaaatagaaaatttagttttggtagcttattgctttttatatatgcttgctatttctacaaattgacaatcactgtccatgcacatcttagtccagtgttaggaatgaggaaacaagaaattgtttgttattaattaggcttttgaactactgtggatattagaattttcacttttctactttattgttgtattctctgtctaaagatctgcgcaaagcaatgagccaatgccaggttatctatggtattattatttagctgttaaatccttgatcaaatactagccaatactcaatgtattttgtcatcagtattcctagccttgtctctttgatcagcattttgactacagaggtgattttctttttccttctgatagtttttaagatcaatattaatgatattgctgtctatgttacctcatatataaattactgaaagctgtgcaaacatggtcaacccttttttatccttccctggctctgcactgatattccttgtcctgaatggatcagaagtttgccttacccaatagatagagttatgtcatcctctttgctatctatctactctctaacattggtaaaaacatgtgtattggctactgggagaccgagacgatacttattctctctgttattcagttatctcagaaacaactagtagtacctcattacattagtccatgttaatctatgcataaataagtcagtcgagttaaaaaatggcatctataattatgcattatagttacttctttcaacctttgaccttagcttcaaaataagatagtgagtgttggaaataatctcctttttaggggaaaagatctctcacttaggagctgtatatttattgctaataaatggtagttgatttgtatattttctgacttattccagacttatctcctagttttctagtttccacttcctgtaattatagattgaaattatgtgctatagatatagttctgctgaggatttcttcaggcaattcagacacaaatcctctgttacaattattaatttgatacttttcctgatgtatttatactttatagccatattttctactcgaaaatttatctgattgaattgaatgttttatgtgttaaggcatagtttacatctgcagacattatactgtaatataacttcataattggatttctgcatgtctggtataatttttttaggtgtagtttgccactgattaataaagaagccatatattattcttattgaaaagtacaaagggactatgatgtattaatggatcttttactttaatgtgttaattatgtgtgagaaaatattttaatgtttctaagttactatcctgaaatatcaattacattacatttttgttgtttatgcatgcacatatttgtgtgtaatccttatcttagaagagctaaaatgttctccttttttcctttttgcattgaatatggtgatattaggatattcctttgaccgtgtttccttctgtgatgtagggccataagca

SEQ ID NO: 2640 - DNA, 2137 bp, Glycine max
  Intron number 2 from transcript Glyma14g34480.1 (locus Gly ma14g34480) derived from phytozome v7.0 (chr-ID Gm14; pos 43033606 to 43035742 reverse strand)
ctcgtgtaagtgtgtttttttaatttgtttgatctgttcatgaatgggtggaacttgttggaaccataatgttctgtcgtgtgtcgtgtgctgtttgctttttgctctgattctgagtttgaagcagtgcttttggtatattgaacatgattagtagtaattaattattgtagttggggtgtcactcctgcattttttttaatcagagttgctttactaattactaccctgacaaatctaaagatttttgtcttccatgcaattgtaagtgatgttagttttttttaaagcttaattattaattttatcttcaaattattttaaataattaaatttgatttttaagtttttaaaaattttaatcagatattatttttaaaaaaaaatgaatcaatttaatttttaaattcttaaaaatttaggacctaattgatttatttttaaaaatttgtgaatcaaatttaacattttaaaattaaattaatttatttttaagaacttgttaaattaaatattttaaaatcaaaattcaatcatttaaaataatgggtagcaaattaataattaagtaattttttaaatttgtttttgttgtttcttgcatccatgatttcttggaactcggaacataatgtcatgtcgtgatctgtgttgtttgctcttttttcttttttgctacaaaggaggccttaaggccgaaaactaaacccataacaaagtactagtagagttgggagacattaagatcgttcctaagtcaagattggaggaaggagatagctctttttctgacttttaagcagtttttattgaaaataattgtacattgcaatttgcagtctttgaaattttgttttatagtctctccaatggaaaaaaattgaatttggattccttattagtttttaatgggctccttattattatataaaatttaagaacagtcctgacaccttaatttttattctaataaaatttaaattgagtttttaatataatggtcctatttttatctattttcttatataaaacccttctttttgagttggattttttttaatgattaagcaaggtaatcttgcttgtaatttacttatacaagaaacttttacaaaaattttataaggacttatttgctttaatggtattcttaaattgtttaactttaaaaactaatataatcaaacaagtgtgtataggatatttctttaaaatttattaaaaaaataaaacattgtgagtgaattcaaaggagtaggaataggtgtgatttttaataaactttaactaattataaataatatattttacatgttataggttatttctgttaccactgatgcactttagatattttgaaagaaaataggaaaaaagagagaatttataatttttcaaaaattattgttttattttaccaagaaaaaaaagggaaaaaaaagaaaggaataatactaggaacaaagatttaatatttagattcaaattaaaatttcaatatatgaagtttttgcttgtttctatttatcttcaaagttcaaacagttaatgagttagtgccttattttgtcattatttgctgtcgattgtgttaattttgtttgtatagtgtacttggctgatcgaagatgatttttggacactatttagtatttttagtttgagagaataaaaaaacaattaatatgattaataatactataatataataaggaaaagttgtgattctatataaaaaaaaaaaagaagtaaaatttgagagaataaaaaaacaattaatatgcttgtattttgtgtttgttcaaatataaacatccttcaatccttcgctgatttagcatgactactatgaccaagagaacctttatatagctagaagagatgtgaaaagtaaacaaagaacacacgtgattgaccttctaataatatcaccgctttttgacgtttaagttgaagggtgtaatgcaattaatgtttggacattggacatggatataaagttaggttcatgatgtgacactatgagagtgttacttcctttttttttttttcttctaattatttttcccttttcttaattctccgaaccctttgtgattcaggtcacgtcgcaagatttggcagacacataccaacc

SEQ ID NO: 2641 - DNA, 2025 bp, Glycine max
  Intron number 5 from transcript Glyma19g37750.2 (locus Gly ma19g37750) derived from phytozome v7.0 (chr-ID Gm19; pos 44855176 to 44857200 reverse strand)
gcattacttacagagagtgggcacctggagctaaggtatatttctactttattattggtaggaataaatatgtttttagtccctcactccctcaaatatgggagtattcttgttttagtcctccaaattaaaactctttttttagtcctcaaaattcataaaatgcttttttcagtccttctggtagatggtgttaggttgggcgttaatgtagtcgacagatttacaatttgtggcattttttagccgacagaaaagttaaatctttagaatttatagattttcacttctttttgaaattgccttcaaaacctgcatcttagccaaatagaattttgtttccaacaaatctatcgattcttctttgcacttgcacttgcacttgaaataacaaagctatgtaaagataacagaaaaaaagaaataaactgaaaaacactctatctaaggacagaagcaatacataaggtggtgtttgaacaccactcagattcaaaatccataaaaaaaaaagacaacgaaatttgaggtgggctttgatgatggtgtggatctaggagagggagaagccgtgagtggcaaagaaggcaaggacaaagtcgtgtttctggggggtgtggaagtatagcttacaggatgtgatgagggaagattccagggacgctgttatggcgttgcgaacgatcatgatggaagatgttcgcagatctgtcgaaaggaagaagatgagattgttccaccaggaacgtccaatggctctttcgtgtctctgcctttgctgactagcgtgacgacccagtcagcctctctccgtcaagcattcctataaaacttcaaagaatcaccacggtaaatgtccgtccttcaccactttgggaagatccagaaagtggcgggactgacagagggtggcgaggactgtgctaatgatgaagattgtggggcggcagcgctccgctgtggcttcctccagggaggagatggagaggagacggaagtagacagtgggggatttggtgttaggtgagattcatgaaggaattaaactgacccggtttttattttttacgtattttagcggcttttagctgccacaaaattgaaacattgtttaccacatcagactccattaaagccgtcttcacggaaggactaaaaaaaccattttgcaactttaagggactaaaaaaagcaacttttaatgtgagggactaaaaaaacagaccccatatttgagggacaaaaaacatatttaagccttattggtattgcattgtttctagtttttgggttcaaattattttgtagagtcctaaaaagcatggatatgacacagaacatgagtaatcagtcattgtaaacataattactgctatcatttatctaattattgtggtattcctatctgtattagtatgaaagttcaacaaataaaagaaaaatataaaatgcagttagggctatccaaagtgcccaatcaatgtccattcaatcagtgtgtactgtattgtctttcaacctactctatatgttagggtttaggacttaatagacttctttaaagtctaaattgcttgaatgaactatgctctttcaaactttggctttgtggttaaattcatgcatttacttgcattacggaatgtacttatggtaactgactgtcaatataataataataataataataataataataataatcaccaattacctgaaggtggaaatgcattcatttggttaaattggaaagatctaatttataatctatatgggtatacatatgttttaaggagtggtctctatctttttcctcactattcttcccctctcattctatagtatatcattctatattttcttttttggagaaaatcttgtttggatgttgtgtgtctttaaatttgaagacaattacttacgcaatttctataaagctgttttttatttcccctgcaaaccattatggatgttattgattgcttttcagtcagcagcattaattggagacttcaacaattggaa

SEQ ID NO: 2642 - DNA, 1961 bp, Glycine max
  Intron number 8 from transcript Glyma19g31120.1 (locus Gly ma19g31120) derived from phytozome v7.0 (chr-ID Gm19; pos 38880878 to 38882838)
ataacggttgatttacttggcggtcaggtttgcagtgcagtattttcttattatattaattttgaacacagcacattatcttctaatggctgctagttcctgcattattaatattgaattgaatttaaatatttgcccaacttagactttttttttaattttccacaatattgcttgtccccccaatgtgacaaagtcattaattgaatgacattgtttgtccagaatcttgttctataaaacacattgctacccattcctttttgccttttctattgatactagccttttggaaatgaagctaagtttccttctctttattctgttgaatttagagggggagacttctgcatatcatccatatatatatagtctcttactagacttagtggagattattacctaggctactattacataagtgcaaattcgtagaaactaatactcgtgaacactaaatacattttttcatgtgatacatgaacatactgttttctaagtgcattaactattattatttccaacatatttgtacaaaatctttggggagaagagggaaagtcaagagtgtagctgtcaatagtgtgctagccttgggcttctacaggatacaaataatggagcagttttttatagcgatcattgcagctaaaattgcagcattttgcgtgctatagcagtgcaactgtgatgagtttcagaaaccttgttcgacactttattaacacaacgtgcacttttctctcacctgttttgtcacaaatcatcaatacccaatgcttacagtgttgtttctggccaagcccagtgtttttttggcaaagcccagggcatactcacaaatctagctcctctaaagtaaggaggtgcacttcaaaggatacattacactcacaatcaatgattagaaaatcaacagttgaaaattgtgataaaatcaaatacatatatataacaaactctaaagttagttacaatctcaattgttgatttactaattaatggttattacctttaaagtgtactcccctcactttagaggagccaaatcccctatccactactcttttttgcataaactctgttctgttgattgtttgcatatatatcttgagaaagtttgtgtccttcttctgcctctattctgtctctcatccttgggcttcgttcttctttttttcgtgtgttttgtaagtcctcagtttgttctcctgctgacatcatctgttcaatttttgtgttctgttctgatgtttttttcttccaaactccattggacacccttgaagcagttgtagcatcacccacttggaggttttctctttacttaattttgtgatgtttgttctaaggttaagactacatcatatgacactcaatagtataagggatttaagaatttcctttaaaagcatacgaatgaaagttttctagaaattctacccttaacagcttcactaacatcattttgtcatactgagatatatctgtacaagagtatacttactcgtaattttttattttctcttagttagctgtcggtctaactatggttagtagttagtctgttagaataggacagctgtatggcagctgtcaccaactaactaaggttagttgacagttacagttagtagcttctataaactgaagtgtaatcagtttctgtttgggttgaatacataacaacttttcattacagatttagattttccctaaattctctctcttggattcttttaatctgattgactgataaaattaatttatatcaattatgggaaaataataataatatatggggagggtcatggtctgtgaattcgaaattgtggttgcccatccatgagttctttggacatttttttaaataattttttttttaattttcctgtcaaaagtagtatatatgctgtcttgtgggattattttacattccaaatgttttgtgtggtaggtct

SEQ ID NO: 2643 - DNA, 949 bp, Glycine max
  Intron number 9 from transcript Glyma06g16740.1 (locus Gly ma06g16740) derived from phytozome v7.0 (chr-ID Gm06; pos 13168422 to 13169370)
gcttcccggtaaggctacctgaaaattcaattttcttgttttttatctatacaatttccttttttctcctttgtggacttgagatggttcagatcagaggatggatgtccattgcctttgcttctagtctgttggtagctctaagaaatttgctttgatacgcattctattcaaattggcaaaccccaaaaagaaaactatgtaggctttgtttaataatatactgtcagtagatattaggtgttgatctgttagacccctgaggtcaaggccagaaataatggatacagcagctgataattagatagaatctaattaacagaattcgattctgatacaattagataggacctgccaggatttatttctgttatttagtctcattcattccattgcccagtttctttactttagacaggattttttctattaagatttagtttccttgtttagggttgcctcttccataaaaaaggatgaattctagaattgaataacaagaactattctgggtatgtgaaacttggagattcactacctcacaaagcaccagtagcatggtaagatccttgcgggttcaagaaaagcataaattttggtttttatgtttcttatttcctaaggagaagggaaggcagaattttagatgaacacgtgcatgtaccatttatatgggacaagcacaagagatactcatgataaaaacatttctagtttttttaacaaataggtcaacaaaggttactcagtaatcagtatttgaacatgttccacggatcgagtagttaatagttaattattcctaaactggaactactttttgcaaaaaaatcttttcttgctattttccctaatatttatgtatttgtacatgcacaacacaggcatttattagtactatatggtaaatttgttccttacaccggtcatgcactggtcttttgtagag

SEQ ID NO: 2644 - DNA, 3791 bp, Glycine max
  Intron number 1 from transcript Glyma05g26990.1 (locus Gly ma05g26990) derived from phytozome v7.0 (chr-ID Gm05; pos 32878971 to 32882761 reverse strand)
tttgttatgtaagtgcctctttttcacccatctcatcacctaaagatttgtttttggctatgcactttcttttaattcttccatgcattttaagccaatccttctgctgcttttttttttccttcactctcttctttttttgtttcacttttgtttaattattgtgctgcttttccttttattgtgttttggagtttcatggagctccactttggcttgcaagaaattacaaggtcatgttgttaatgttgaggattttgtgtcttttgtttttgtggtaatttgaaaccgtttttgagatgggtaattatagtattgtcagcttagtgacgaaagagaaggattaagccagctagttgagtatcaaaatttagatctatgatttaaggagcaacggaaagcctctgatttgatgtttaaagcatctgttttctgtaatttgtattgcttagtgatttttgtaactcttaattactgtttttcatcttcttttctgctataaccattctagaccatagttaattaccttctttaatttatgagtgtctgtaatcttttaattacctgtttgatttccatgatttggagctgtttttgtgtggttagttagtctattataagaaaatctatctttttagtgagtatatcatgccaattgataacacatgttgtaattatgtggttaatctctggatataatttacttctatgaaagcatggaagagataaaattttcaaatttatggagataactccatctgattaatccgtaacttctgttaaacctatctgatataaacaatacatttttcaatcttaattttatcatggagcaactgctagaaacttcttgacatgacccttttcatctcggtatatttttaaaaatataatctgcttttgccagcagataaagggtttatgtctgtaaaatctggcatggtactctaccttaagactcgtgatatgagaatgacaattctgcaatttactaatgatgaaagacagaatagttatagttcacaacaaccgacaatgcaaaatgctacttttatgcttttgcttaatttagtgcatcatagaggcaacttaaattagcaaaaagggaggaaaacatgaagtgggaatctacagtgtctggaagcaatggagtgtactgtgctatgatcaactaaatagcccttggagttgtcttattcacgctcttaaataaataaataaataaaaatgttaaaatggtgctcaacatcaagagactagccagattctactaattagaaaaaaaatatgaaatgcattacataataatagtcatttaagtatatgataaggaacataaggtacactttgcattcaagtctcgtgtgtgataaggtccataaggtacattttgcatttaagtcttgtcttgtatacaacatatgcttcttttctgttgtattgttgttatgaaaagcttaaaaattatgaaataaaaaagtcattataattcttcataggtagaatctgattgtgtattcccccaacccctcaatttgcttactttttttaaattgctttgtcatagatgcatgaattaacatctggactcatttaaggaccctgttttttaggggaagaaccaaattttgtttgttgtaacttaagtttccaattccctagcaagataggttactgctaatatgatagtttgaaggtcatttcctctttttggtaaatataattaatttttaccccaagcataattatttcctttccttaagtagtttaggtgagtatttgtgttcatgccggttgtagatcaaagttatttttccagaaaaaagttttcagtgaaaagttttatccatattggttttccatagagaattaaactatatccgtttttttttcgacaaatgctactttgttagctgttagtttttgttaatgcttgcttagttggcttgcaacagtggcctataacattggtggacaggagaaaacaattaactagcatgagtaactgataattggtgagtttcttgagttagtgtgtgttcaaccaactaatggtgattgttagttagtagcacagtatgtgggtaaggtggcaatgcatagcataattcttgaaatttttctgtaaaatagggtctgcaacaagaagcaattatatttgtctgcaaagtgcttctttatttattggataatttcctttgactagaacttcagaagtttccttagacagtcacttctggtgaaataaatgtgttcttacactcagctttcacttttattagtgttgggcctacacaagtttctgtgtgtaaggtgaggtattataacagtagaagggataagtcataagttaaagaggttcaaaattgaaaggcagattcaatttggaagaaaatcttgaaatggaactattcatcacctggtgtgtctgaggctatcaggttaaaaaaaatgaacttaaaaagcaaatgagttaatctagtattgcaatacatcggctagttagtttctttataatagtatcacatgtaatacgatttccgtcttttgaatttctttaatagaggtaatggccctctttaatttatgaagaactggttagtaagcagaaacgatcatctatcaaagatggttcatgtctgctataagaagtataagcttgtgtatgcttgtaatccttaacaagaattcttttggtttagtctttcctatttaaccttcattcggcaatgtttgtttctattacttctatatatattacatgtcttctccttattctcatatcctagtattttttatatttacttcccaagttccctttatcatattgttatatcctcttttgcaaagttcttttctgctataagtttgctgtttcatatattgttatatcctctggtagtctggttcataacgaagaaacatacttaggtttgtcctctgggaattcttttagaataaaagtaaaaaagtattctgcattaaccaaatgttttggattcaaagggactgtgtgaacaactgtataactgacatttagaaaaatacatgtggtaggattgttttatggtatgaatttctattctcttgtgctttattcactttctattatccatgatttttaagtctatgaaagcggataattgttagataacaagaaatttggcaactttttttttgggtgagatgttgttcggaaaagcactactgtaagtgaaactgttacatgtgaatgtgattatgatttctttgagattttcatgcttcatacaccgagcctgcatcttgatgaaattcaaatatgccaattattacttgtgcagttttgctcaaggcttgagctatgataactctctgtattctctctgtttgaagcacttgagtaacatgactcgcattatgttgaccatgtaaacatctcaaaatgtatctgatttccttagtcttgtggaaggaatgttccacagaagtatcatcagtaatatagaaatcctaatatctttttatgttcctgcaatgttattttttattttattgatataagactagtgtatatgttttgctcacatgatggaatccatgcagttacttctcctgtatatgatccatgcagttaatgcttgaatttgttccattttgcatggttaatcaaaattcccaactttacatagcaaataatgtatttaatcaaaatgtaggtaatggtatcatggtaagctgaccaaagtgacggatttgttccatcactgccttcagggaaagaagttaactcatagcaggtccatacaaac

SEQ ID NO: 2645 - DNA, 5637 bp, Glycine max
  Intron number 8 from transcript Glyma08g25180.1 (locus Gly ma08g25180) derived from phytozome v7.0 (chr-ID Gm08; pos 19467143 to 19472779 reverse strand)
ttgggaagacgtcatttcattttagcatttgaaaggtatatttcatcgtttttgttcagcgttcctgtttcctttaaattcaatatcattttattatagatcttgttgtttttccaatatcaagttaaatgcaaatcttcatgttccaatatctgttaaggttgtgagattaaatgactgagcttattttttgttaacatatgcatggaaacccaaaacagcagagatccctcatttttttcccttttgtttacttctttcgttgtttccctttgtctgaattaggagtttccttaatccaacatgatatccaagataagttttactcacgctttgatgcttgtagaagtgtcatatgtgaattgggtgcagtctttttgttggagtgaagcctagctttctgaactacgaataaaaacatttgaacatgcaaaagcctatgttttagattcaaggcagggaactggttaaatccttgaaaccttgaagtattctaatttgcttgaatttgatcccctctcaatcctcatttaaaggttataaaaccaaatccctcaaatttagggataaccttcataaccaaatcacatttcatgttatccacattaaatcgaggaatatcaacattgcccctcaagctagtgcgtattttttttaatcagtgaaaataataatgtattatatataaagcagtacaagttgtactgtgaaacttacacatgggggctaaattgagcaggaatatggtgccctaatacaaggtatataacatgaattaagaaaccataattctgacagtatatttggcccaaaactacccaaaattatagagttatcccaccctaatcacaaaaatgcctccctcatattagtggaccagtgtggaaaaggtatgtcgaaacctttatccaaatttttaaatgcatcctccaacagcttactagcattaaagctttcttctgcaaaaacgatcctattttgatgctgcgagatgctccatgtcaaggagatccaacagcactgccatttctgaaatttgatgccagtatccctcccaaacacatgctggaggaagtgctgtctcgggttttgcggaaatgctcctgaaatgtttgtccacgatattgattcccaccaaagcggcaaaattttgctccaactaaagaaaaggtgtgctgcatcctcttctttatttttgcagaatgggcaggtggaatcatttatttccacatttctcctgtgcaggttcattttagttggcagtttgtccctaattagtctccacgtgaagaaagaagctttactagggacctttaccttctacaccacagtaaaaacaccatcctgattttcatcagggtagtctgtcataagcatcttgtatgcgttccccacggtgtatacaccagccagatgtgtcttccttccagatccacttgtcttctcaatccgggtgaatgctgataccttcttattcttctaagaactttgcagccatatctatctcgtcatcaaaaagttgtcgtctccattgaaaatcccattcccagcctgcagttgtgaaccttcccatctgctgtatgacatgttgctgataggacatagaataaagtgtagggtacttcaacctaagtgatactccatcctcccaaaatttggcctttgctccgcgccccactgtccattttatccctttatctaaccagctgccatcttcaccggaatgagctatgcgattgatgtccttccaccatgctgattcactgctgccccttctttccccatccaaagtccgccatccaccatattttgaaatcagtagtctagcccacaagtctccttggttatggaaaaggttccatctccacttttcgagaagtgcataattaaacttccttagatccctgattcccattccccctttctcctttggtagacacactgactcccactttacccacgctatcttcttttgctccatacctccaccccacagaaactgcctctttatcctcaccagcttgtccagaactttattgggaaccctggaaacagagaagaaatagataggaatagaatttaggacagactttatgagattgacccttccccctaatgaaagtagcttttgtttccatttcgccaactttctctcacatttcttgacgataggatcccaaacgtcactacaccttgggtttgtcccaatcaggatacccaggtaaaaggaaaggtatgaccaatagactgtaatttaaatacctagcagcatccaccttccatctctctaacatcccaattgccccaaaactactctttgagaaattaattttgaggcctgagacaagttcaaaacttctcaaaatcaccttgatcgctttgacattttccatggatgcttttccaaagaatattgtattgtcagcgtactgtaaacgctaacttccacctcatttcttcccactaggaaaccttgaaacaaggttttcttcgttgcttctctcagcagtccattgagtccctccacaacaacgttaaataaaagtggagctagtgggtccccttgtcttagacctctttggggaatgaactcagatgaagggctaccatttaccaatatggagatagaagtggatttttggcaaccctcaatccatgatatccatctatcgcaatatcccatcctccttaacatgtacatcaggaaatgtcaggagactgaatcataggccttttcataatctactttaaacaccaagcagggcttgttacttttctttgcttcatgaattacttcatttgcgataagggtgctgtgtaacaaatgtctgccctcgatgaatgctgtttgtctctcatctattaatattggcagcacctccttcatcctcctcgctagtaccttggccacaattttatatatgttacctattaaagaaataggcctatattcatttaggttttgtggatcattcaccttaggaatgggagcaaggaatgaggcattgcaccccttcgggaatgttccatgagcaaagaattcatccatgaaacaaaacactcttttccttatgtggacctagctgaagggatgggaaaaggacttcactgtccctttcacacagtggtcctcagcaatgtctttagtttttatctaactctttaggaagggctggttatatgtgatggtttagttgggtgcctatatggttattttctgttgtaatttctatcttaacctgtagtacctctggtactttcaggtttcagttatcaatataaatgattttgcagttcaaaaaaaaaaaaaaaatgaaacgaaacacatcagccttgataacttcccaaaactccttaataaatttgaaattaaggatgtctggttcggggctcttgtcgctcccacattcccacacagcagccttaatttctttttcattaaatggctccgacaatctgatattgtgttgctgtccaatggctttgaatctaaccccgtctagtttgggcctcactcaatcttcctcctgaaatctgttcttgaagaacaaacatatttcctccttcacccttccaggttcatcaatccaaacaccattcacaaacactcctctcaaagtgttgaatctatgatttgagtttacaatcctatggaagaatttggaattacaatccccttctttgatccatcttaaccttgccttctgccttaatagagactcatgagattgagcagctgtccacaactcctcctgcaacttttttcgagtcagcagctcttggtcagataactgtctttcatctccttcaatttctagcttgtttaaatccttctcgatgcttgctagcttctgttgggaatctccaaattgatctttattccatactttcagccttgccttaattccttttattttttctttaagcacaaatccccccaaccccttacatgattattcatccaggattcttgaacaacccttcaaaatgatttatcatggaaccagcaattcagaatccggaaggtcgcggtccccaatcaatactttcagatttcagcaaaattgggcaatgatccgaaaaatttctttccagtataaactgtgtagttccttgccatttgcgaaaccattcagcagagacaaacttgtgacctattatgttacccttggaacttgagatttggtgaagatcccattagtcgattattagagttcacgatagaggtaatgactaatccgaggagcatctttcttggatgaaatgggtagtacatatatgtttggttcatggcatgtaggcaactcacaatgctgcttggataccacaaaggagcttcctaaagactcttttgaaaaacataaattcttgaattagttgcttacttgcttttaccatacaagagagagagtgaacagagacttgggttttgcatttgaccacaaccattgatgaagaacagagaaccacaatggaatgagaaacgaggttagttttggtaaaaaaaaaacacttaggttgtgggttgtgttgtgctgctcaccctttcaaagttgctagtggcagcagctcatgaagatatgtgagtccaccatcaactcaatcttccctgacaatcacagcatggtagatctgctcgtggtcttttggagaaatgatatcgaaatgagtaaatttgtgattttggcaaccatatcggatggtggtgagacattatcagagtgactaaatagcaatggttggagtgattcgcagtcacagaaaagtacctagatgtcatcttggaaccgtaattttttttcaatttgcttgagagaaatctactcaactcgcactgatttatgctgaaaggttacaagatcaaatccctcaatttttgggatttccaaaatatttacattaccttccatacaattattacaataaatatgaacattaaataaatgaatataaatattatgtcaaggaaaactgggtttaatccctttgtttaagtgaaagctaactttcgaaactttaaatgaaagcttttcaacatgcaagtctacattagatattcattgtagggaacgggtcaaaccacccaatgagttcattatggaatgaaaaaatggaaatagaatctggagaaaagcaatatcgttgatgttagttaatatgaagagaaagctgttttcttgacttggacttggcttagacattttgagaaacatttctcaactcatctaaaccaatgggcaagcaatattagtcagggttttctcatgtaatgggtgttacaattagaacaaaagacatgttctcctaatatctagaataccttagtttcggtgtctagatatgaggctgttatccctatgtactagtacctctggtacttttgatcatttatatatataatatatttagttttgctgatcaaaaaaaaaaatgaagagaaattgatctctgataaaattgtcttctttttggttttatttgaatagcatggccacggcttaaaatctggtttttcataaaaaaaaagaaaagaaaattaggaatagaaaatagctattttgctcattatggtcattgttcataatgatctgattatgttcacatttcctgttattttgttccagttccgcttcgggt

SEQ ID NO: 2646 - DNA, 1269 bp, Glycine max
  Intron number 1 from transcript Glyma20g38120.1 (locus Gly ma20g38120) derived from phytozome v7.0 (chr-ID Gm20; pos 45800738 to 45802006)
cctcttcttccatctcttccttcctcactcctctggtttaccttcctctctctctttctaacataaaaatcttctattctattgatttgcaatttttatttgttattcattattcgatcatgatgtcaagcttaagcagggggatacacacaaataaaaaaaaagggaatttcttttattccttgtgtagtttgaagagttagttagttagttagttgtgtgatagtttaggatccggccaattcttaaattttgttcctttctcatactctggagtggttatgacttacgaatccccccttcttaaattgtgatctttgatctcatgtgcatgattccatctctctcagatagggaattctatcagacccaaatcaactaaatgggactaatttatgggctcaggtgttgatataaaggaaaaagggtcctgtggaggttccaaattttacatcggacaagctttctccagccaactaggaaccttaattttgttgggaacttgccttaaactggtgttatacaatttaaaaacacatgtatatcatgtatgtacttgcattgtccctctgttttttccttcttcctcacggaaacgcacatggatcaatgcaatctatcaatttcttgtctttatcatttggcttagcttgttgggatcagtttttcattctagtttctgcacactttttgtttcatcaactaaagctaggcaattgggcaagcttctcattactgtatgcacgtcatatagtaactagtaagcatgactttgttggaaatttatcatggtaataaatcctgatcataaattcacaatgagtagttaactactttgttttgtgtaagcatattgtgggtcataattggcagaacatgtataggtgttacttttatgtcataatcacaatcttccttgtaattattattacattttctacattctttgtttgcaagtaataatgtgtttaatgtacatagaaccaagtagagagtgcctctttaaataaggaagggggggggggggtattgcatcttgtgatcaaatgtataagtatagcaatcagctggttatgcagttgaacaaagtaactactcaaatgggatgtctaaaaaattgttttcgtagttcaatgttttaatctcattttatctaacttgttactgctcctttgcagaataggattcatctatgcatttagttttcaattctctttatcttttctgaatgcaggtaaacccagtggagtgtgtgtttctcaaggaggt

SEQ ID NO: 2647 - DNA, 2275 bp, Glycine max
  Intron number 3 from transcript Glyma07g19470.1 (locus Gly ma07g19470) derived from phytozome v7.0 (chr-ID Gm07; pos 19465751 to 19468025)
tgactgtggcaccctcttctccaggtttgtgtaaaaacatttcacaacttaattatatgataaattacctttggttcttatatatattgaatgtttggtgtagctgaattataatgtaaaccaacttttcagctaaaggcactctaagcacattttgatattgagcaggaaataagatacggatattctaagatattacatatacactttccacctaacttgtttaataaaagtgtgtttcttatggatcgatattaagactagtagatttgggtatgtttaaagtgaaaagaaagaaaacagataatgttagcatggcaatgaggaaaaccattaattttttcgtactcattttctaatattctatgcaattttttctttcttttatctctgttttcttttcaatgaaatgtcacgcgagctttctaatccaattttctaagattaattaatgtaaaaaggatgtaatgcagcaaaatgattaccaaatttctactcaattaaaactttgaggagaatcacaaaagaccttttttagtaataagaaaaaagggttgtgaaaataatcaaaattgaaaaaagaaattctctaacaagcaaatatatatcaacaaattctgatgttctcacttccttttttgtacatttttttttcaatcttgtaatttttttattttttttctattacatcatctatccatttcacatttcataattttctcttctttaatagggtgtacaccgtggtgagtgtcaacaaaaatgtttttccaatcttaaaattgagcaagacggttctactttttttttcttgttagttttatgtgtgggcgttagtggaagtggcagaagactgctcgcacgtgagcacagtttgtagcaaatgttttgaaagttttttgagaaggaaaataacaaggcaaagctcaactttgtgtccttgggaacaacgccccccccccctccttattccccatattcacgtgtagttatgagcaacaatgttgggggggggggggggggggggggcacagtgatactgggtttgttctcacacatgacttggagttgcattgttttgttttctttcgtgttggatacacatataattcataagtatgtacgtggtttcaaatagggtacgttaatattctttgccatgggtacaatacaatgcattctaccttcttaattgtcacacactggccctttatttctacaagtgatttattatgcaacaaattgatgaaattctctctgcaaaattaatgtttgcatatgatctatagtttcatgttttttttctctcactgagaattttccgagaatttagcaacccgttttgctggtggtacgatcgttttcacaagaattttctcagggtagaaaatggacaactcatgaagcagtttgcatttattgaggctggacccatgctagccttattattgttgactttcatcaaatgtgtaaataatattctttctcctcggtgatcaaagagaggactcaaagtggtagttcgataaggagttgttggtgtgtatcagactttggcataatcctctgggccagctcctctctcactgtcatagtttaatttttattttcaaaatagtagatcgaatttcaacaactataaaaatattttccaaattcaatatgtttaatttttgtttatttttggaccctatatatgcatttgatcacgatatatatatatatatatatatatatatatatatatatatatatatataaaattttatgtgaaacaacctttttctcaaattccggcatcactcatcgatctccacgtaattaaagacctcactttttaattttatatctcattcttcttttggcaagtgtgaaattgattatgttagtgttgtggtggcattctcactagctaggttctaattaggaaacttcttctgattgtttgttagctcttaattctttattgtttgagtccaattatgtgaaatgctcatgtataggggaccacaatacatttagtgcaatgagtcttggtggacacagtggttgtatatattttcacttctcaaccctttaagcaacatatacttgcaataagatttgatctgatacaattggataaatttagttaatttggattatttcccttgtgccaatttgtattaactagctaggattgtgttgatgcatgcaacatttttattctttaattctaagacattcttaatttgttgcaggcgtgacagtttcatcactcatagggcattttgtg

SEQ ID NO: 2648 - DNA, 3742 bp, Glycine max
  Intron number 1 from transcript Glyma08g15000.4 (locus Gly ma08g15000) derived from phytozome v7.0 (chr-ID Gm08; pos 10909787 to 10913528)
gtcaacaagcacaaacccaaaccagctaagctcaggtgcattatcaatctcattctcacttgttatgtgtaatggattctaaaatttgtgtttttatttgattttagtttagtttgtgtaattgatttgatttggagtttgagatgttagaaagacatgtcatagaatgattgaataatataatatgctgatacaaagctcaggttaaatttataacaatagaagctactcggttttatatgcactaattaacttagtaaaatggtttggaaactaaccaattcactaacacgtaactaagtagaatcagcagttctaacttttagttttaattatatcaatttattttatgttagtctaggttattggtaaatgatggaatgtatttgagtatttttttcaataaaatttttctggtttggttatgttttatttttatgtggaacttatggcatgtgattctgttttgtttgtgtttcagggctagcattacccccggaacagtgttgattcttcttgctggtagatttaagggaaagagggtagtgtttttgaagcagctaccttctgggttgcttcttgtaacaggtgagttttgttgttaaacattattgctgagattgtgcatgctaagcattttgttcatttgtcattgtattaataaattgaattttttattttatcctgatgagtaataatcaattatttctcttgtatgtaaaatgttgcttctctattattgcttgggtgtatactagtgtttcatctcgcaatgttgtctcttattatactagggatttcattatctgatttaaccttaataggaaacagtgaaaatagaaaacaataataagatgtttaaacttttgaaaacaggaaataaaaccaatttatccctttatttcccatctagtgtagttttccgggtatgtgggtggaaatgctagtgactagtggttatcttggtgggtgtgctctagaatgtacattggcattggttttttagtacctaatacctatggatcacaaatttgaatttgggatgtactctgttctccacccatttctggtccgtcttatgtctctcacgtgccatttcaggtcctttcaaggttaatggagttcctttgagacgtgtgaatcaggcctatgttattggcacatcaaccaaagtagatgtctctgctgttaatgtcaacaactttgatgacaaatactttgcgaaggaagcccagaggaagaagaagaagggagaaggggagttctttgaggcagagaaggaggtgggattatcagttttttgattttgttgatgttctacctgttattcttacttgcttctgcgtgctgatctctgcattcttttttccaatgatgcaggaaaagagcgtgttaccccagcagaagaaagatgaccagaaaacagtggatgctgcattgttaaaagccattgagagtgtgccagacttgaagtcttatttgggtgccaggttttctctaaaggctggcgtgaaacctcatgagctagtcttctagaggaaagaagggtgttactcttgtttttgataacctgtttgtttattggtgttgatccttatagttgcactcttataacattcttgttaacagacaaatgaagaacctaaaattttgttaggcaatcgattgtgacgcgtgctctttacattttgttgattgtgtgaattttagatattgtgtggacctttagcacgccaaatgaaaaaaattggaaacagatgtacatgtggtcaaggaaatctttccataatacattcataaaattttaagatatagatattagaagaatcgacaatgactaggatgaatcttcccgagtattttttttggctttttaatatacaatagctacatgttttgttgcccttggcttctgaagttataattttctgttcacttgtttttttttagagaaaattgacttgcagcagtaatttagcttttggaaaattttaaacacctcaatataagtcatattataatcatgtttaattatattcttgtttagactaaatttgaaaaaataatcctttattttttgaagttctttttgaaaagctgataaacgtgaagtattactttttcataataaatttaatacggatttttttagagaaaagtttagggtagtggctgtgtcaggacatgcttcaggtcaccacgcaattaatatacactaataatagtattaaaaaaaatgaaaacttttccttcttaaatttggatgaaatttacactttcaaaggtaaagaataatatattatttttaaagtttaatgcctatgtatcattcaattatattataaattattatttgaattattttaaaatgattattttaaaagtgaaaaaaattattatataatgaactatgattgaatgattgtataatttttttcgtgagaaataaaggataacataagatgtaaggttcgatgagataatgatccaagctcagcaaattagttgccttggcgataaaaatgttgaaaggagaggttctatttacgagctttgaagttgctggtccttcgaataagggtggtatgcagtgccgttcacgtccaacaattgcaaaacaataagagaatctgagtcacatataagtattagttgacgaaaaccagcgtcccaagctatttgaagaccgtgcatgaaactcagcatttacatttgtgataaaaccgccagaacctttgaaaccaagatgtcattggtcaggatcatctctgaggaggcctccggataaaaattaaatatcatattagaaatttataatactcatatattctgctgaatatttatgtgagccaaagaggaaaaaaaacagtttttcattcataggtacaagattcaatcctgttctaataggaaataatgcacaataaaactaactctcacatctaacaaacaaaagaaaaaaaataacttacttattacttatagaaaataaaatcatttaaatagtttgatggcacgtgtcaatttatacaaattaaattttaattagtaaaatgaagactggtatactaaaaaaaattatggacacattagtctgggcttggagcatggatcctttgagtcaggtcaaggcccgttagattttatacagaacaggtatctatatgtctgattttcatttgcgcattaaacgagaattagggtttgtagtgcagcaggaagaagcaataatggcgccgaagataacacgtaaggttagcagaaaccccgaattgataaggggaatcggaaagtactcgaggtctcaaatgtaccacaagaggggcatttgggctatcaaggccaaaaacggtggcgttttacctcgccacggccctaaacccaaacctgaaactcccgctgaaaaaccacccaaattttaccctgctgacgatgtcaagaaaccccttgtcaacaagcacaaacccaaacccgcgaagctcaggttcattttcacttcattcttatttgttttgacttattttatggtgatgctagtaaataaattggggatctggaaatgtaggttatcgctaattgctgattgctgattgctaattaataaaatgaatgagtttttttttcttaataaaattgctttggtttaatgatgttttatttatatatggagctcatggagtgtgattttgtgttgggtgtgtgttcagggctagcattactcccgggacagtgttgattcttc

SEQ ID NO: 2649 - DNA, 1369 bp, Glycine max
  Intron number 2 from transcript Glyma10g30720.1 (locus Gly ma10g30720) derived from phytozome v7.0 (chr-ID Gm10; pos 39342732 to 39344100 reverse strand)
tggctgaaagacaggttccatttcacttttccatgtgtatctatattgatgcataaactgcataatatatgtgatagaataccaataaaaattgatgtttattatgattaaatacagatttttacagaaactacagcaagaatgctgtctcagagttgagactcctacaaagattgcactctgtccaaacttcctcctaactctactcacataatatactagggatacataagtgctacataactatactgcattgttaaacacacaactgccgattaactgtcctgcagagttaaatacataactattatgcaaccatcctgcataattaaatgcataactgtcataccacaactgccacatgatcagatttctacatcctatgtcccctcatagagtataccttccaaataggtggatttttagactctctagttccatcaatatgtttattatgcatgcttgtagatttcaattgtttttatttgataatttagatagtaaaggaccttataatggcttcagactttaaatcattgagtttgttattttaacatttgatgtctggtttctccaaggacattgtaagtaatgttattggcatatggcatcaaatcataactaagggatcataaccaagtattgtaccagtgattatggatgcaaattttgagagaactttacatgcacaaaacaaaataaaacagtattatttactcatcagaagtggtggttaagggtttattgattttgtatcttctttgaatgattctttggaattgtagaaacacaaatgtatcataaatactgctaactcactagaaaggcattgaacaggtcaaattgagatgcaattgattcccttgtttgataattattagtagtctttatcttgctaaatagatatcttgtatgttgcagtggatcttgtcgtgtgccttttctctacatgtcaatagagtaccataaaatcaaaattttatgtgtctgtgtgtgaggtgttgatgatggatatattattgttcacatgtttttgtgcacgtagttggatttgaactttttgttgctttctgttatcaggcattaagtgggaaaaggcttgattttttttttgctcggaaaaaatatatactttgtattagatgagtaccagaggtacaaaattttacaattaatggtgccaaacacatggttccgatatcagacttgaagtagtctagataggcattactgtttgtcatcaggcttgacaattttacaaaaggcttgattgttgttgtttgtcatcaggcattactgttttcctttcactacttactgcttgtccattgcaggaaagaattcttttggaccgtgacagagtagtgtc

SEQ ID NO: 2650 - DNA, 5162 bp, Glycine max
  Intron number 2 from transcript Glyma01g33580.1 (locus Gly ma01g33580) derived from phytozome v7.0 (chr-ID Gm01; pos 45776933 to 45782094 reverse strand)
aatttgacaacacttgtagtttcaattgcaaagaatgcttctagcctttaacacaataactgattccataatatcaggatgcaaatatactcttaacaatgtaattaaaactaaaatgttgttaccaaatatgactaagtcaagtggttgagaaaacaaaaaaatgggtgaaaaaaattaggaccactttaatttgatttcaaaatcaaaactaacattctcctacttggtccaatgtttctcacactttatgatatctacaacactgataactttatgctcacacccaagatgctaaccatatgaatcttggaggtaggttctctaaaaatgattattaccttccatatattacaatgtaatcactcttagtaaaaacaacaatttaaccgaatgaacatgttcaatatttattgagtccaaattacacatctttctcaacaaaaatgtatacaacaaaatgagaagacaaacaaataactaaagtttcactacaaaaggagctttacatgatagaatcaagtcccatactattaacatgatccttaaatgactttgtttgcatgccatttgtcaatggatctgcaatcattagttcaatactgatgttttcgaagatgatttcatttgctttgacacattccttcatggctaaatacttaatgtcgatgtgcttgcttcgacttccacttttattgtttttagctagaaaaacagcagctgaattatcacaatatatctttaatggtctatgaatagaatccatcacttgtagaccgactatgaaactttttaaccaaataccctgtgatgccacttcaaataatgaaataagctcagcctccatggtagaagtagaaactaatgattgttttgcacttctcaaagatattgctccattagccatcatgaagatgtatccagatgccgacctgcgagagtcaacgcaactagcaaaatccgagtctgagtagccaacaacttctaaattgtcagatctttgatatataagcttgtaatctttgattccttgaagatatcttaaaactttctttgcagctgtccagtgctctattcttctttgatatctcccaagcattccaaccacaaaagcaatgtcaggtcttgtacacacatgtgcatacccaaggcttcctacaatggaagcatatggaatgtttctcttttgttccctttcaagctcatttttaggacattgattcaaattgaatctatcacctttcacaataggtggcatgttgggtgaacaatctttcatccaaattttttctagaactttattaatataggccttttgaggcaagccgagaatcccttgagatcagtttctatggatctctatgctaatgacatatgttgcctcacccatatccttcatgtcaaaattcttagaaaggtatggtttcacttcatgtaagatcccaaaatcattggttgcaagaagtatatcatccacatataagaaaaaatattattttactcccactgaccttgtggaatatgcatttatctatactattctcaacaaaaccaaatgatgagatgacaatatggaatttcaaataccattgatgtgatgcttgttttagtccatatattgatttcttgagcttgcaaaccaagtaagccccatcactagaggaaaaaccttcgggttgtgtcatataagcttcttcttctaagtcaccatttagaaaagccgtttttacatccatttgatgtaattccaagttaaaataagcaactaatgccattatgatgcgaaaggaatctttcatggatacaggagaaaaggtttctttgtagtcaactctttcccttcgagcgaatcctttggcaaccaatcaggtcttgtgtctctcaatgttacctaatgaatccttcttggttttgaaaatccatttacatccaataggctttatcccattaggacattcaacaagatcccatactttattattttccatagattccaattcatctttcatagcatcgtaccatagcttagaattacaattgttaatcgcttgcaaaaatgactcaggatcattttcaactccaaagtcatattgagactctaaatacacttgataatcactaggaattgcaggtttctttattctagctgatcttctcaatgttacatccacgccttttggttgttgttcaacaggttgttcaacatcttgtgtttgatgttgtttaacaagttgctcaacattttgtgtttgatgttgttcaactggatcttctaggataagatcaacttgatgtggagcttgtgttacacgattttggtgagtatcgccaaaaaccactagcttataacttgatgtgggaactactccttcacattgatttttcttaagatcaatgccttgagttaaatcactctcactagccacatcattttctagaaactttgcatttcttgactcaataattctagtgctatgagttggaaaataaaatctatactccttagaccttttagcataaccaatgaaatatacactaatggtccttgcgtccaacttcttttcatttggattataaatcctaacttcagctgggcaaccccaaacacacacatgttttaaacttggcttccaacttttcaataattcaaatgggattttagggaccacctttgctggtgcctgatttagtatgtatgtagctgtcttaagagcctcattccataatgaatggggaagtttggaattgctaagcatacttcttaccatgtccattaatgttcaatttcttctttcaaccacactattttaattcggcgagccaagcatggtgtattgggccacaataccatgctcttgaagaaactttgcaaaaggaccaggtgcttgtccattttcagtgtatttgccataaaattcgcctcctctatctgatctcacaagcatggtgtattcgagccaagtagacttaaataataaatcaaatccggatgcgttaaagtttattgaataacctaaaggaacaagtctagaaacataaattaaattcctggaaaattcaggaatataaaagacattattcaattcaaaaacaaatccagatcctaaattaagtttacatgtgcgaatgacagccatatatgaacgcatctgattcccagagtagatgaatcattcaccttcatttggctccctctggcttaagaagccctgcatggtattagaaatatgaatcgtagatccagagtcaataaatcatgtatcatgacaaatatcgacaatattagattccaaacatacaaaggaaaaataattatccttctttccaagccaagccttatgtttatagcagtccttcttcacgtgtcctttctttttacagaaaaaacacctagactccttcttaattttgacaatagaaggtatatggttcttttccttcctttccttctccccttatctagagtcacggtaagagcaccttcaccaaattcttgagcaagtctcctttcctcctggacacacatggtcagaagttcattgattgaccatttctctttatgtgtgttgtatgatattttgaagggaccatactgtgatgaggtgaattcaaaattaggtgcaacatgaatgactcagaaatttcaacctggagcgacttaagctgagcctcatagatgacaacttagacattaggctgctagccaaggccttcttagaactttcaaattgttcatctatggttttcatgaaatctttaaccttttgacattccgaaattgaaccacagatactagcagagatacatgtcttgatgaacataatggaaagacagttagatctttcccattgttcatataacacaatatcttatgaagtgatagaatccataagctcaactggctcatccttatgaagagcatagtcaaggtcagcaacccctaaatggagaagaactcattcctttcattgcttatagttttccctgtcaatatgggaaccttatttttatcatcggatattatcaaagattgaactataacatgtaaccaaatatcagtgcttataataatttaaaatgcatgtgaatcaatacatcatcaaaatctacctatgggttaaaattctaacatagaaaaattcactttatttctttatgatgaaactaataaattatcattgcatctcctaatacctgtgggttaattaagagacaagtttatttcatcctaattgatcatgaaaattataataaattcccgtgggaaaattcaatataataaacacaatcaattacaagttatcatattaatcttcatatgattcctgtaagtataatcttaaaatggatgctatggctactccataaagtataccatcactaatatgatatacaatagcggaaacacatgtacataatataatgccaaaaggaaaatccttttacgctttgaaaaggcaataaatacttttaatggaatcaatcatgcttgtatgttttaaaggaacaacacacacttgattaatacaatataaaatatataaacaaaagccatatatatttaatgcagtatagaagcctcacagaaatagaaaacaaacaatttgattttttttaaagaaacattgcaatcgtaatttaaaaactatcagcgcttaacacatacaactaggcagaggaaaaccaagctctgataccaaatgatgaattttgtacaccaaaacaacataacaatatatttaatttaattaggttactaacctctagccatagctctttccataattcaacagatgaatttgacaacactcgcagtttcaattgtaaagaatgcttctagcctttaacataatcactttagatggaatgaatattgttttctgatgtgtttagactagggctctatgcctatttatatagatcaaattcggtccatcatgaaaaatgatttcattatagcaagatccaaatgtactctcaacaactttataattaaaactaaaatgttgttaccaaatatgactaagtcaagtggttgagaaaacagaaaaagtgggtgagaaaaattaggaccactttaatttgatttctaaatcaaaactaacgccaatgtggctctaccatccatgatgacttattgtggtgcataagtaatgttgaga

SEQ ID NO: 2651 - DNA, 2518 bp, Glycine max
  Intron number 1 from transcript Glyma01g02750.1 (locus Gly ma01g02750) derived from phytozome v7.0 (chr-ID Gm01; pos 2229851 to 2232368)
agagttagctgctgctactggtaattttagttgtatgaaccaactccctctccctctctctctctctgttttatttatttatttatataatttggtgaagaatttgtcttttttaatagtagacacaagttttttttttctcctaagtttatatgcataaaaaaaacatttattgagaaagttcagcttattaaatagatctctaatagataggtgctttgagaaaataagaaattagttctcaacttacccgttaggattgccttgagttcgtccaagatataagtttgcaagttgtttggtactgtatttattaatcagtcaccattagctaaagaaaagaaacgtgaatctgattcatttcctcttttgatgtctcttttataattaatcatgtagcatttcatttttataactagcgtatactctcgtgctattagataatgtatccttttcgctataacttttcttgaatggcacagaatagtttctttttctatgatgaaatgtaaagagggtttatatttaccaaaattgtcaaatgaataggaatttgaacctacaaattaataaatgcaagactgtgcattcttctacttgagatgagacatccctcgtgggatggtacataatagttggtctgaaaatatgtaagaggtttatttattattgaaaagagaagtaagaaaaatgtgtttttaagagacattttgtgggtgaaataggtttaggtttcaattattaattttatataacatgtttgattgttgtatattatggatgatgaatgatgatgactcggcggttaattgccgccattagcttgggagttggttagtgccaaactttccctaggaaactgtagagtggacgacctttttgaccgtagcattacatagggttcctgtttctgcatctccacagacaaggacttgtaatttatggggcctcactttactctttaccaagtgcagattgcaagtgtacgctggatactaaagtctgacaccataaaaatatacataagattttttttatcttcaaaaactaacgataatatgatagaatttataatatttaaatatattattcattcaattgaattggatttttttaagtatataaaaatttattttgttttaatttaaagtgcaatggcattagcataatactagtattagtcattcaatttttaaagtgctagtagtattacttatgcataacttgtgtactttgcacaaaagacaaagttactttaaagacattatccttactttaaaagacatttgtcttgaaaatacacagaaacacgggcgagtcgtatgcgccagtgcttttgattgtcactggtcagccacattggacagtgtctcaccctttagcctttgggattggacagtgtgtccattgaaaagaggcatattagtgtgaccatagtttacaactttacaagaaagacacttctcacttgatttcatagatagcacatgcatgagccaagctaataaattggtttttgaaaattatcaagggtacggctttggcttagttgacatctttcatcttccaaaagatgttttataaatggtgttaattatggttggtaattggtatatgtcacatgtttcaattctcgcagtaggtacattcttttatactgctacagggtctggtgttggagttattttgttagtatttgtagtaataaaaatttatgacgcattttgtctgtttctttctttcgatttggatccttgggataaatattcattcaacctaatgagatttgactaagaaaaaaaagccacttgacacaatttataattaatgtgggaaaagtcatcgagtttgaatcgttcatactacttttataatgtacaaatgccgatgtagcaaaacagttgtgaaagctgcattccggcaatactatatagggaaacatgtttattaaatcactcggcgtgttgctaaatctcgactattagtcaatgatagaaataatttctataagaagccagtcaaataacgtttccacattagagttagtacgtttccacattagactcagtttcaacatgacattgccccatgtaatttaccaagtccaacactgttcaacttaatagcaaatagttgccaaattatgcttctaggtcaaagtctacattccacggatgttggtgagcctttgagatttgcccttttagtccgattaagctaaattgaatactactatatccttttggtcttaactaagggggtctaattcaattaatagagtagagtgtgtgaattgttgtaaatcttatggtattcctcttccattcctacatataaaaaaaaaaaatcattttggtcttttgcataaaaactctttatgtgcctgagttcagaacctacacaccactaataaaatcaataacaattatcctttgacttttcatttgttttaattttgttatttgttatttgtggcaccatagagaacttgattggaaaaggtggtcacgctgaagtg

SEQ ID NO: 2652 - DNA, 3196 bp, Glycine max
  Intron number 2 from transcript Glyma16g07960.1 (locus Gly ma16g07960) derived from phytozome v7.0 (chr-ID Gm16; pos 7205613 to 7208808)
gagcttcacgcaaagtggggaaacaggtattttttaattttttatttacatatttttctacataataaatatgatgaaaatttgataaggaaacaaagattttgtatttcacataaataatgatattcttagccagaaaataaaaaataaataaaattgttcgtcaaccctttctttagtttttgaaccaccaaagaagttctttgctctcttttaagttgtagtatttggttttggaggcattcattcgcactaggaggcacatgagtacaatattcttggaagactatttgaggggggatcgtgagtgttttcgggggagagaattctagccaagagaaagatttcaacacatggggatttgtaggacatatggccacaaatatgtcttggagaaaatctataattgaatttttataaccactaaaaggattgattgtgtccgattctatccatatggatgaattggactgttttcctttaaagggtacatacatattatacatctatccttactgttgcaataatccttggtcgccctctctctctcttacttacatatattcatacatatggcaggcgaaagagaggtcctgggcctttagatctaacaagaaccacatgaataaatgaatttttcctcttgatttgaattatgtgctcctttctaaatttttcataaatttgattaatgcaatattttaatttttattcataaacaaattgtaccatgaatcctaattaacttctaagaatttattatttatctaaaattttggaggtttggctgtatggatcattattctgtagtttttatttcaaaagaaaataaatcataatatgacttttttttatcatatacactagataagaaaacaaaataagttttttagaaacacgttattttatgcttactttttaaaataattaaaattatttaagatgatgtatttaatactttaccctatgggtttgttacctaagatagaaaaatagttcataataataaaatacattaaaataagaaaaggaaaatgaaatcgctgaccaaaggaagggaaatatgattgtaaatagtaaaaaccagagcaattcctgtgctttgcacaaggcagaggaagaataataaaaaaatggcccatgctttaataaaagagagagaaagcaataaactattgaaataaaggatgtgtgaacaggtgactgagtaaaatggaggccggatgattaaaactatgggtaaaaagattacattaaacaagaaatagatggtattagaaaggttgtttctcaacataaggctgttttatataattatagggtttttcctcgttatactagcatggtatatatatatatacggaaaaaattcacttatactttaggtgctcgagtaactttttgataagttggatatgaggaccttccacttaaggttgaactcggggaagtgggcatatctttacagctttctagttcggatgaaagagagtttgagtgaaaatagacccaaaacatacacttttagctcttcttaacgagggcagatgtccttgtaaattttagagcttctctttgaagatagatttacatagtgcatatataaactgaagatacacttacatgcatagtgcatatataaaccagttagcaccacccttgcatgtacctttcgcatccctctcagccaataaagcaaatcatccactagtaataaaagacaaagaatatatttaattcaaactaattttgcaaatattaaatttattatgtataaaaatgactagctttttatgaggcacgaatatgttgaaatataactttcttgaaatatacagagacggatagtcaaacaagtttatgaggaaaattgttactacaagaaatgaaggtgacatgtttaaaatttgctaaaaaatttgtatgcatgtatatatacgtatgaacggatatggatggaaaagagaatacggaatgttttaaatgaaccatactctctttacctgaggcatactttgagaaatctgattttctggtcttagaggaacccctgctacaaagcaaagggcattatcttcatgccccaaaggaaatttagcatcttacgtacctcaacactaatcgttttataagttgatgagtccaacatagcgtcacattgattctcagccaatgaacatgacctccatcagacacataaccgtatttaatataggtgttgccactttttagttaatcaataaaaaaacgtggcagtcatttttaggcagtttttgattaaatttcaacttaatactttctttttcaagaaattaaacaaatgctttagtttagcttactaccactcatgcacactcgtgtaccctcttttccaccaaacatttgaacaacccaatgaacattataagtgtatccatggttactctcatcaatagaactatactatatctatgattatcaaactttcataattaattaattaacttttattaatttacaagtttacttattttttatggattaactcagtgtaaattctctttttagtagattcgatagactctaaataaattcgataatctcttaagtttaatccgaatcgacaagtcatcaaatttaaaaaattagattaaaacacaagtcattttagatttttttttatctgtttagtgttcaacatacctttatttgatgtgatgttcccaaataaaagaaaatttacctctaataacatcaaacccttattttttaacaacatcaaacccttaataggaatgctctaattagttatttaaatattaagaaatttatgatttactattttgttatgttattgaaatatttaattgatatgttatttataaatattttgttattattttgatatgaagtggattgttacgagtctacgagttaaatttatgagtcgagtttatgaaatttttgagtttgataactttgtgtatacttccattaatatgatttttatttttcataaggaaaatttatgaaaagcaatattttatttttaaaaaaatcttatccaactgtatgatgtaattaattaaagtgcaaggcattttctttgttaatatttactcatccattttaaaagtttaggttttcccaaaaatttcgttacagcatattcaccaatgcaggtggtccaaaattgccaagcatctacctggtagga

SEQ ID NO: 2653 - DNA, 1539 bp, Glycine max
  Intron number 4 from transcript Glyma02g14040.1 (locus Gly ma02g14040) derived from phytozome v7.0 (chr-ID Gm02; pos 12414349 to 12415887)
atttactacccattctggattcttaggagtacgaggtttgtattaattctgttcatttacattcttttcttgtctgctgtctgatataattcctcgtgtgtatattctgtagctgctaaactaggaaaaattgttcaatgttcctactcatgtttattggaaagtaaaaaaattcctaaacatacattaaaaggatgatgaacacgttagttgttgctcttcagctttgaaaattgtcatattgataggattgctagtcgaacaaggcttcctattaggaaggtgtatgagagaaggaactgagcatagttcctaggttgttagttctgttaatcgctgagttgtgcctgctttaaatcctaaaggattagttagaatgagtagtataaataagggaagcttagtcttcagaggtaggtagttgagggtggattggttggaactgaataactgctactctcttcaatttcttttcagtttcaataatacactcttgggagaactatttcgattttcgctccttcatctattcttgagtttcttcatatttcacttccagttctaacacattatgggggagaacaataccttgtctctcctacattcttaacagaaagggatatttaactacttatactatgtactattttaggagaattcacaagtcattgccttgattaaaatctctaaactctataggctttgtcaatttttggtacccaacttctgggtcttatcttcttatgacatattcactggccacagagactcccatttagactgtttcagaatctggcaaaatatgatagagtaatgctacttaaattctcaaatgaaagttgaagacaaaatcctttttacctagttaggttttcttcaggattttctttgtcacatcaaacttttctgcatgcaaaagtaatggcattacacactaatagtgtttctctgtctatcagacaattgtctctagcatgttctaatcttatatttgaatggcctggcatgttctaatctaatatttgaatggcctgctcaactgatatgattggttgttatcaattgatgtagtgtgcatgataatgcatgttttgttgagtaaacttcttaagtttttgtggattgtcaacaatcttattctgcatatgttatctattatccatctcatgctttttgctgattcacactgttcttcatcaaagtcaaggctaaatttagcgataactatgacatcagttttcctagtttgaactgggttgaaatagaatttatctaggaatagtttttacttggattaaggaatttaagcagcattgtcagggcaggattataaaacaaagtttgtcctaaaattttgtcttcaattaattgtttttaagtttcttataagcaccacaagaaataaaaacatgtttcagactgcataagtttcaatgactcaatctaaattgtaatgcctcgggcttccaacgttcgcaacttcacatatcgttctgttcctccatttaattgttttggtctcttctctcttttgcagct

SEQ ID NO: 2654 - DNA, 4855 bp, Glycine max
  Intron number 2 from transcript Glyma19g10170.1 (locus Gly ma19g10170) derived from phytozome v7.0 (chr-ID Gm19; pos 12252324 to 12257178 reverse strand)
cacctaagtctcttggcgttcgttgcttaccccctgtaagtgccattcgttgatttttctgttttacaatcaattccaaagcttcattgttaataattcatcgtttaattgccaattgtatctatctaatgagtaatggttggtacgtttggatgggtgagtgagaaggtaaggcttaggcaaagggcaaccttttcatttgagaaaatgaaagagtttaatacatgaaattgtcaaccaataagaaatcatccttgtacttgatacaaattttaagatagatattataaatgtaaacaaacttaacatttaaccttccagatattacaaattttaagatagatattacaaaaatcattattagtatcgacttttaagataattattggaaaagtcgacaatatacttgacgatttgtcattaaatgacaatggaaaaactctttacaccatcagtatagtacacatatagcgtgtttgtttggatagcacacataattgattctatcctacaaaatcatggtgaaaccatgtaaaagtaaaagtaactatttgttgtttccccttcatcatgaaaaattaatttttttttctcatcatgagactattccaaacacactaatacactatttactccaaatataataataagaatgtgataactaatattgtaagtcacaacaaacgtctaactatggagtagtggttgatgttatttgagttaattactaagtaacatgtataatcaagtctcatggaatattttgtaaaaccagtttaattcattaatccatttaacccggttttagactggttaaattgcacatctaatccactaacctacttgaactagttacctgactgactgggtcgcctatttactgattaaactgttaggatcaagccaagttttataactatgttaatcccatcatctttttatttatttttatcaatatattatatatttcttaatttaaaaatataaaactacagtctttccttcttgtcccctctaagcattccctaacatgactggtgagttgataaggcctcctttactttattatataggccttgttgtaacagtggtataataccagcatccaagtaaattaaggattatttctaggcttaaatatgtttttgatctctaataaatacccaatttttgtgtttactccataataaatttttgttttgcattgaatccctaataaaataacatttttgttttttattcttgatatttggttttaatccctaataaaatagaaaattttgtgttcgcttcctaataaattagcaacttttgttaaaagtctgtattaataacaaatgggaaatatttatcatggagtaaacacaaaatttactaatttattagggattaaaaataagtgtcaaagacaaaaaacaaaattgttgttttattagagactcatcgcaaaacaaaaatttattaggaagcaaatgcaaaattggatatttattagggatcgaaaacatatttaagccttatttctatgttatttgaatcagtatatttctgaagttcactagtgtaaaattgtcaatttactggccttcattttacatattctgtgactgaaacaaggtatataactgaaatttttgggacttgaaattggaggaataatttcaaatgaatatgctttaagattctaggccatttaagttaaacataggaagaactcaaaaatattgttataaggtttctgtaatgttgtgagttgtgactcgactggatggtactaatgatcaaggcctgaagctggtttattgtggttttcacccagcatcctatactcaacattctgctgttgagaaatgagacgatagtgtggtagggagagatatgagctgttttcagattcttctattgagaatatttgagtgttttgggcttcacaagatcaagttgttagaagtgtttatatcatgacaataacgaagaaaggaatcactatgggacttgacacattggataaatttttgtaacaacccttctgaacactcttgtcttgaatctttaaattggagtaacaagagttttctttgtaatatgactgataaaattatagggttagatagagaaggagagaaacagggaagatcccagaatattatggtatccagttctcaatatatgattgatatgttacaaaactttagcctacacctatatttttattaattatcctacattacaggcatcctacatgaataatcataatgttgtcataactattaaattgcaatcggtggaaaaccttgaaggtcaatattagggccaactaacctattaatgaaacaagatcagtgctttccagttgtgatgtaatgctcacttttcttataaggaatgtctttggttcaataggctttaaaaaacacactatttgatgcagcacttgcttttatgcccatgaaactttttggacctagcaacttcgttaaaatatagccagcacagcagtataaagctctttggtgctagagttatctcccatgactttttgtccatttgatatgaaagaaaatctatgaaggtgttgggtcacccattgttgggcttacttggcctgcagttaggagctaacaaattaagaaatagaagtgataagggtaggatgggaattggaaggagaggtagggcataacagaaatgacatgtgacaagtgatgggtggaaagatggaaacaattctatagtgggaagatgggggagtcaagtatctaggaatttgttagaaggaatatgtggtggggttgagaagaagttggttcttcctcagaaaagggttctatgatttgttatttgtttgttttctattgttcatcttgtaacaggtgtttatacctttgattttgtcctaattcagtatcaatattacttcagttttaccattcctattttggttcctatcagcaagaagccaaaagagaatgaaattgtcaaaggggaccaaatattttactccacataattttaatgtacccagaatctgagatatgtgtaagagggatcgcgtaaacccatacaagtgtaagatttaagaaggtattacagaaagaaacttggaaagttcatcagaacaatatgatgatatttacatgacatgacatgacatgaatgaatacagttgcaaattagtagctggtttgcatagcacaatggcaaaaggaaaaataatgtggcagatctcatgagactaaatgatgtggcataactgggttctgaaggcatctaatatatgttattattaaagttttaactaatgagacagtcaatttagataaactttgcaacaagcacttaaaaaagaaaataaaatgaataaaggagataaaatgaatcaaacatttcacgctagttaacatttacatatacactaactttttcatttccctcatttaagttttccccaagtacctatgaacttgacaaaacctgacattcttgtcttggaaaaacattaacagtatgttttgatataattgaaaaactatcataagttagaagctaatttaaatcaggcctatcttgcttcagttggcctgatagttgactggaatcacacacatttaaggtttcccattcttagtcacaaagattgagatttagacaagttgcaattggaagcttaacttcaagttatactcccttcccttactgaaataatttgaactgatgtaagcactacttaatgacaaaacctactaagctaagagaaaaaatgatcaatacatttacttcttatggtcattggcctactgattggattggcatttgcatctcaatctcaaatggattattatttctacattcaagaatacatgtgaaaggctacttgaaaagcaacattgctattataaaatagagctttagtgcaagtctcccttccctttctaaaacaattttgcatccaagtaaacattattgtgatgggaactattcattgaagtgcaaaaaccaccattaacgtgtttggcttctttggtcagcccttgtcatgctcgttggatcagaatttgcttctctctcgatggggggactgacttttggtgctttggaggatatatgtcccgatgaaaggataatttagaaggaatataaatgcaaactattgagtcttgacttgcttttctaaaattaacctttgcagattggaagaataaagttgtaatataggtctagtatatgtatatctcatgctacatgggaacatgtggatggcagatgccatcatttctaagagtcagtgaggcatataattgaagacaaggcacatgttggagctataagcacacaaaagtaaaaagataaagaaattgtagtgtattaattttagatgtctgaggattgtagttttagttgcctattttagatctattgcttctgaaatttttaatggcaaagcattatgtgcgatggcagatgatgggtccgtatgagatgaggaattgaagcaagctgtttggttaactagctgtaattgtttgtagccttttatggttttgattctgaaatcagaaaaaatagtagtagattctgaaagcagaactccctatgccccgtttaacaaaacctttctttttcatagtttaacaaaacattattgatcacatgttgtgttgtcaatttttgcccaattgattcaattatgcataccatgatccaacttaactttttcctttctttctttttctttttgggagatatgatccaacataactttgtgagaattgaaaaagaaacgtgccacattcatttggagcatttgcatgatataatttttttttttcaagtcagaacttgcagtgtggggaga

SEQ ID NO: 2655 - DNA, 5863 bp, Glycine max
  Intron number 4 from transcript Glyma13g25650.1 (locus Gly ma13g25650) derived from phytozome v7.0 (chr-ID Gm13; pos 28863807 to 28869669 reverse strand)
atcaactgatatcattattggtgttatagacacaggtaacttaataattctgatttcatattcgctttgtcattttcaaacgtctacgtcctaaattgggtattttaggtcaaattaatctataagctcctgtcttatttggaaagttaaacccatagagtcggtgatgggaatatgtattgagttatgtttaagctatttttgagatgttatggtctacaaaattaatataaagaaaatagcaaaaacataactcaatacatattgggtgtggatggatttatacaatatacaccgatgtataagttttttttttttaaatgttgatatataagttaaattctacaacctccttctaaaataaaataagtattggattagattatttcacacatataaaaaattaattaattaataattttataaaattaatcatattaaataaataaaaaagaataatcttaatattatattcaagaatttaagtgatatttattaaaagtattgtaaaaaaagtaattaattataatttttttcttaaatatgacacttattttacgatggaatagtaataagtaatttattgtaattgggttaatcaattttaaaatttatcaatttgatagttgactcattataattgggttagtaaaaacgaatttgaacgattcaatccaaaccgttgaattataagtttgcgaatcgatttttacctatttgcatcccctaatgttttataagattaaaaagtaattaattttagaaaaataggaacttattaaatttttaaaaataatataagtaattaatttaacctttattttactactaatattaattactattgcactttgcattgatgtaaaataaaggaaaaacactgatcaatgtttaggaagagaattaactacaatattcaagacatttagaagtctttaatgtaaattaatgtgagtattactgaatactttttttactgaatacttttgcctaccattaataaaatgtattgactacgcattgtcttacttttttttgaaggaactcattgtcttacttaaaagatataaataaattaagaaatggaacttttatagcaaaaggattattagtacagataaggttatgccaaaggcaaaattattaccttctttatcctcacagattaatttaagtgcattccaactagatttggctcattgcgcggcattacttgacacgactctttttgtcacaccacttcactgtacatagtcaaataaaataattttagatataaacccacctaaacttcacatgcatttaaaagaaaaatctaaaataaggtacagtgatataattgttttattccttgttttataatcaatttattcataatattggttttgaaaataaatcatcaaatataattttgtaataaatattcccctatctaccaagaatttaaaatctcgataaaagcagaaatctacgtgatcacaaagcgtgaagatggggatgggtttagatagttggcatgatgttttagatttaaatttctttaacattatagtacacaaaaaagagagaaataattagtttaaatgttttttaattcatataaataaagtaatgtttgattttaatctttcaaaattaaatcttccccttttattccgtgattcatgcaaacgtgtcatatgatttctatcttcataaacaagagactaaaagagatgattttttgtgaattacaaaaaccaaataggatatattttcataaacaagagattatcttaaaacaagatggcttattctatagggactaaaaattaaaattatcttatttaaaaaaaagattaaaaacatatttaattaactccgaaagcttcaatacggttttattcaatcaattaaacttctttgtttattatacccccttctgaatatatataaatggttataatcttaggttattaattgttaaaaattaaattataagaacttatttgctgaagagttaaagtcaatgatcccaaaaaccacattaatattaatttaaagttttaagattggatattgcattttatttcagttaactgagttaagcacatgatcctagtgataggacacagaagggtgataatattaactccgtgttgtgtttgattcaattgataagaataacaagaaataaataaataaaacactgaaatagtaattgcaagttacaggggacagtacctaaccagcaaccacagtcatacccaaatgtttacggtgaaagtgaattgtggcttcagacaaactttatttgcaatgttaagagagaattttagccaaccactactcttaggtcttacccaaaaatgaatctcctaattatgtttgtgaaatattgagtcaaaaaccaaaatgagacagcacagtgttgaataccataccatagtagcatgattatgatatggacccccaaaacatatggtagtcttctcatgtgaaactgatttgtcaccactcactaccactttttaggccattcaccacactagaacccttgtggttgaggcctattgacagttgcagcatcaacatctattgtgtataaattgcaactcattctggcccacaactagctgttatgattgcaaccacatattttttgtttaacaaagcacaataactactcattttccacctcactttatgccaactgaaacctttactagcttatcttggtatgttgtgtcatacggtgatatgggtatcctttaagaagtgtgtgcttatatttaaagcagagaggatgtgaggctggcctctttaatgcaagcctcttactgaggctcaatgatgagtttggcaagtgaaaaaaattatagaaagaaaacagtagggatgtaattaacttttctcttataattcttcctttgattttcaaatctaacaaaaaaagcaacaaagtggggcatgagataattaaccttttctcacctaactcttcctttaattttacaccctaacaaaaaagaaacaccattattcttaatattttttttagtcgttataattttttaaaatatttctatttttttgttgctattaacttgtaatcctacttgatatgccgaggtgatcttctctaagcaatctcaacacctaggttgtgtttaggttatcatttggttgaatataatcaattttttttccatccatcaactttgttgcttatttattgggtgcccgaaaaagtgtaaaagattgattgaaacctcttaaacggtaaattaaccaaacacacacttaacaataacaaattatcgtaaaaatcaaaatgaaataaatatacatttacagtatgtttggatgagaaattttgaaattttagaaaattttaagttttaaaaattttaattgctttaattaaaattctttcattgttaaaatttcttgtatggataacaagatggcttggtagatagttagatgagcttatcccaaatggaggagcaatcatcatgaacgccactctcttacaacccccattctctcctttccaacatgccaccaccacaacctccctggaaccccgtgaccataagcttctctcccttcttcgcaactgcaaaaccaaagaagcctagcttgcttactcccactccacgcacctccctaaccccacctgcctcagttgcttggtctctcagctctcttatcaaaacacactctcttctctcacgcatgcccaatctattgtcatgcgcctccgcaatgagcgctagcttcaccacctcgacgccaactacctcagcctcctcgccatctccaccacccaggccaaccacactctctacaccgcttctctcctccgctccatgctccactccgactacctcccccacgtcaaggcctagatcgtcgtcatcgcccgctttgcctcctcccctgaccatggttatgatcctatcgagaccctctgtgaaaaccgctagaaattttagaatttcttcgtttttgaaagaatttaaaattttgagtttatagttaaaaacaaattccattttaaaatgcctaaaccttaaatttcttttaaatgagcatccaaacagattatttaggtggggggattttaaatcttctggataattacttttttcattttaattccctcatccaaacacactcttaatgatcattttaagaaatttacaaggattaaaacaacaaaagaaatatattagagagaataaacacatgattaagctaatatatataaaactaaattttgtttttctaactctttaggctacatttggcaaactagcttcaccacatgatgtgtagaaaaacatataacgtttagaacttgaaagtgaaataatttgaaaacttttcaagcattgcattcaatttcctgctgctccaaaacaaccaacagaaattgggaaaacctgaggcacacggatttttacatactttacattagtggcaccactccccataaacctatccttttctcccacaattgaatgattaagttggtatgtacaagtgtaaaagaaacaacttttcttttggttgcttcatatcctagctatagtattgaacccttttgaaaaagaaaccaaaaggcctttataaaaacttgccaaattccccacattttcctaaaaacattaaagggaatttcccaagttacttttctggcttttctcatatcaccatccagacacagacacacactttctctagggagctttactagaaatttgtcctagcgttgtatagcttgattgtagtacccttggtgtccctttaagtttagagccacagacatgatggtgtgaagttgaaacagcataaagatgcaatgaggtggccctttttagtttttaacattctcaacttgatcttctgagagtttagggtcgttttaaatatggaaatgtttcttgttttagtttaagtgcaattacaggagatatatgattgatctaatggttggaaaaaggtgaaaggagaaggaaaagaaaaaaagtcatgggtttgaattttaacaaaattaataaactagcatttgcggataaaaattaaaagtgcaaatacatcacaaatttttcatgagaaaatagtatatgttctgacattgtaaagagcttttgcgatatataatgatttataattgatttacagtataaaaacttttatactgtaacgcatagaaattaatgtccaattttattttgtttcttatttttataagtttgtataggtaacattggaaataaaaatgaaaacaataaaaagttgttttgattgtttcctatacaaacttttatatagccaaatcttgccatccactcagttgttcccgtctcattgcttgtttaaaatatataaaccaagtgatgttggggggtttaggaaattattgaaagggaaggaacaaataaaagtgaaaacaacaaaacattctaaaatggataaagcatcttacatatcaaatatgcatatatatgcttacactgggatatgtgacaaaatcatagaattatgtagatgataaaaattggagcaaccgtaattagatgataaaattgtgtagattcgaggtaatgtgagtggagtgtgaatgtagaaatattcttctaaaataaaataaaaatgtaatcagctccctagacttcatgtgctttcacaaattttgaataacttccctcattttgaaacttctaaaataaaaactcttcctaaactacatccactgctgatgcataaattacaaataccttaatgtagagtttgcatgttacatattacgaacagttttgtttgaatataattcaattattttataacatatgacggttctgcatctagggat

SEQ ID NO: 2656 - DNA, 5264 bp, Glycine max
  Intron number 3 from transcript Glyma03g02510.1 (locus Gly ma03g02510) derived from phytozome v7.0 (chr-ID Gm03; pos 2288003 to 2293266)
ggttggaagcagttttattgtttgtcaacgtaagacatggtatgttaattgatcatgtttcacttacaggtgcagtttctgcttgtggtcatatgaacaacttagagcttgggaggcagatacatggtttgacccagaaagtgggatatggaacacatgtttcagtttgcaatgttttgatgtcaacttattcaaaatgtgaggtccctaaagatgccaaagctgtttttgagtgcattagtaatcggaatgtagtgtcttggacgacaatgatttctattcaagaagaagatgcagtgtctctctttaatgcaatgagaattaatggtgtgtatccaaatgatgttacatttataggattaatacatgttgtaacaatcaggaatttattgacagaaggtctaacgattcatgggttatgcataaaaagctactttttgtcggaacaaactgtctccaacagcctcattaccatgtatgccaagtttgagtgcattcaagaatcaaccaagatttttgaggagcttaactgtcaagaaacagtatcatggaatgcattaatttcagggtatgctcaaaatggctcatataaagaagctttgctcacatttttgtctgcagttaagtagataatgcccaatcaatacacatttggtagtgttttaaatgctattgctgcggctgaggatatatcattgaaccatgggcaaagttggtttcaggggctctgcttgacatgtgtggcaagcgtggcgacataattgagtctcaaagagtgttcaatgagacacctgaacgaacccagtttgctaggacagccataatatctccctatgcccgccatggagtctttgagtcagtgatgagtttgtatacagaaatggagagggaaggaatcaatcctgcctccatcactttcctttctgttttggctgcatgttgtagaaagggcatgattgatgtcggtcatagagtctttgactctatggtgaagaaacattcaattgagccaacctctgagcattattctattatggtggacatgttaggccgtgtaggacgactagatgaggcagaagagttgatgcaccagattccaggagggcctggattgtcagtgttgcaaagtttgcttgggtcttgtagattacatgggaatatggagatggctgagaaggttgttggtagattgatagaaatggatcctgcaagttcaggtccatatgtgttaatggcaaacttgtatgctgagaaaggaaagtgggagaaagttgctgaagtgcgaagagggatgagagggaggggagtaaagaaggaagttggatttagttgggtggatgtttctaatgttgattccttatatttgcatggtttctcctctggggataagtcacatccagagtctgagaatatttgtaaaattgccgagtttctgggactgcaaatgaaaattttgaaagagaacagagaaacggaaggagagtggtatcatgagtaacaaatcctaaaataaatgaggattttgtattaaagagctatggatttctaacttgatcttattcttttaaaatatatatttttttcatttatgtattgaattgtactcaattttcatgttacaaatttgtgctgtgggactttaagtttgactttgttggttttgctgtaactcattttcttgtaaaaagaaaagcagagaaaaatgtgttaaacctttatgtttaaaaaaatatcattgggtgtgttctgatctggatcactgttatcgtgggaattcaggaaagttagggatttatattgttgtttttcatatgtttgttcaaatgtgtctgagtaaaattaggaattttcgttattgacttttaatatgaagaagaagaatggtgacagtatgagtaaataatagctgaagttgtaggagtaaattattggataaagttcttatattcatttttgtgagccataacattgccttgtttacactttacagtaacaattttgtttttgaacaacttaatacgtgttggtaaaaatggaagtaataattgtgtctccccaagtagagttcactattatgatttcgttttcttcatgtcttccttgatgagtcacagccatagccacagctaaaataaattacttacaggaccttttctcaggatatcattttcaattttctgggtgacaataatccagtgttgttctttgactatagtttctcatgtataccattgcaggcaatgccaatttttagacagacagaaagtacgattgaagaattgaggatgcaatacattttatcaataactagttttcagtgggtgaccctaccgcctaagcaacaccttttctgacagcagcttcttttactctggcttctcatgatctattgactgcaagcacgttgaatccgttggctagcacaagatgctaaacttaacagttcatctgaccaaaagtttggggatgcattttgtgaaggctagacatggacatccagaatggattaataatgcaaataacattggtaatggtttctttttaaacatagctggtgcaatcattttagatgccgtgagctgttgttcgctgcaaaaagaaatgtaattgctcaactggtcaagacagagacacagtgaactgttattttggttcttattacccttgggattatcctcttcttttgtcaatttttcttctaatctttcagcgtatcctcccccaccctataatcctattatcttcagttagattttatgcttatctatgataattgataactttttccataaaatgcttagcatttcatgtttcaaactcttcccgaaatggtttagagctacattgtatgaagctttagccctcaaattgttgttctacttgttgcagagaactggtatgaaaaagatggcaactatgcaccacatgtttctagaaaagttccaattcccagcactactctttaagatagcaactcaaacctcatcagagcataaagaaaaagtaaacagaaaaccaagtgtcgcacccacatgttttgcattgagaagtctgtggttggagccgttggcatttcattgatgttcaatcaatgacaataaggatgagaatagattaggcaaaaggtattttaaaatcttatctagtttaaaaggataagttttgcatcattttgaaaatgttgacgacaccacaagtttagttcaattggttgaataaagtgttaaactccttggttttgtcttcaattgttatggaaaaaaaaataaaaaaaggttgatgacaaagaatttttattattattacattaatttttactgtaatgctttaaaattatatacttgttgatttatctaagaaaatttaagccttttgccttgcatattttggtttaaatgtattactctattaagcaataagttcattgacttattagcaagtattatgtgcattggtgagtaattttacagaaaaatatgtattaatttaaataagtaagaaaatataaatagcttagattttgtgagaaaaaggtaaatttaaagggcagttaaaatatattaatttgagattacaagtaattgagatttgagaagaaaaacaaattttaatataagaaagtaatttcaaataagtaaaaatgggagagggaggaagaaaaaaagggaatcttaacacgctaaaaattgaaataattaaaatttgtgagtttttaaaaatttcaaaatacgtgttaaataatactaaagtaacgtgtcacaagggaaataaagtaaaataggttttttctcatttgaaaattaagctcatatttatgatttagaaggtaatttataaattcgtactgtaaagtatgtttgttttttttttttttttaaaaattcaacctaagtcatacttaataattgattatttagtatttgagtttgtgttcatttatttgcaattttgataattttcaatttcaactaccggtatgccaagaataacgaaagaaaaagggggcaaaaaaaccctataaatttagcgctgcaaagtgtatattcaaaaagcaaaacccaacacaacgcgatcctctctctctctctctcagaatctagcttgcaatccttactcgccacaaaatcaaaggcttccttccactgagagagaacacactcgttcgaatcaaaatcaaaacgagaaaaagaaaatggttagttgcatcactcattcaatcctattcactctcacacacttcgtgtgtgtatgcgttaattcaattccttctaacttattttgctttggttttcagtcggtgactctgcacacaaacctaggcgacatcaaatgcgaaatcttctgcgacgaggtccccaaatcctccgaggtatggttatcttctccccttcatttcaattgctttcaggaaaagactcaaaagtattctgctttaattaccctatttgtcaaaccataaaacttaggcgcgagcgagcttgtgcttttagtgctatcttttcttttccgaaatttaggatttttaatcctaattttgttagctgtaattttcagttttgattggagaataaaactaagtgcgcgtttggacgagcagttgcaaaattgatctagaagtgatgcaatttatgtctgaactttttatttataaaggctcaatcttacatacgaactccaactcatttgtttcagttacttacgtaaatgctcttattttcttcttttgtatctcagacccaactcgttcgggcatagtggggaccactatgactcgctattctcgtctatagtcatgttatgccctctcaaaacccgtcacagagtaccgttgcaactatcattcagactttgttccaaattcttccacgcactcaaacatgaccaccaccagttcgactttattccccacccaaatgctgcctcagttaaccattccatgctcaactgtttgcacagccgccttccctttcaagctctcaccgcattcaagaaccatttccagttgcattctcttgaaaatgttgatgaggttaccgttgccttgtccctcaaggcatgtcagggagagtcaaaactcgggtgtcaaatccacggatttgcggtatgtagtgggtttgtgtcgtttgtcacggtgtcaaattcgctcatgaaaatgtactgcaagtctgggaattttgggaaggctttgattgtgtttgagaatttgagtcatcctgacatagtgtcttggaatactgtgctttcggggtttgaggagagtgtgg

SEQ ID NO: 2657 - DNA, 687 bp, Glycine max
  Intron number 11 from transcript Glyma08g35510.1 (locus Gl yma08g35510) derived from phytozome v7.0 (chr-ID Gm08; pos 32750716 to 32751402)
ctgctgctattgaggctgcgacatttgcccaacaggtgttttattcttatatatattatgaatttgtatttgtagtttatacatggttaaagacattctgtattatttaagatgaatattgacaatttcaaatcattttatggaaataacaggattctgcctcagatatttttagcagaattttttttttgcttcataatgtgttaggcaatacttaaatttggtttaaaaaatgtccaaagcatttgcatcacttattgagaaatctgaatagtgaagttctgatttccttaagctgaaaaaaattgaggcattattaaaaaccagttctttgataatttcaagtaaataattgttgtcaaatacaacagaagtagaggggaatttttatttgtatagaaagctttcatatttctctctgatctgagctggtttctaatttggtgtacagctcctaggtaattaaatttcccgtatgtgttttcctgtgtgtattgtcactgatttttttttttattgtagaggggaatttccaccaagagttatttctaatctcattgaatatgccacattaatattttgtatttcttactacagttttgtgttcttaattatagttctgatatgctgtagttatttgttatcataaatttgatatatggattttgcttttctgcaatattcagt

SEQ ID NO: 2658 - DNA, 2950 bp, Glycine max
  Intron number 3 from transcript Glyma09g36700.1 (locus Gly ma09g36700) derived from phytozome v7.0 (chr-ID Gm09; pos 42365928 to 42368877 reverse strand)
ggaaaaagacaatttctacttcggtatgtatctataaaatacatatattttgagcttgctattttcaagttaggttttaattgtcgatgcgttgtcttttacaagtatacatatatcagagattatcttctgattaattgagaattatgttcctactctgttccgacatgcaatttttctattctatttgtgatggttaagagctcttgattaggataggctaatttcagcaaaggggaataagtgaaaaggagagaattaaagacatgctacttgggtttagacatttgaattttttcttccccatattctttgtgtgaccttattaccgttgtaagttaggacaaagcttatatgtagtatagtactgtaggtgttttatgcgctattctccaataaaaattcgtgttacatctctaggtaacatgtgcaataaaaggttgatgataaagatcatcagcattggttatcaaggtgaaactccaatattgatcgaagcatggcactaaaggaacctaagatgttgcacttattctcttataagtcaccttgtctaatattataaatctatggggtaagccgagagcttggttgggtaggtgactggaatttgatatctttgctgtcattggaggggaaagtggctggagttctatgacttctatcattatgcagaatataatgctgatactgcatttcatcacttgatttgtggtctgttgggtgagtatgattgctgatatgtgaattggaaaaaatggaatgtgtagctgttgtatgctaagtgccaatttggtgggactggagagaacaaacaaggaatgactcatcaatgttttaggaagtgaactagcagtgtacatgacactgattaccagtaaatagtatgatgaaggttgggatgtcactaaatccagaatattgtttcaacactgtggtgctggctttgagaatctggcatggggaattgctactggtggagagaaggtgatttttggatagtggggagctttttttgagtggtcagggatcaaaggcctatttactgttggcagcacagtttgatgctgaagtattatgcagaaaaggatgggacatactgttgcagggagggatagtttattttacttattataaaatcttgcaagttgggttctgatatgggaatttcagttagtattgtgatttagttcttcattttgatggtagagtatacttagttaggattaaggtccgttgaaccattgtgcaatgtaagtcaatatgtatgttgatggggggtacctattgtatcgagagaaatgaaatttatacggttttgctatggggctgttttccaaactttaaaaacaggatagctaggtaaaattggggtgtttttaaaatcttttatgtttggtagttaaggatatttgaaaacccagttcttattccattgcatttaatgtgaaaatgagctcaaatgtttcatccaaaatttggccttaaagtaatcaatgtatagaaatataagtcccttatttctgtcctctattctttttttttttttttttatattatttctaaaagagggcgagccctggtgcagcggtaaagttgtgccttggtgacttgttggtcatgggttcgaatccggaaacagcctctttgcatatgcaagggtaaggctgcgtacaatatccctcccccataccttcgcatagcgaagagcctctgggtaatggggtacgaagttttatattatttctaaaaattccaaacagattcaccaagattgactaaacataaacagtattgttaaattgtttcaaaaacatgctgtagacaggatttcattaaaaccaaatctaatgtatatgtttttatgaaactggtattaacttaaatattgttttagatatgtcaagcccctcctatcaatcttttctgtatcagttctaatttttaataaaggttgtctgatctcttttattattggattgaacagtacagttggagatttttttatttgggggttgggggttttctcagttgtgaaactagtttaattgatgcgtggaaaattttgcagtttgctcaggttgtagaatgtgttgtcctaatttctgccagatttcttactgttaaatctttatgttgtttgtgctacactctcaattattcccggtacttgaatgaattttcctgtctgctccagctgatttccctcatggtttaggccaaaataaataattatttgacatgtgattaagggagttcattaatgcaagttttcagatatatcaattaaggacacgttgctctgtaaaacagcagtgactgagtatcatttttcatacactatcaggaatactaatttatacccaatggatatagctcatttggcaatacacgctgagtttgtgggagaggacttgagtttgatcgccgcagaatacagtcttggggaggagtgaagagctttaattgttactaagtcccgaactgaagattagtctcataaccggtcctttggaccgaagcttgtggggatatctcggggtcccattgggggctaaagaccctaattatggtggttgaacaaaaaaaaaggaatactaatttatagtatttcattatacatcaaggcatgaaatgaaaggcaataaaaggataacctgccaactctagttcatatacatttagctgtgtcaatgccttctgagttatgatattatatatatgacgattggatgtggattaataatttaacatgggaactatgtctaaatgatgaatttttgttagtgtaacttctgtagaatttttttgcagtgaatatcatctgagttcttggagacttttttggctgtctttgcttcatataagttattactgcttctaatgttttatattactgggttttcattggaaaggttggaccgaaggatcaccagcgctttcaagcttc

SEQ ID NO: 2659 - DNA, 10046 bp, Glycine max
  Intron number 3 from transcript Glyma10g15910.1 (locus Gly ma10g15910) derived from phytozome v7.0 (chr-ID Gm10; pos 18704429 to 18714474)
ggaaggagaagcagacagctgggaccttggagcaggtatgccacatgagaccattatatttgggccttaattgaaccttgggcctgactttgttgggctggggatggggccttagttgtgtagtcttgcaaagtgtttgtcatatgagaatgttgatctttttgaaattgccatttagatatggtattgggcgtgtaatggatgttctgttttatcttctaccattgttgctagtgacttagtggctaaactttcattttacatgacccaagtactgcctatacacttggtaatgagtatattatgcatatagaagtactgtttttaattactcacttctatatttgtgtaaggaattttatatgtataaataagaggaacttttcctaatataattccttcaacatggtagtgggagagatctcaggaaataaagcaacctaacaagagtttacaagacttgtcagtaaaggggagtaaaaattattgtttgttctccaaggctatttgtttttgttactgaatgtgactctcatttgcatagtaaatatattaaatatgctgtgttttttttcctccttgttgtgttttcttgctaagtctctcttcatgtggtttttgggattagatatggaacttatgatgtaattttagaccttcaattataaagtcattgagtaagggatagtgtatttcattgttatatcttgttacaaaataaagatatttttatattcattgttaaacctttaaccctggtagcggttgatgtgtgtgggtagggtgaaataaagtctgggtttaacttgttatggctagtttgcataagttaaattctttttggtaattaatgtatttcttgagtttttgacctttggaatattatgaagattgctgactgaaacccttagctttgattatggttaccaaaaattgtttcatagtgagtagggaaaaaaaaactttgttataaactttgtgatatgatgaatgtatgtatgtgggtgcatatatacatgaggaaatttatcccaggctagatgaatagcactcttgtttagacaagtccattaccatgtgcatgccccacttggtcctaatgtccaatatacaatgcatttcaaaagatttacaccatcaagtccattaccatgtgcatgccccacttggtcctaatgtccaatatacaatgcatttcaaaagatttacaccatcaagctacctgggcttcttcatgtttgcacctgaatcaatggtacggtacccataataatgtaaattgtttttttttactcagcaaagataaatatattcatatatgtgaaagagtaccagaggtacttaaatacagctatttggtttctgagatttggttccttaacagattaaaagaaatctggataggaaccgaatccgggcacccattacactattagcaagtagctcaaaaaccacaattgcatcatctactagtacttgaaccctgctctaataaacaaaagccagtgacatgttagaggaccagtagctgtagggacagtcaaaatccttctcaaaaccctttaaccacgtccatagagtaaatatagcatcctccatcaccttgttgccatcaaaagttccatttgaaaaaattgttattcctctgctgccacattgtccatgtaagggccagccaccaacatctccacctggtatccttaataccctgggccaaacagttcacatgttgtgagaaatgctgccttgggttcaaaggaaaaacaccctgaatgctcacccacgacatcgattcccaccatagggggagaattttgtcacagaaagaataagtgtgcttcgttttcctcggaattcctacaaaatgggcataatgtatcaatgagatccacctgtctccttagcaaattctttttggatgacaatctttctttaagtaatctccatgcaaaaaccgcaaatttaggtgggatctttaatttccatatgtcttcaaatacctttacatcgtccccctcgatctcctcttcactcaacatgtgataggcacttctaattgaaaattgaccactcaggtctggtttccaactccaagcatcccttctgtgagactgaatagtggctccatgcacatcattgaggaagcaatcagccatgtgaagctcactctcgaacaagtgtcttctccaattgaatttccactcccatccattagcctcctgagctcccatctcctgaattgtttggttctgctagtaggaaattagatacagcctaggatattttgcaagaagtgttgtgtcgccatcaagccacctatcctcccaaaatttgatcttttccccattccccaccttccatactattcctccctgtagggctgtctcatattgcggattatgaatagccaattttaggtctctccaccataacgagacattactatcacttgaaacttcatcaagacccctctagccgccatactttgattccaaaacccttgccgctctccaccatgattgaataggttccacttccatttgctaagcaatgcaagattgaatttgttgatgtccttgatgcccaaccctcctttgtctttagggaggcatactgtctcctacttgacccatgcaatcttgtgttgatcaactccacctccccagagaaaccttctttgtatgcctaccatcttgtctatcacctttctgggaaccctgaaaaaaaataaaaaataaattggaataaaagttaggatggactggataagggtgactctccccccaaaagatatatgtctctgtttccactttgtcaatttcctctcacacttttggatgactggatcctacaactgacacctccttgggtttgcccctatgggtattcccaagtagacaaaaggaatggccaacacactacaattcaaataatttgctgcgttttgcttccacgacttcggcatatcaattgctccaaagctgctttttgcaaagttgattttaaggccagacaccatttcaaatatcctcaaaatgactttgattgctttggtattctccattgacgccttcccaaaaaagatggtatcatccgcatactgcaaaatggaaacatccactttgtctctacccactgcaaagccagtgtatattttcttttcaatagcttccttcatcaatccacttagaccctcagctacaatattgaaaagaaaaggtgccaatggatcaccttaccttagacctctttggggtgtgaactctgccgatggactcccattcaccaaaattgaaacggacgcggatgataagcaaccctcaatccatctaggacaaaagcccatccttcttatcatataaaacaaaaaattccatgagactgagtcgtatgccttctcatagtctactttgaacacaagacaaagcttttgctttctcttagcttcctccaccacctcatttgccactagcactccatgtaataagtgtctaccttctatgaacgctgattgtcttccatcaataatggacgacatcaccttctttagtcttttagccaaaagcttgctgacgatcttgtacacataacctatgagagaaataggtttgtaatccgacaatcctagtggatcagataccttatggattaaggctatgaatggcgtgttacaacccttcgagaagatcccattcatctacaactcatctaggaaacaaaggatgtcaggcttgagggtttgctagaacttcttaatgaacttgaagttaaaaccatctaggcccgagcttttctcactaccacactcccaaatcgcctcttttacctcttcctcagaaaatctagcaatcaatgaatcattctactgatggctgattacctaaaaccgtatcccatcaatcaatggtctgaggagctctggctctttaaacctttgtagaaaaaattgtctggctgcctctttgaccttttgaggttcatcaacccaggatccttcaatcatgatgcccttcaataggctgtttctatgagacttgttgatcatgaggtgaaagtaccttgagttgcaatctccctcaatccatcttgttcttgctttttgccttagtaaggactcatgtgagtgggcagtcacccacagtttttcctgaagttccttcctgaaaattgcctcctggggtgataattgcctatccattgtcatctcttcaaggttgctaagctcatcttgtatctgctttaccttcttgtatgtgtccccatattgctccttattccatatcttcaatctattcttgaggcgttttaatttttctttgagcacatagtccccccacccactttgttgggtagatgaccagcaatcctgtacaactttgatgaaggatctgtacagaagccaagagtccagaaccctaaacagcttaggtccccaatcaataacttttgacctgaggataatcggacaatggtcagaaaaatttctgaccaaagtgcattgcatagttgcaggccatttgttaatccaatcaggtgagactagaaatctatcaagcttgcttttggttgttccattcggtctatactaggtgaactttcttcccatccacggtgcatcctctagctccaaatcctctatccacacgttgaactcccttatactgttttcccctctcttctgtggcagctgcctagcctttctgaattgtttctgacattgttgaaatcccctagaatgcaccacaatcctccaagatatgaacttcttagctgctttatgttctcccataggtttcttttgctttgaactgtggaagcaatgtcttccaaggttattttgatgatgtcaaagaatcaagagttaagcaaattccaaagattcaagaatcaaatttcaagaatcacgattcaagaatcaagtttcaagaatcaagattcaaagaatcaagtttcaagattcaaggataatcaagatcaagattcaagaatcaagagaaaactcaatcaagattagtactaaaaaagttttccaaaacattgaatagcacaagaagttttcacaaaatcattaccaaagagttaccaaagagttttactctttggtaatcgattaccagaaggtagtaatcgattaccagtgttttaaaacgttaagatttcaaaattcaagagttacaacttgtgtttaaacattttcaaatcattttaaacttgtgtaatcgattacacaatacttgtaatcgattaccaaagcctctaaacgttttaattttcaaaattcaaaatgaagagtcacatctgttgatgtgtaatcgattacaccttaatggtaatcgagtaccagtgactgatttcgaaaaataaattttcaaaagtcacaattcttcaagtgacttgtttctgaagattttttcaaaagtcacaactttttaagtgattagttttaaagaaattgccaaaagtcacaaactttgacttgagtcatcaagagattataaatatgtgaccatggcatgaatttcataatcatctatctttaatctatctttacatcatctctcaacatctttcaatcaatctttcaatatctttctactctctctacagaattctcttattcattttctccatctttctaaaagtttttgttcaacactttttttttcaagaaaaattctttgttaaaaaacttgtgatattcatctttttcattctcttctccctttgccaaaagaacagaaggactaaccgtttgaattcttttgtgactctcttctcccttacaaaagattcaaaagactaacctcctgagaattcttttgattcttcccttccccttaagcaaaagatttcaaaggactaaccgcctaagatatcttttgttttcccttacaaagattcaaaggactaaccgcctgagaattctttatcccaacacattggagggtacatcctttgcggtacaagtagagggtacatctacttggggattgttatactgagaacaaaagagggtacatctcttgtggatcagttcaagtggagggtacatccacttggtttttcaaagagaacaagggaggatacatcccttgtggatctttggcttgtaaaggattttacaaggttgaaaaaaatatcaagaattgtaagttgcttggggactggatgcaggcatggtttgttaccgaactagtataaatcttgtgtttgtcttcttcttccctacactctttaatttccgctgtgtatttttaattatcgcttttacttttgattaagtttctatttctgttctttactttcttaactttgtagtaaaagcctaattgaatctaataacattaagaatgattagtttttaaatagtcaaggctcattaataattaattcaacctcccatcttaattatttcgaggccacttgattcaacatgaacatcacaaggtgaacaaatattacaatatggaccgtttgagcttccttgagccattggcctaccaacaagatgaatccactaccaatgactttgttttgtagtttgaagacttcttcactccataaacataataacccgcctgctgagtttactgctgcctgccattcccatgttacctccttgtccccccacaaagcttggcacaagcccacatcaatggtctctttcttagtctcttgaatacacaacatgttgattttttcttttcgaaccattctcctaatcgcaacccactttacccgcctccctaaacctcttacgttgtaggaaataatattcatgggttttgtattcttgcacccaatctctctatctccttcaaatccctttcctccatttcctctatgttgttaatcagcccttcattgtgtgtctcatctgtcatgcccaacaccttatccattttcaaaatagcttatgcctccactaaatgagaattgaaactattatttacaggctgtatgtctttctttactggtgtgtattgttgctgtcccaattgcccactataggtggagacacctgtgacattctctgccatttgctgctgatgtgtgatctctgttagattattttgcttcagacaaccctttgctttttgtctttgattcctccttgttcgagagtagcattaaaaattgtcgttgggggcagaaaaaagaatatgtgggctgtttttgcacttagtcttgttaactatgggggtgtgattagaaaagcccagcccatttcctccaacttcattttccagttggcactcatgtgttatttcttcctcatacgccaacatctctttctcagcttctgcactttcagtttctagatttccttttttatgctccctttgtgccccctcaggattctcgatgactcccacctgctcccccttcctcttctgattgcgttcaaatgtgggttccgaaaaaccttctgtcaactggtgacgcgccacgtggcattgactggcggcaccgcaagtgtccgttactccaaacgtcggattgggcagctgtacccgctggacaaacagagcttctgctggtccaactccagcgggatgactgctggttaaaacgccaccactgactgtccctggcggcgcttctgagcctttgacggcccttgccttgaccacgcttggtgtcaccggcggtgtctgtcctttcgagctgttcttctcttccgtctcgttgttgttgggagctcccttagtatcctttgttggcgagccccagcaactgtcgtcggagtcaatttcctccgacgaccacgtctccctccttcatcggcaattgcacgtgtcaaggcctcggctaagttcctccaccacctgcacctggtacacttctcccccaatatcgacactcatggtgtgatggatggcggggctccacggcatgcggataagcaccctagcgcgatccacccttcgagcctcctctgtattgtcgtctgcatccaccagttcccctattgcagccacgattcgctggatatattccctatccaggctatcggaggtatgccccaacagtgaaccaagctaatctctggcccgttctgaggctcgggtgccatttctccagcgaataaaacatatagtctacttcctccgatgtctccttcaccatgcgttctgctgtagcgtccgtgagtcctagtagaagcaccatatcatcccccatgtactttggggttatttctgctccgaaatcccataatgggtcttcttcaagtctatcctaccacctcaggtctttcaggcaccccacccatgcttgtctgagccagtgcttgtcattcattgggatgtcaaggtataacgatgatcgagattcgcctctctttgtgtcttccttgtatgtttcctttggctgttccactttgtacctgtctctggccactacctcctcatacgaggtcaaactccttgttgcttgatggtgacctcgatatggtgcttcattctgctgcttcccctcttgcttgtttggtactggtggtgtctctgcctttgttgccatgtccctcccgtatttaggtatgttgacatacagtttcaagcctccgatgacaagctggtccagttgtctagccaactcatgcacatctttcactcccttgaatctagcgaacccatatctcctgccattcatgttttttttctttgagatgaaaatctccctcaaatcgccccacctcctgaagcgataccacaggtcacgttctgtgatgtcgtctgaaaatcttgtgaagtagaaggtcgaaacgtcctgcttatccctccagttttctcgtcagcagctttgctgttggccatccctgttgtcgggatgtgtccgtcaaggatccacgtacaagctcactctatctctcactattgtccggcctctagtcctaactctctccctccccgtgtttctctctctactatttctctcacctctcatgtctctctcttcttgccaatctcattaatagcaccttataataatgtaaattgtgaaatgttgaagattctgtctgtgcatacagaaaattcacttcaagaagttgtagcagatgttgaatgttatgtgttagttcctttttgatgatttgggatttgtgttgtgaagttgttgcatcattcataattattatttttttatttgtttaaactattagtattgctattgttgttgttgtgattgagaaagttctgtaaaaattgtgtttatttggaaaaagtgtgttatgagtatgactccaccaaatcaattagctaggagcatttttgtcatttgtcaactcccatccccttatatcaccttaacccaaccctctttcatggaaaacaacatttggcctatactcctcaccttcaactctcatacatttcctctctcttcatctttccaagaattatctttgctcttctcatcccatctcacttcattgcagattgtgagggttagggtgtgcactgttacaccatgcttctttaccctttaactcatgaagcaatcccatggatctaactatatattcagatttggtatgaggcgtaatgaatttaggtgtgggacttataagttagttaggaattttgtgagaaaatcagatagtatagtgtataactctggaaattgtagtgatatagatggtaactccaagtgatgtgttgagcagcatactggaggatgctgatatgtaaatataaataagaaaagaatgttagtcagctactgttaattcatagctgttgggtagctgcctaatatattatgactgatgtgcagttcacagtttctttgatccctctgtttctctcctctttctctctatcctcgctattctgttcttcccctttcgcctctctttctctttctttctgtttctctttcccacctaaatcagatgtggactgtcttgaacattattgctgggttagtggatattggcatattttacttttctgaatatttctccataattggtaaatattggcaatttagcatatctgattttcatatacattctggaacaggtgcaggattttatctca

SEQ ID NO: 2660 - DNA, 692 bp, Glycine max
  Intron number 4 from transcript Glyma14g31940.1 (locus Gly ma14g31940) derived from phytozome v7.0 (chr-ID Gm14; pos 38987816 to 38988507)
ttttactgcttttggtggggcctaaaaaatttgaggtgcacttccttgattcttttttagtatgatataatatcaatttagatttgaaggtaaattgtattatgttgcaatatgtttatgattttggtggctgctttatgaggtctgatgtgcaataagagtattttgcgaactgtggctctgtggattctgttgtctgcatgctcaacatagaaacatttatgatcattccctattatgctggatggcttgttaggtttaaaagttctcttcctttcgaagtacatgcaagctcaggtccatgtgattttctgtgcaagaagtgattgggaacataatatttgtagataaatagattaaaaaagttaatttgtcatgtctcattttttattgacaaagaatagataatcaattacatcaaatcatgtatatgttagatataatctggtttaatttgaagactggaaaatgattttcacatcagttttgtttctgtttaatggctcaatgaaaatgcagccttgggtggggattctcagccagcatgattttatcttttttaaattttaaagttgagcataatcaccatattattactgaagttatcatctaatattctgtaattattcctccattgggagctggatgcttttattgcagttctcttggtcagaacctggcaacaagtacct

SEQ ID NO: 2661 - DNA, 1085 bp, Glycine max
  Intron number 5 from transcript Glyma18g04530.1 (locus Gly ma18g04530) derived from phytozome v7.0 (chr-ID Gm18; pos 3314861 to 3315945)
cctaatcgtggtgctgggtaagccttttagatcattaatgctgtaatctcttattgatgctttttgttgaaatttgtgtgttgagcttttgtacaagtgcttgtatatccagtggtgcaagatatcatagtagtatgaagattttggtaatatatcaggttctcttcatgtactattaggtaaaagtggtttttgttgtggtctttataaagattttgttgtatttcgatagagcactccctattgtggatttatatttacaaagagttcagttgatgaatacatgggatgtaaatattaggctgctgcttagcagagatatacatgtgaagaatcatttgctatgtagttgtttttggtggaagaaaataaatgttagaagtccatgtgaaaaatcacaggccataattgttttttgatggcatgaaaaaggtaaaatgacagatagaaaataaagtcaaacaatctagttaatagttaaatgatctagaatctccctgcaataggtttttcttgaactgggtagattgtctacagtctgtgccttgtttagaagattttcatttggctttgacagatttgtgtatactagcacactttaaaacaattttctctgatgccacaaactcaaattatggaggctataaacgaaactcttactaataatgttacaggatgtcctttcctcagttcagaatgtcctatttctgctgataccattataaaaacattgcattcaagtggtgtctaagcctgcactttacaagtaaccttagttgatttggtttcaatttaatagacgtttggtttgtaggtatggtttaaacatggggaagatgcatgtgatttgtcctttttattgtctgatccgtggtagtgaaagcgaagaattgtatctgttgttaagtatgggcttgtattgcatgttagcttcattagatccggaggccacagtaatatgactatatacaatcgcagaaatggctatgtattgtttttgttgtgtagtccgtgatgtaaccaagttatattgtttatattttttatgcagtcggggacgtcgaggtggcccaaggagtggcagt

SEQ ID NO: 2662 - DNA, 916 bp, Glycine max
  Intron number 1 from transcript Glyma03g26990.1 (locus Gly ma03g26990) derived from phytozome v7.0 (chr-ID Gm03; pos 34502360 to 34503275 reverse strand)
ttttccaggctgggggatacaagtctgttttcattacttgagaaatttttgccctttgtcccattatttttagtagcaatgaaatattccttcccaaataacaagtgattgattatgaatatctgttttattctgctttaaaagaccaaaaatatcttgcctagtttcttgcgtataattagaaagtagattttttttaaaaaaaaaaataagcaattagaaagtagattaacatgaagaaaaagtaaaaaaagttaatagaaaaattataaaaatgagttaattaaggtctatatatttctaatatttcattaggtttaatacaatacttttattttcatttctcatgactcattaattaggtttagttttacttttgatttatgaaattttctattttaaaaaggatggcggtttagtaaaacacatgcttggtgcttggtgcttggtggttccaacaattttctcatggatagactggtagcaggaattttagttgggtatcaaatcaaaaattctaaatacctcttgataaaataaagaaaaagaaaaagaccttgctttaaaagacactctaatactacataaaaaaaagccatgcactttaataagaaaaattacgaaaagagtatgctttcagaagaaagaatattttttctaaatattctttctaattagtgatttgaatctgtgccagagaaaatgcttttcatgaaacaaatatactttctagttaattggtgctacacaaggagtcgatttgcaatacacattatatggataaatcaagtatagttcaaactactacatttatagtattaattaacattaacatgatatagatgataagcgcagtgctgttgggttttcttttgctctaggaggctgatactctatccaagtggtaatatcaaaa

SEQ ID NO: 2663 - DNA, 824 bp, Glycine max
  Intron number 2 from transcript Glyma08g07700.1 (locus Gly ma08g07700) derived from phytozome v7.0 (chr-ID Gm08; pos 5528264 to 5529087)
agctcctgagaattccaacagatttgttttttaaggtgtgtaaattgcaatgtcactcaattttgaaatatcctatgacttgattcataactaaaggaaaaagaaggaaatagttgagggttgctaaaattatatgttcttaagtcatgttgatctgtttagtttaattagaaccgctcaattgactcttgatttgataatcaaatttgtgtcatttgtacctgagtaaggtgttgtttagtgtttgcgtgtatacttttattttggctattagtaagatgtttattgataccgttatattttctgttttcttattcttcctctattacaaattatatgatatttaaggtttaaatttcataaaaaatattaggtaactttctcatatattcttcatttctataactaattacttatttattcttcttatacaacactcccattaggtgcaatattcattaagggtaatcttgaaataaaatatttaatttaatattaattttataaaatgacatctattttagaatatttttttttctctgaattgccatataatcttaaacaaaaggagtattattttattgattttagcttcttctccaaaacctaattttaactaatccataagctgattttaactgaataaacatttttcatttttcctttttatttctttttcctaaaagtgcttttgtagaaatttatctgaccagagttgtacatgttgcagcttccttagaaaattttgtcaagatattcatattcttcttggtggtggtgtctattgtcgttcattattttccatacatgttttcagagacggt

SEQ ID NO: 2664 - DNA, 1446 bp, Glycine max
  Intron number 1 from transcript Glyma04g41980.1 (locus Gly ma04g41980) derived from phytozome v7.0 (chr-ID Gm04; pos 47772154 to 47773599)
ggtcactggtggacacggactaagctttttgacgtgtaagtggcttcattttcctaatagtgatatgatttgcatcattttgttgatagtagatatacattttgatgtcataatctagttttctatttctttttataaattcaacattggatttagtcctcgacatgttttatgataatacttttggacttaattttcatctttggattcgtagaatgcatgctttattggtattatacaaattataccttcaccattgataagaattacaaacaatagaaatggatcggctgcagttgtatttttaactgcacctactgcagtcataatccaagggctgaaattttttcaacatatctattttaatattctaacataaaaccaataaataaataaaggagaggatactctgcagtttttaacccagaagatagatgtctcagaatttcattgtcctgggtgtgcaaaagattttcaactagcattagcttttcttcaaatgataacctcatccttatggtaattttgggcacttgctagcagagaaattttacctttttgaatatttgtcatgattcatgagtattactgggaagcctttaaaatttatcacattttgtatgtttctggaatacttctggtcacgtttgaaaaattttaaataatggtattacttatataaaccagtttctctaaagagaagcaaagaatcaggtttggtaaggtaagataccaaataatgtttttgacacaagtttattgagaggttgccatgattttggtcttcatcaactctctgacgagacttaaaaaataggcttatttgaaatggtctaatggtctctgatgaacagctgtatatggaaaactggcttatgacttaagttacagagtttttgccacaaattacaagattgttgtttttggatcctttgggatgggctgaagatggaactggatcagtgaattctgcctgagattttcttatatgcagggtcatggtcctgttaacataactaaggaaagggaatgatttaaaacatctgggtggaataataatgttctgatagtgaatagcaacaagtttggatgtgctttatcttgcactcctttgctttgaatcatcagttacttacatgaccctaaatggattttgctgatagttgatagtttctcaatttgcacatggtttaaacaactaccatccagagattgtcatatatgataagtttgttaatttttatgtacatagaaaattcttaaatgatagtacatagcaaattagcaattaaacttgtcctctgactttgtgtgcctctaaggtttgactgtttgataattgatacagaactagactaaatattttaatgaagattatcaatcatttggtgctaacgtgaccttcagacaggggctggtattttcaggttgataactcactgaagc

SEQ ID NO: 2665 - DNA, 610 bp, Glycine max
  Intron number 3 from transcript Glyma19g24220.1 (locus Gly ma19g24220) derived from phytozome v7.0 (chr-ID Gm19; pos 29599698 to 29600307 reverse strand)
ctatacacaaggtaatcatttttagcttatatccaatggaagaaaattaatattggataaatataaccaggttgtaatcttaactcttgagatagtttatttgtagtttgcagatggccgatttattttgaattgaacttgttatcattgtcgtgcagtcagcctgtttacactaatggtatatataatctcaaggaaccgagaatgttgtttcttattattgattatcaacatcataaaatccaaagaattatgtgacttgtcagaatgacatagttaaaccctcagctctgcaaatgttcccttagtctttctatgtcttggtgcaagtaaactttttttattgattctaattttagaccatcctatggtagtagacaaaccccttggctttgttgatgctttgaataacacacttctctgtttccaagttgtcttagactttatagttctggtttatgcactcttttcttaagttggtgttatctctgatatttgctcttatctatctggctttacttcgctcgaggttggtaattcttgaaatttctccctctgttcaatgcttatgatgtggccttgcagattttggaccaatataaagtgtctt

SEQ ID NO: 2666 - DNA, 2055 bp, Glycine max
  Intron number 1 from transcript Glyma06g38170.1 (locus Gly ma06g38170) derived from phytozome v7.0 (chr-ID Gm06; pos 41000748 to 41002802 reverse strand)
tgcttgacctttcttggtccaagtctcaggttagctgctattttgaagataggtgttattctgtaattccacttgtgtgttctatgtctgattgcacttataaagtttaatacgagtgaatatgttgacattagttggttggatgttcacaacactcgaatgcaactatgcattaaaatgttattagtttttctatattgttctgttaacagataaaatcacttagaggaaacagctggacttttcaacttattggttaaattattgagctttgaatgtgtgccatggtgtgagaaattgattctgagtcctaatcaaacaagcactaagtagaggctctagtgagaaagtggatcctaatcaaacatagttagattaaaaggggtattgtaacacctactacgaaaacctatagaaaccattaaaaagatattactctaaatgattgtactgaaaatttgatgacttttatagagctcaatagtgtctattgatctatttagttgaccttacctagtgggataagacttagatcatattatatatagtacagtttttaattggcagaataggcatcgtgtgacaactgacaaaggattctaaattgcattagaatatattattcagtgttataaacttactgttttgttgaatatgcatttaattgaacaaaatttttgatattagatggactgatactatttttgttgaatatgcatttagtcgtttgtttattatatcatggaaggtattagtggactctactagaacactgctaattttgttaactctaggttttgggattacttactgtagtcataaacataaactcataatattacaatatgaattttaggaactagataaagttctgtgagaagatttctgaattgattttccctaattcctagaaaattgatgttaaattttcaatttcttctcaagtttattgtagtaggtctacaattatttattttctgagtttcattgttattctaggatttccttggaaaggaatttgctgacgaacaatttaaagtggtaacttgtgaagaactggatgacatgtgttatgatttctttgcaatggtctgttttttgatggtgaaatatcccataaatatacatccaaattttccagaaattactataatgaaagggatgtagagataatagctttagtgtaaggtaaagggaatttagctttgctgcctaagaagccgaaataatatatgcaggtcagtaacttgcttaaggtgctgttatgttgggaggtaacttggtcatgctaaaatatgacatttttattacaccctgctgttgaagttacaataacaatttaaaactcttagaacttaaacatggttagtacatagtatcaacagtgtcaaggcaagatctgacaacttttttctgcagtgagtgaagtgaattaccaggaacttcactggggaattactgtcatcgagctcactgcttacagtcctcaccctttatcatcttggaggagctaccattaggcatgaatagagaaaaaattgagggaccaggctttgaagtatgatttgtagtgaggagcaagaaaaatttgagagattttattgaaataaaataatcctttctaaaggattttaaattatgaataaaaaagagttacacagtataattgtttcataaaaaattctaaatatatttattagacaaattataaaaaaatagaaacttgttctaatttatattaatttttactattttgaatttaaatattttttaaccagtttctaatttgctaagttctcctcatattctagtattgggatttggatttgagcaccatgcagggtgatttaaatgcgaaaaataaatttgtgacagatgttattgcaagctacgaagatgtctttgaattggttatatggttatttagagactatctaaaattgaaacatttgtaatgatgatgctgtgtgttttaaaaatataaactaaaccatatatatgtttatcttcaatgcatttgtttttctgtttggtcagcgcttgctctcatcttca

SEQ ID NO: 2667 - DNA, 5999 bp, Glycine max
  Intron number 3 from transcript Glyma19g43060.1 (locus Gly ma19g43060) derived from phytozome v7.0 (chr-ID Gm19; pos 48834438 to 48840436 reverse strand)
cagctggtcttgtgcgattcttgaacgttagggctgaaatggaaagagatccaccacgcgtcacatgcaaatagcatcaccttcaccgttgcgccacgtttgatctcatcacagcattcttatggcgctgccacataaaagcattatattgaagatagatgcagatgaggatgttcgcacgtgctaagttcaatcctcggttaccctgcggcagttaccactgcagggaagcttcgtgggaatccattggaggagttaatcaaccaagtgaaaggtgagtacatgcactctctggcagatcaattggctattaagggacgatacataccaataatggtgaggtctcttactgtatcagatttgagaaaatttgatcccgctcaagtagacatggcaatggggcgggtcgagtacggatattgtctcccaatcccttaccccgactcctcgacatattcccatacccgtacccgacacccgacgggtttgaatttattgtcccatccccgtacccgtcgggtatcgggtatccctaaccccgttccacacaccatttagaaaaatattttttttttgtaaaaaaatattaaaaatttgattttaaaaaaaaataaattgattgttaaacatttatttttaactacttatatatcaataaatttattataacacgtgtgtctacataaatagttaaaaaaataatattaaattatgtaaaagttttaaaataaaattaactagtaataaaaattatatgccttttaattaaattatgcaaaaattctaaagattttaagtggcggggcgggttcggggtcggggtcgggacgggtctagtaatctcatacccgtacccatacccgacttttggttatcggggaaaatccgaacccgtacccatacccggtcaactcgggtattacccgtcaaagtcgggacggattcagacgggtacccacggatacgggttttcttgccatgtctacgctcaaggagggcttgggccctttccaggagtaacgtttctaactccatttaagaatgcaaaaggagaagaaggtttagtatttccgatttggtttcatttgtagctcgttatgaaactcttccttattgttggaaataattaagaaattagtgtagtaacccatgcaacatacgtgacactgatcaatcatcgattgtatttttcattttacaagttaatgtgtccattttagggaaagatagaaataattggaaatataattaaaaaatggatatttaaacctaaatggcaaaagataatattaggaatcaataactgacattatgacaaggaaaaaattaatattttaaaatcaattagtttaaaaaaattgattcaaaatcaattcaaatctggttcgaaaactgaactagtttcagatcagttttgaatctattttaagaatcgaattaatttacaaactgtttttttttcctttaaaaaaataatttcagtttttgctaaaaaattattcagttactaagtgaatcgaattggttttaaaaacaattttagttttagcaaaaaaatcgatttaattttatttaaccgaacatgtttgattcagaaaccagttcatctcgatgcaattcggaaacggttcgaacatgttttttatattcccacccttacactgtgttaacgaattaccgtaataattttgaaaataaactgagtaaaaaggcattcatcaaccgcacaaaacactaagaaaatctaatctaacaatgtgtgtaaattattgtaaatttcctttatacttgtctttgatttttatacatttaaagaagaaaaacacaaacacactattcaccaatcccacattgaataaacactttttttttttagtttcttgcaacaaaaaagaattttgttaactaatatccttagaaaattggttaagaaactaaaaaaaatatttattataaaaatcatagaataacataaaaaaaagttatttaaggtgtaattttaggcatcttaataattttttttagtttttaaatcaatatcttaagggtattaattagcatttatctaaaaaataaggtcttgctaaacggtatcttaagacattgattagagaactaaaataaatatttattgagaagattataggaaaacgtaaaaaaatattataaacagtataattttatgcatctcaataaaaatatttgtttcttttaatttcttaaacgatgagcatttgtaaaaaaaaaaaatgtcaagctcgttaattaatagatgatgttacgaattgcgccctccatcaaccaagatgttctaagatacggaccgggtaattattaattacaccctctttaattacaaagtatactccgatccctttagtagtttttttaaatgatcccttttcctgaaatttgctatcttcactgcaaaaaataaacggcaacgtaaatggaggttagagttggtagggaacaaactcatatctcacaaagatttgaatttaattgtcattgtcaatttgagaatttgattgatgaaaaatttataagtacttctgtaaacattactttagacatgtcttatctcaaatgagtcattgaaacaacacctaaacttttatctaaaaaaaaaattgcttattattaaaaaaatataattttaatgtgtcaaatgtgattttggattactttaaattgaaaagagttatttatttgtaaaagcaattattccttgtgggttgtttagtagtgttaaatataagagagaaaatgtgcaaggttgaagagagagaatgtttgtcagttaaacaattttattttttttggatagactgggctaagcatttgctaataggaatttccattggacgaaaaaggataaaatttagatacaattttattggtattgttagtattgttctccaattataattaaaattttacctcaacaatttacattgacatttaatgaagttgttcattatgcaaattttgttgacatttaatgaagttgttcattatgcaaattattgaggtagaactccaattctaactataaaataacactaacattacccgtgaaattgtatccaagttttcttgaaagaaaaattgagttgtttaaaattgaagtaacataatgagatttctatttttattaaaataattttaaatttaaacccatatttttatattttttaaaaataattatttacattttatggaggaattatttatatataagttaataaaattaatgaaacataacttgtttaaataattaaattaataatattatttttaaacaatatttattgatggcgtgtttggtttcatcggtagctcattatgaaacttttcattcggtagaaaagaataaaataagtaagaaatatgaagtgaaatgttgtaattgagtaaaatgcgtgaattattgtaaattttttatacttttctcttattcatacaaataaaaataaaagtctttgattttttttttcatcatatttgttagttttttcaaaatgttagttggatgacacgtttggtttagactagaatatacattataattttgtatatattttgattatatttagtttggtatttttattttgagacatattatcttttaaaaagtttaatttagacttttatatttttatattaagaacaaattacataaacattttttgaagtttggtgtaattacacaagtaacttatgctttttaactattattttcgtctcccttatagaggtgttagtgtaaggtttaagaaggtattagtataatgttttcaaacttaaaggggagttaatgtaggggaaataaaaaaaaagttgagttatgtttttcaattttggtccttgaatgttattttgttcattttcagtcacagtaaatttatttttattttttaaaaattttgcttcctgtaattgtaaatttacggggattaaaaatgaaaaaataaaatattaaaagagttgaaataaaaaaaaaaacttacatgaatcaatattgaaaaaatgaaattttataggaactaaaaataaaaaaaaaacttacaaagatcaaatttgaaaaaaatgtaaacttagatagactaaaaatatatttaattcacataaaaataatgaatgcaaccaaggcattatgcatcactcttaggaagtagataatataataaaattaattaaaatataacactattaaaaaatattttttaaaaataattataaatttaattattttttgtattttaaataaatattatctacattttgtggagaaattatttatatttaaattaaattaataatattttaaaatgtctatataaattatatcatccatctataatatttgagattttaataatgatacaatattgctgtaaaaaaataatatagtaatattttacattaaaattatttattttttctaattatattttggataattctttaagacataaacatgtaattttaaagcatgcataataatacaatagtatatccttttaattatatactaggggaaaacagatattcttgccgaattactttttcatgttttttattttattatatcttctgacattttttagattttttcatttggtatatggggtaagactccatctcttaagttatgatgtcataaattaataaattgtcaaatcatcaactaatgtcaaactaacaaaatatcacctcatcatttaaaggatttagactaatagtaagtgtgaaatgtaaaaatttaaaaatatcagataataaaaaaaaattaataagtaacaatataaaaaagtgatatattacaaggatgaaaaatatatttaagtcatttattaaaaatacaaagataaatttataggttctataacctttttatataaatacagtataagaaagttttttttttaattaacatacatcaaccctctttagttaaagtacgttagtaaattccagtgagtgtactttgaaaaacataatatttaattataatttgttaatgtatttcaactaaaaataagtggatgtacgttagtaaaatttcacaattaaatgtatatgtactaattatttttttagttgaaacatattagcaagttatatgccaacatattttaagattataatttactaacatattttatctaaaaaaaaggaattttacatgtacaataaaatatataaacaaaagagagaaagacaaaaaagaagataaatttaaatttgaaatgtaataaataatatagtagaggagagagataaatacaaaatataatattgtttaaatggttgtagaaattgttatatatgtataattctaaaaaagaaatagacgcgtagttaacaaatcccataaaaaagggtgtgtaaatttaattaaaattcgctttaataaattaaaataaaattgtgagattaatgggaatgtattattaactaattaaaaatcatatgtatctgtaaattatggattatattatatatatatatatatatatattattttctttaagttgattaaacatgtttataaatgtttaaaagaaataaaaatattttttattttattcttttatacttaatatcataagtgagttttttatgagtttaattcaatattataaaattaatttgtaagatgagaattattctttatttatatagtttatctcgacattatgtttattagaggaaatagttagtaacttggccggagttgtatcgaaaatggagagtagcttgctctttatattttgcactgttcatctaccacccgagaaggtagtatttttcaaactacactaacctacgaatgctaatgataggtaacgcgggtcaagtgtggctgtttcattttcagcatgagcgacggattcatgaaagcctttggccgaaatcgcccgtggcccaaaggaaccttccctcactccattgtagtgtagggagctcttgaaggcaaccacctcgaattt

SEQ ID NO: 2668 - DNA, 2230 bp, Glycine max
  Intron number 1 from transcript Glyma07g19200.1 (locus Gly ma07g19200) derived from phytozome v7.0 (chr-ID Gm07; pos 19095748 to 19097977)
gcaatttggccactgcccttagaggttagtcagttctttctttcacattctgttcatgtttttcatttttgcctttggttttgggtcattgattttgttaatttgttgcatcagtgattaatggggttggggcatttttactctcaccatccataacatactaacatgcttttgagtacagggatgattattcccacaaaaaagtgatggctactaatttagtgttgcacaataacagtaacaaaaagaaagaataataatgatagctgataatagttggctgaaatttggatcttaggcaacgtaagtaatttaaacattttaggaggttgttatacaatgctcaatttttatcgggtttgattatgtcagtcaaatgaatggtttgttatttttatttttatttttatcaatgctgcttttttttttataaaaaaaataaagtagtaattaataaaggtctgagtctgaccatctaaccattccagcattactggcacatcccaacattttttttttacaaaagttagtattaatgttttgcataaattcaaataattgtctttaaaaaaattcaaataatttaatgagcaataattatttttaaagaaaatatttaatgtagtattaacattaattagactgatgataacgtcttgttcaaaactagcttactgtattatcaactttaggctctattagccatcgtgtatattttttttttcccgatgcttagaatatttcttttataaatgatttgcaatatggttgagtttatattaccctgaacttattataagttttccccccttcattttctggttataatgagttcaaagagccattttaactgcgcaaactaggttctatcagaatgttatgttctgtgcgttcactgattttaaattaattattgtcctttttaattcagccagaataaaaaaaaattgtccttcctagaaaggattgttatcaatataaatttaacatgtttcttaaaagacgtgatgctagaatatgctagttttacttgcagggaaacgtgaaagaaattgagtttggagttctgtgtttttctgttgtcttcattctgtgtgtgcgattgtttttgctagaataatagaattgtcgtttctgttttatagatttgtgggacagtgggaccaaagtggtaggttaactggtgcaaatgtgcaacattaaattttaacttgtcttggtagaaataaagaaatgacattatatctaatttaatttgaggtgtgagtgtggctaggtcagcacttcagttagatgtttattaattattgccaaggggcgttggatccaataaattgtttggtgagacaacagtgctaatgttaatgacctctctttggggacatccgacgagaaagtaagacattcaccatgtgtctgggaaatgtgatggcaatgatcctcacgttggggaccatgagcttctagacttttagctcatttgctgcacatgggtcacttaacaaaccaaaaactttaggtggaaaagttgctctttcacagttccaattcatttcccaagtgctgtgtctgtgtctgttttgactttaatttcattttagttgtttggatctcctttactatttcgtatatttccagtttatcagttatcacacactccgtaacactaacagtatctcttaaagtaggctttgttcagagtcttttgtttgagtttgtgccacatttttgcctttatttctttcagctaaagttgaacttctagttttttgtttattgtagttgaaattccttttcttagactccattggaaaactttacttttccttgttccattatttttcttttggctaaactttcttacttttgaagctgtctcttctagcttcacggttgcttgattaaacccggtccctttcagatattatatttgatttttctttttgtgtacagtagggatactgagctttgaatttaaaacttcatgcaaactatttaaatgtctcaccactaggccgaaccatagtgcttatatttgaaattatctagaaaagtatgtcattctattatgaattttgtataaaatcctttttgagtcaacagcatagatttataattgcaacaaaaaataacttgtgatctgtttttgcattctatacaagattttcccaataaattttttcagctaaaattagttcatatttaatcctaattatttgtgcagggagaa

SEQ ID NO: 2669 - DNA, 1471 bp, Glycine max
  Intron number 1 from transcript Glyma18g45890.1 (locus Gly ma18g45890) derived from phytozome v7.0 (chr-ID Gm18; pos 55568367 to 55569837)
atctcttgcactattgctgtcaaaccccaaatcattgtaaccccttttctctctccttgattccttttttgtcgttctgctctgtttggtggtgcctgacaaatttggtaagaaaaaagtgtacttgtaaactgttaacagttgttaatcgaaattctgcatgaattggtttttgtttattaaattgtagcgttggttttgtgtttggcagtcgagaaaattgggatggaaggtctaaagcttatgtttttcaatgttttgtgaaatgggtctgtcgaaattactggtaatttgcaagataactgttgggaatgaaggtctcaagcttatgattttcagtgtttatcaagatagtgtttggataaaggatttcaaaatttcaagctttgttgcttatagtgctcttactcgattgaacaagattggtctataccaaacaagtcattttgatatatgatattttgaattcacttaaaaatttaattcctctctcaaaactccctttccaaattcactattgtgctactttggattctatgtagtgtcttagaaaattatggaaaagagtgtccttgtgccaggaaaatggccaagtattggtggggtacctgtattcacatgattcacttggatatgtatcctgggagaatcttttaattttgtttatgttcttatagagtcaagcctgttttggacaggactagtgatgccttttgtgacattctaacacgtgttgggtgaagatatttaactgttgtgacatgttcattggagaaataatttctctatttatacttgagtatggggaagatttgtaaatgtgttttttcttatgatcacacgtactttttagtaaattatgatcatcatacactgatatagttatgtattaatgagatatgatcattgtctctttacaaatattattgatttatttaaagtatcctggtcatactgtatcttgtgattttaagacttttccatatccccatgtccatttcatatctcgtgcaaagtatctgggctttgtaggttttgttaattggatcaaccgaaactactaataattttctagataattcttgtcggttacattgagcatagtcagtttgggagtgtataacagtttttggctgggtcagaccaatttttcaaaattgtggctgcaatattattgttttgaagatcctgcaactgcatcacggtcaaagttgcagtcacacctgttgtattttttctgcaattttggtaattgcaggaccacagccacctcagtttgtgagaggctgcaactttgattataataaaaaattctgccattttctttctgagcagccaaatttattttctttctaaggtctaaattttaaatttatgttggggggatgggagggtggggggagggattaaaaataagttatatattacgaatgtagatggatattttcatcttcattattggacttgcaga

SEQ ID NO: 2670 - DNA, 752 bp, Glycine max
  Intron number 2 from transcript Glyma10g30520.1 (locus Gly ma10g30520) derived from phytozome v7.0 (chr-ID Gm10; pos 39148108 to 39148859)
agatcaaaatcgcaaaggtattctattcaaccctttcattccactcgtgtttagtgtattatgcacacagaacattagggcatgcacaaattatatttacttcttgtttagttatatattactcctaagtcactgtatgcttaagattaagaacttaggacaagctccaagacttaaacttctctgtgtcctgattttatttattttgctgcttttcattggtcaaacataatatacatggctacgtgccttttgtagagactggaacatttggtgtgagttgtatctggaattaatcatatcattcgccaaaaaagaaaaaaaatcatcttgcctacactcttttagcagtggactaaaaagaacttttatgcaatgtgtgaagttaagaaaaagattgagtcccaattcatcactaaattacagggaaaagggaggagaggaaaaatagaagacgattacatcattatattctcccaaattaattctaagtttgcttgagtaagctactcaagtccttcctttaaacacaaacataaggtttagagttttttaattcatccgttctgctctctggttctgtgtttggtttaatgagatttagttgttgaagtatctgctctgcatttcctgttgttttaattttgctgctatccaggctttgctatggcaagatccattgtaggcttctttttccacattatgatgcaaatacagcaaggttttattttttcaatctttgtaggaaacaa

SEQ ID NO: 2671 - DNA, 3013 bp, Glycine max
  Intron number 2 from transcript Glyma01g01730.1 (locus Gly ma01g01730) derived from phytozome v7.0 (chr-ID Gm01; pos 1292164 to 1295176 reverse strand)
acaattgtctttccattgtttggattgtacaatttgtagcctttcgagcttgcatcatagccaatgaacacatgtttctcactccgatcatcaagcttgaatcttccttggtcgggtacatgagcatatgcaatgctcccaaatactctcaagtgatcaactcttggcttcactccactccatgcttcttgtggtctttgatctttgacattctttgttggggagcgattggacaaataaacggcacatgcaacagcttcagcccaaaattcctttggcatatttttagccttcaacatacatctagtcatattaagaatagttttattttttctcttcgctaccccattttgttgtggagatctaggaaccgttagagggcgacgaatcccatatttttcacaaaattcattaaattcttttgatgtgaattcgccacctctatcggatcttagagttttgattacataaccactctcctttttcacaagagctttataatttttaaaagctacaaatgccttagatttttgctttagaaaataaacccaagtctttctactataatcatcaataaaaagcaagaaatatttattgttaccacatgaaggaggattgattgggccacacacattggtgtaaacaagttggagaggctcctttgttcttgaattagttttttttggaaaactccttcttgcatgctttccaaggagacatgcttcacacaattgattatgatggttgatgtgaggcatccctttcaccatcttctcctctcctaaggattttagtgctccaaaattcaagtgcccaaatctcatatgccaacaccatgattcatcttttatgctagccttcaaacattttgcttcattggttttaatgttcaaagtgaacattctatttcttgacataaacaccttggcaatcaaattagaattttgatctcgaagccataaacaacaatctttcatatgaatttcataccccttttcaacaagttgtcccaaactcaaaatattgctttttagtttaggaacatagtaaacatccgtgattaatttgtgagcaccatcttttaaagaaattaaaatggtaccttttccttggatttgcaccttggaagaatctccaaaagaaacatttcctttcaccttcttatcaagttccacaaatttctctttgcatccacacatgtgattgcttgctccattgtcaagataccataagcatttgtcttccttctcaccattattaagtgatagtagtagtgttggctcttcaacttctttatcttctttttcatcaacaagattgaccttctcttcaacatttgttctacactcccaagagtaatggccatatttatgacaattaaaacattcaacatttgatttatcatacctcctttcatatgctttttcataattgtttctacctcttcctcttcctcttccacgacttctagtggattgatggctcctccattcatcattgtcaaaattgtcacgatctcctcttcctcctcttccttggccatgaccacgtccacgaccacgtcctctttcacgtccacatgctttttgactactttctcctccattttctttcaaagaagctttggctttgaggacttgctccaatggctcatcatgtcttctattgaacctttcttcataggcttgaagagaacccatcaattggtctacggtcattgagtctaaatccttagactcttcaatagcacaaaccacataatcaaatttagcgattaaaggagcgaaggatcttttccaccacacgaacatcttccatattttctccataacgcttcatttggttcacaataaccaacaccttgttgccaaaatctgagatagattcagattccttcatatgcaatgattcaaactctctacgtagagtttgtagacacaccttttttaccttatcgacaccttcaagggaggttttcaaaatctcccattcttctttggatgtggttacatttgacaccaactcaaacattgcttcatccaaaccttgatgaatgaaagtaagtgcttgttgatccttcttcttcgacttcaacaaagtctccttctcatttggtgacaaaatagcctcattttgaggttgggtataacctttctctacaatctcccatgcatcttgagaacctaacaaggcttttatgcgatgacaccaattatcataattccctttggtaagacgagggaattgaaacatactcaagccattgcttaccatctctcaactcacaaagtgtttctctctcaacactctagaactcaagctcttatgccactttgttggaagaagaagaatattttatttcatttgccacacaaaatacaagagtatgatcccctatttatactagaatagagtgactactcacataattgcttattcaagaatactgaatgctcacataattgcttattcaagactttgtaacttacaactttacaactttcatcttccacaatttaaggctcataaaacttgttattattatttttctaattaatatctaacaatatatatatcatttgcccttttcctaaaacaatttgggaatattatagaaaaagtgtgtcctgccttcatatggttccctattcccatcccttgatgagaatattttactcgaaaacttgattaaaaaacatttaagaatgttagttttatgaccatatatgcgaatttagattcctaatatgagaaatccataaacttcgaagaatctcctatgagaaatggaatattttcttctttgttgggtttattttttccttatatatattcttatgatggtctgtttttccccaataattagttattagaactgttgatattttatcatccttaatctttgaaatgtcttattgagcagaagattctggtttttgcagaaaagggcaactcactgcgaactacaatcgccatagttgtgcctaccgttctcgttgttgttgctttgctc

SEQ ID NO: 2672 - DNA, 6005 bp, Glycine max
  Intron number 11 from transcript Glyma20g18980.2 (locus Gl yma20g18980) derived from phytozome v7.0 (chr-ID Gm20; pos 26658621 to 26664625 reverse strand)
gcaattggacatcctctgggttcaacaggtgtataccacaactttcattcttacattctgaatgcaacagtaccactgctgattacaaaagcattcggctattctcatttatatataaaataaaattactcatacttgtttctgtttctttttggaagttatccatgcctatgcaagatagatcttgcctgtagccgaagtagctaattaccataaagcagaatttactgtaaaggtttaccatgatgtgatgaaactcgtgcaaattgaaaaatttgggatgaactgagttgaaataatggttgaaggtattggggccaaatggaaaagtgggtgagggacaaaatatatttaggcttacagaaattccctttcttttagttgatcaagaaaaagttatagtcaacatatgcttaggtaagaaactaaactggctgattggagtggttgaacagggaaccagcccaccaatacaaaatagcctcaaatcgaactggactagattaggatatattattttttgacaccaaaatgggaaaataaggactcaaggctggatcccttggatgtaaagtgattgatgtgccactaaaccaaattagtttgtttttttattgaacaaaaaaccaagttagtctgttgattattatgctcatagtatatgatatgtagttatatacaatttttctttatttcaaaaataactaacgtaacttgccttgaaacttaaatctattatataaaatacaatcattctttagtttgaccatatatgcaacaatgattaggctgttatttcaattagttccttcactggttgattttctaatttaagagcattggttatgcatgaaagccccacatataactccaaataatgagcttatttctggagttgattagtgttggaaattggaattacacacattgtatgggtagttgttccaacaaagaatagttattaatgtacctagttagtcactatctaggaattcacatgcatgtacataggtactagaacttcattaatattcttgtaaatttaacattgtatttactccctaagtctatataaatatagatcagctgagcgagttaagcacaacctttagtctcttcaatatggtatctagagccaccttgtttgttctttaaaggtttctgcatctggtcagcagcacctaaagtcttgtctttgtccctttgtccaaacagcaatctcaatatccaaaagttccttccactgacctgccccctatccaaggttgccttagtcaccctcaccaaaaattgccagcctctccacttccttcctaggtgatcactttttcaataagacaactctttgacaagtgctgaaatggcttcagactctcagaaagctgatgatcctgccttctctatctctggaacaccaacaatcacttcagaaaaattgaatggaaaaaattatttagcatggtcagcctctgttgaactttgctttcttggccaaggtttatcatgaacatctagagcaatcctcagaaaagatttcagaagacaaacacgagcagtggaagaaacttgattatcagctttgtgctctcttgtggcagtctgttgagccaactaatattgacaaatttcagagccttcaaaacttgttattctttatggaaaaagacacaatgtgtttttgctaatgacattcaacaattgtataatgctgctcagaaattggccactcttaaacaaattgatcatgacatggttgcctatgttggtactacgtgggatgcatccagattttgatcatattcatgaccaagtccttaactagccaagaagttccttctctagagaatttaattacctagctccttcgagtcccctcaccaaaaataggaaaaaattcagttgacaatattgaaacttctgccatggtatctaatcaagggggacgaggtggtcatggaaatcaaggaggacaagctaaaagaggaggtcaccctcaatgttcttactgttagagagtgggccacacacaagacacttgttatcctattcacggattcctcgaaaaatcggtgaatatttcaaagtttgaaacatctgagataaagtttttgaagactgactatcaagagtatctccagctaaaagctgccaaggaatctcaaacatcatctgctataagtggtcataactccactgcctgcatttctcaatctggtaataatcaaagtccatgaataattgattcagatgcttttgatcacattgctggtaatagttctttattttcacccctttctcctcctaaaattccttattttattactttagctgatggttctagagttgtagcaacaggaatcggccatgtatctcccacttcttctttgtctttaaactctgttgtgttcatacttggttgtcctttcaatataacatctcttagtcagcttactcgttttcgtaattgttcagtaacatttgatgctaactcctttgtcatacaggaatgtggtacgggttggacgattggcgtaggaattgaatctcatggtctttactacctcaagcctaatctttcttgggtttgtagtgctgtcacatctccaaagctccttcatgaacgtttgggacacccacatttatctaaattaaaaataatggttccgagtcttgaaaaaataaaggacctattttgtgagtcatgtcaactaggaaaacatgtccgttcttcttttaggcatgttgaaagtcgtgttgattccccttttttggttattcactttgatatatggggtcctaatcgtgtttcgtctatgagttatagatattttgttactttcattgatgaattttctcaatgtactagggttttcttaatgaaagaacgatctgaaattttgtcctttctcacttctgttaataaaattaaaactcagtttggtaagacaattaagatccttaggagtgataatgcgaaagaatacttttcttctgttatttctccttttttgtcagcgcagggcattctccatcagttctcttgtcctcatactcctcaacagaatgacattgccgaaaggaagaatagacatcttgttgagactgctcggacattattacttcatgccaatgaacctatccacattggggtgatgcagttttgtcagcctgttttttgataaatcggatgccttcttcctctattaaaaaaaatatcacattccattttgtttcctaaagaaccgttgtttcatgttgatccacgtatttttggatgcactgttttgttcataaattgtctcgaggtcttaataagcttgctgctcaagccatcaaatgtgttttccttggatattccagattacagaaaggttgccgatgttactctcctgttcacaatcattattatgtctttgcagatgtaacatttttttgaagaaaaactatactttgctccctccatggttgaggccaatactcttcaagaaatttttcctatttcctatcttggtccatcaccttctttgcaggaatcagagtcaactgtagattctaccatagatattcctgacatccttcacttgagcagactcaaagatcacccattgaatattgatgtcatcctcgaattcctgacgcagaacttgaaggtaatgaaagaccagttgaatcatgtcttactccggcagacaacctgaccatggacctacccgaagagaatcttgacttgcccattgctcttaggaaagatactctgtctacacgtaatccttattctatttataacttcttaagttatcattgtctctcttcttcgtaccattcttttgttttctctttatcttctgtttctctttctaaaaatctttgtgaagcacttgatcatccaggatggtgacaagacatgattgatgaaatgcaagctttggagcttaatgatacttgggagttagttcctcttcccccaggcaagaaacctgttggttgttgatgggtatatgttataaaagttggggccaatggacagattgatcgcctcaaagctcgattggtagccgaaggttatactcagatttatggcctagattatggagatactttcttccctgtggctaaaattacttctgttcgactctttcttgccatagttgtcatccgtcattggctactatatcagttggatattaaaaatgcattcctacatggggaattagaagaagagatttatatggagcaatcactgggatttgttgctcaggaggagtctagcttggtttgctcaggaggagtctgtttttggaaaattcagctcagttgtttaggcttttgggatgaaatgaagtgaagcggaccatttagttttttattatcgtactcatcaagtagatgtgtttacttgatggtctatgtagatgatatagtcatcacaggaaatgaccaaggaaaaattgctcaactgaagggacacttatttagtcattttcagactaaggatttgggaaaatttgaatattttcttggaattgaagttgctcagtcaaaagatgggattatcatctcacaaaggaagtatgcattagacatactggtatgtcagattgtagaccaattgatagtctcatggatccaaataaaaaattgctacctaatcaggggaagccttattctgattctgaaagatatcggatattggttggaaagcttatctacctcactattacaaggccaaatatttcctttgtagttggagtggtgagtcaattcatgcaatctcctcataatgatcatcgggatgcagtaattcgaattttgagatacattaaaaggaccccatgacaaggactactctatgaagacaaaggaaacactcaaatagttggattttgcgatgcaaattgggcagtatcacccattgataggggttccactttaggatattgcgtgtctattggagaaaatcttgtcttatggaagagtaataagtaaaatgttgttgcaaggtctagtgcagaggctgaatataaagctatgactgtagccacatgtgagctcatttggattaaacaacttcttcaagaattgaagtttggaagtactcaacaaatgaagctatgttgtgataatcaggcagccctacatatagcttccaatccagtatttcatgagagaactaaacatattgagattgattgtcattttgtccgggagaaagtcttttctaaggaggttattattgaattcgttagttctaatgatcaactagcaaacatctttacaaaatctctaaggggaccaagaattcaaaatatttgttcaaagcttggagcatttgagttatatgcttcaacttgaggggaagcgttggaatttcacatattgtatgagtagttatttcacacattgtatgggtagttgttccaacaaagaataattattaatgtacctagttagtcacatattcatgtatctaaaaattcacatgcatgtacataggtactagaacttcattaatattcttgtaaatttcacattgtatttactctctatgtctatataaatatagatcagctgagtgggttaagcactcaagcatttcacaacctctagtctcttcaataattagaaaccggatggaagcttcatcctatcccaagtgaaatcgaatgcttcattcctatcccaagtccaaaattagtgtacagataccgtaagatatatcctatagaaatataagaacataatgaataaagtaattgaatcatcagattacctactcttaattgggcattgggaatgtatctagtacccaataaaaacaggtattcaatatataaatgtgaatcacaaccatttaggagttctatgcatcatacaccacatccctctcatgactagaactctacctggaacacaattattgtcaccggtacttgtctaataccaataatacagaacattcttattgtcttagcatgtttttctattttttttttggtaggtgctcg

SEQ ID NO: 2673 - DNA, 607 bp, Glycine max
  Intron number 5 from transcript Glyma08g40570.1 (locus Gly ma08g40570) derived from phytozome v7.0 (chr-ID Gm08; pos 40320106 to 40320712)
aggtataatttttctcatagttttgcttttatgctttctatttattgcctatctttctttagcatacgtagttagcttactatattgtattgtggattacggcttaatcacagttgcttactttttttcctttatctgttacatagttttttactaattgttttttgtagtacatggttgcaaattgttatgagatgcagtattggtgattgttgaaattctattaattctgtaaccacagttttaactttcccagaatgcttcaaaggtgtcttatttacattggagtatttaaagaaactactaataccttgatcatggatattctttctccatgtagcgacattctgagtggatgattacagaacatttaacattctgctcttaaatgatcaaatattctgtttaggcatatgactgtaggagttacaactaacacgtaacatgattgcatttcagtgagcttaaattaggaagttctatgctaatatttgtgacactcattgccttggattttcaagactgaaattgttatcacatgagaaaactgctaactgttttatgccttttttttttctttgaaatttgttgttcataactatcagga

SEQ ID NO: 2674 - DNA, 3459 bp, Glycine max
  Intron number 2 from transcript Glyma08g17830.1 (locus Gly ma08g17830) derived from phytozome v7.0 (chr-ID Gm08; pos 13298794 to 13302252 reverse strand)
atctcacgagcattccaaagaaaattctgagaagggtgagtgggttttgtatcttttagttgttaatatttgcttaattttagggttgtcaatgttgggctttcaaggcagaataagagagataaaaaaggtagaaatgagaatgttgagatgaatgtatggcggcacaagaaaagataggatatgaaatgattgtatacaaggagatattggtgttgcactgattgaggaaaaaatgatagagaataagttaagatggtttggattggatacatgcaaagaaggtgaatggaagcccaacgagaagagtaggcggcatggttttttgtcatatggaaatacagagtgagagaccaagaaggacatctgggggaagttgttaagaggaatcttatggtaaataatatctttgacaatttggtcttaagcttagacaaatagcattgtgtgatctatgtagccaacctcatctagtggaataaggcttttatttttgttgcttaactgtagtgtctgcaggacatgatacatgcatatttaggtgctattgtctggattggacaaccaagttcaaccttggtgggactattagttttaaatcttgaatgaactgaatatgataagattataagcatatgaaacctagacattcaaagaatggtaacattattaaccttgtgttattgtgtaagtgatgttgctttcaaagtgccttaggatgtgatagtctatctaagagattagtaccgtatctctactttacagaatgcggaacaaggaaaagtaagggtttatctgttgtcaacatgatttggagggtattgagagagattgtaaactaagccagttcgattaggagcaagaggatatggagattaattctttatttgctaaaatcttcgatgttctagtccagaaggcatgccaatattttgtatgtaatttgaatttaaaatcaattttaggcatctttcttttcttatacttaggtgcatgaatgggaaaagttgtctcactaattctccagttctgtaacataagttcaaaggagacccaatttaaatgaatgtgaattcatttaggcttacttcttggggtcttggacaatgtcagtatttcttatgatcatgtctacccctcaacatgtttgatttcctacagtaatagggcaatgtataggcattacacatcactacctgataggaactcagaaaataagatggaaactaggtggaaagaataaagtgagtagaactttattattggaaataggacctaaagtggagaattgaataaggatctttcctcccactccccaatctgatttaccgaataccctcccccatctgatttccctatttatctaaccaaactcctctaactaactagctagctagtctcgctatataactaatggactaactaacagttgtctttattcaatcctcctcattatactatatacatcctaacaatacttcccccttgaaattccaccttgccctcaaggtggaaatagggaattctcatatcatgagagctcctgctgatcagctcataaccatgcatctctcccctggatgttgataatctccccaggcccactatcctatgccatttcacaacagattctattggctacttttttctatctttctctttggcaatgttgatgatgttttttttattgactatataattagagtttaatttctatgcaatgacggtgtaaaacagttttacaccgtcatccaatcacaaattaccatttgaattattttaagataattattttaaaagtcaacaaacttaatatacatggtgggttgtgattggatgactgtgtaaaactttttacactgtcagtgcataatcttttttctcatataattaatagccataatgatgggatgttgacaatattattaggattatggaatgtcatatttttatgtgttagggatacattgtaagtagggtagcattataggattggtagattttccattttcccaatattgaagtttgttggtgattgtgtcttcgtagtttttggagattaactccagatttatagcattaaacagaattatcagattgattctgatttgtatagttaggagaatatgctttttattgtgtaaggatctcttgtatatttttccttcttttagttcactgccagttaagaggagaatatctcccctgatttttaagcctagattagtgtacaactattgatctaaatccctttttatctctcttctttgaattttgaaatcaatcattcatagtggaatacatttttttctagaatgtttaataattaggattacttagacataaatttggattttctctgtaattggtaaatctataacatataacattatcctcagggcagtgcttaagaaatctaaagtgaaaagtcttttttaaaagtgtaacatttaatgttatcaatgcattaactgacatggtttcaaatagaaattttctatttatcgatctattaaccattgctcttagggaaatagttttaaaaactgaatttatgattgaaattgttggttgattctccttttatccctctcttctccctctctccccttgttccatattccctataatattccctaataatgatcataatccctaataatcagctgtagatatttcctaattacaaatcatatctttataatttctaagcctctccaagatctttcttcctaccatattctgtttggtttgtcctacatcaatattgtaagtgtttgaggttaagttgtcaaattcacttagtaatggataatccttgaatgttcttcttttgagggaaacttgttgtggaaagtctatctacaacttccattatttggtgtgattgtctactgaaaatgctcttcaaaatgcaaaagccaagcaaactcaaaatactaattacccgctactgttgcttacaatttaaacattttactgtcttctatcacaactcatgaactgctgttatcaatggctatgctgattattgcatggtacttcaccatcttttcttgaaaatgcttcaatttttaaaaatacaaattttggttaaattttttctcatagctgggtaattttccatataacaattgctctcttggtgaatagcaagaaaactagaaattttcctttgaaagattttctttctaaattagtccgatacttacttttgtaacacaagtgaagtagagatgttcatgtgcttcctctctattaggaattttctactcatcattgcttaatattatatttgacgagcattaactttgtttagtgttgtttgttgttcattgaactagagttctggttaatttactctcttctatcaaatgggattcttttcatgcaaaaataaatctacattctgttgttatttcagggaagttgaaagataagcacagaagcaaacatagc

SEQ ID NO: 2675 - DNA, 7470 bp, Glycine max
  Intron number 1 from transcript Glyma20g23760.2 (locus Gly ma20g23760) derived from phytozome v7.0 (chr-ID Gm20; pos 33515933 to 33523402 reverse strand)
gaatccctcgctaaggtttctaatttgcattttttaacttgttttctactgtgttattgttctgttactccgttagttacccaacttatgtattgttccaagggctggcttaaggcccacgtaagggctttaggttaaaaaaaaaaaaagaccccaaattttttttaatattaatatacctcaaaaaaaaatttattgtaaaattatatttaaaaataaattttaattaaaatattataaataattgttaatttttttattagtatcgtacataacaattaatgagcaataaatcttcactaatatcataactttgtttagaaaaaaagagatttaatagttaataataaagaaaccaaaatttttttcttttatttctattctcttatcttcctattcaattctaattcggtcttcttttcttgctatttctcatacttctctctcttctcacatgcttcttcagtttacttgattattgttttactttgacatattaatcaatagttcctcgatacttatttgtttattctcatctcttatgtgcatgtgtctttatttagaggataaatgcaaaagttgacatttcttccttttaagtgtgtcaataccaggtaaaagccaaaaatagaactcagtgtactcttatttactcaaattttcttttgttgataattattacatacttacatgttcctttatcaaattatagttgtattttctattgaaaaatgttaatttaataatctaaaatcttatacataccgtaatagtctcattattaagtccaaaaaactaattttaaataaaataataataattttaataaactattttatgagtaaataaaaggtttcattcttaaatttgttttaggccgcccctcattgttccacaaactttgcaactaactaccacctggatcgatgtggggttgatccaactaaactagaagacttgagttctgatttggatatccggttgtgttaaatacttagagagaactttgttacgttagtggtcctatggtgctcaaacagatttcctccggtggagtatgtggtctatacaaaaaagtaaaaaacaactttgcaactaacttaactaatttacatcgtttaggactcgagagtaggtcttcttgagggtagatgttttccttgttgctggaatgaataattagatctgattttctcactattctgtcaacttgatgctagctagtttaatattttagggggatactttaatttgtaagttttcatgcaatgctctctaagactagagagtggtctaatctgccagtcagcgatgttgatatgatacggatggaggaaaaataaaaattgcatagcaaaacaattaagtcacaggacaagccatgtcagcaaagcagaggtagcaaatgtacaggtggaagtagggggcatgaggagaagtgtgcatgttggacattttagtgtaattgatctctttattatgttaaaataagagtgcacgcttgttttaatgtaataacgagatgttcggtttaggcaaaggttggaaattacatggaagttactaaaacttccatcaacggttggaagttacatggaagttactaaaacttccatcaacggcaatttttaaaaataaataacttccatcaaccgccaaaaaccacctgttctttgattataaataatcattctggttcagaaagcataacatgtgaaaaactcacaagaccaaaacaaaactcttgaattataatcttctgattttatccgattgaacaattttggttgaaccccgaaatttgattcaatctgaaagtgtttatacacgacttcagatttatccaggattatctcgattttcaaaattaaccaacaaaagattgaatcaaatctttcgagatgacgaacgatagttcgaagatgacaagcaagtttgcaaagttggacaagtttgaagggcaggatttcagaagatggcagaagaagatgcactttctcttgacaacattgaatgtggtgtatgtgctgagtacaccgatgccggtgtatatggaaggcgaaactctggatcaaacaaggaagcgttcgaaatgggagaacgacgattacatttgtcgtggacacattctgaacggtatgtctgactctctctttgatatttatcaaaatgttgagtctgctaaggaattatgggactctcttgaatccaagtatatggcagaagatgcctcaagtaacaaattcttagttagtaatttctttaattacaaaatgattgattcgaggcctgttatggagcaatataatgaactgctgcggattttgggtcagtttactcaacatgatttgaaaatggatgaattcattgcagtttcatctataattgataaactgtcttcttcttgaaaagacttcaagcataccttgaaacatatgaaggaagagttgactctggttcaactcggcagtcatttcatgattgaggagtcgctgagggctcaggaaattgacaaagtcaataataaaaccgtagcaggttcctcttccgttaatatggtagaggaaagtggaacagttaagcaaaattacaatgctaaaggtaacaaacgaaaatttcaaggaaataagaacaaaggtccaaacaaacagacaaaattgtcatgttggaagtgtgggaaacctggtcatttaaagagggattgccgggtgttcaaaggaaagaacaaggctggtccaagtgggtctaatgatcctgaaaagcaacaaggtcagattgtagtgaataattttaattcgaatacgaattcaaattatgtatcactaatatctgatgcattctatgtgcaagatgatgacgttgcttggtggtttgattcgggagcaacaagccatgtgtgcaaagatcgtcgttggttcaaggaatttagaccaatcgatgatggctctattgtgaagatgggcaatgttgcaactgaaccaatcctaggattaggttgtgtgaatttagtttttacttccggaaaaagtttgtatttggataatgtcttatttgtacctggtattcgtaagaacttattgtctggtatggttttaaataattgtggtttcaagcaagtacttgaaagtgacaagtacatcttgtcaagacatggttcgtttgttggatttggttatcgttgtaatggaatgtttaaattaaacattgatgttccttttgttcatgaatctgtttgtatggcctcgtgtagttctataactaatatgacaaaatcagaaatttggcatgctagattaggacatgttcattacaaaagattaaaagatatgtcaaaaacaagtatgattcctccttttgatatgaacattggaaaatgcaaaacttgcatgttgaccaagatcactaggaaaccttttaaggatgttaaaagtgagactaaagtcttagaccttattcatagtgatttgtgtgatttgcatgctactccatcattaggtcataaaaaatatcttgttacttttattgatgatgcatcaaggtattgttatgtatatttattaaatacaaaagatgaagctcttgataaatttaaaatttataagaaagaggtagaacttcatcaaaatgggctaatcaaaactcttcgtacggataggggaggtgagtattatgatccggtttattttcaatctactggaataatacatcaaactacagctccctatacaccacaacagaatggtgtagccgaaaggaagaatagaaccttgaaagaaatggtgaattccatgttatcctattcgggtttaagtgaaggattttggggtgaggctatgttgacagcctgttacttgttgaaccgaattcctaacaaaaggaataaggttaccccatatgaactttggcacaaaaagacaccaaatttgagttatctcaaaatttggggatgtagggctgtagtcaggcttacagaacctaaaaggaaaaccataggtgaaagaggtatagattgcatatttattggatatgctgaacattctaaagcatatagattctatgtgctagaatctaatgattctgttgctgtgaactcggttatagagtcacgggatgctatctttgatgaacaaaggtttacatctatacctaggccaaaagacatgaattccatgtcgaaagtctcagttaatattgaggatataccttcaactagtactgaaactagaaagagtacgagagtaagaaaagctaagtcatttggtgatgactttcaactctatttggttgaagggtcaaggaatgatattgaatttcaatatcaatattgccttaatgttgaggaagacccaaagacttttagtgaagcaatggcttcaagggatgctgtattctggaaagaagcaatccaaagtgagatggattccatcatgcaaaataatacatggaaattggttgacttacctcctggatgtaagccattaggatgtaagatgatctttaggagaaagatgaaagtggatggtactgttgacaagtacaaagccagattggttatccaaggctttaggcaaaaggagggtattgattttttcgatacatatgctcctgttgctaggatatccactattagactgttgttagcacttgctgctatccacaatctgatgattcaccaaatggatgtgaaaactgcattcttaaatggtgaattggatgaagagatatacatgaaacaacctgaagggtttgttatgccaggaaatgaaaataaggtgtgtaaactgatgaaatctctttatggcttgaaacaagcgcctaagcaatggcatcaaaaatttgatgaggttgtgttgtctagtggttttgttataaaccaagcagataaatgtctatacagcaagtttgatactcatggcaaaggagttatcatttgtctgtatgtagacgacatgttgatctttggtaccgaccaagatcaagttgatgaaactaaggcatttttgtcttctaagtttgatatgaaagatatgggggaggcggatgtgatcttaggaataaagatcaaacgtggaaacaatggtatttccatctctcaatcacattatattgagaagatattggataaatttaattttaaagattgttctccggtaagtactcccattgatcctaacctgaagctattatctaataaaggtgtagcagtgtctcaacttgaatactcaagggcgataggatcactcatgtatgcaatgattagtactaggcctgatatagcttatgctgttgctaaactcagtaggtttacaagtaatcctagttctcatcattggcaagctatgaatagagtattcaagtacttaaagggaaccattgactatggtttgacatatactggatttccttcggttattgaaggttactctgatgcaagttggataaccaatatggaggattattcatccacaagtggttgggtattcctccttggaggaggtgctatctcttgggcatccaagaaacagacctgcattacaaattcaacaatggaatctgaatttgtagctttagcagcagctggtaaagaagctgagtggctaagaaatctaatctatgagattccattgtggcccaaacctatacctcccatgtctatcaggtgtgatagtcaggcaactttggctaaggcatatagtcaagtgtataatgggaagtctagacacttgggtgttagacacaacatggttcgggagttaatcatgcatggtgtgatatcagtggagtttgtgagaactcagcataatttggccgatcatttaaccaaagggttaagtagagatctcgtaaaaaggtcggctgtgggattaggattaaagtccatctgaaatctcttatgttaagatacccaattcccatctaatatgacattaggtgttgaattcaatgtggaaagcttaacatgtagagattggaacacatcatcgaaagtatcccaaaaggtatgtgttcggttctgtaagttaaggaggttgaagtataacttctcaatggttcttttgaaaaattgcatttacaggtgcaagaaagaaaaggactacctatataagcatgaagtttagccgcttcaagaagctgggacttggctttgatatgcttatgaaggatagggacacaggctagtaaaactagtgtcgagcaagagtaatgttataaactattgtgcagattatcttcatgtattcattatgaatagaaagggttcaatccttagtgacaccctgatattcgaatatttgaaacgtgtaatttgctaagatgaaattcaatcgtcacgatatttcatctatgcagtagtttgtggtatgttatgactttggtgatttgatcggtaattacactaaaatgggggaggtttgttggacattttagtgtaattgatctctttattatgttaaaataagagtgcacgcttgttttaatgtaataacgagatgttcggtttaggcaaaggttggaaattacatggaagttactaaaacttccatcaacggttggaagttacatggaagttactaaaacttccatcaacggcaatttttaaaaataaataacttccatcaaccgccaaaaaccacctgttctttgattataaataatcatcctggttcagaaagcataacatgtgaaaaactcacaagaccaaaacaaaactcttgaattataatcttctgattttatccgattgaacaattttggttgaaccccgaaatttgattcaatctgaaagtgtttatacacgacttcagatttatccaggattatctcgattttcaaaattaaccaacagtgcataggaaggtacctaacaacttgatgcgtgattttgtacagagcaaggatgagagtagagaaattatcgtatggtttaggactaccgtggtctcagacaatctccacctgacataactgaatcgaaatgtatgacatgaaaattagttgggatcatagacatgtagtgatcttagactaatttctcgtgagaatgggggatataaaaaagggtaggcagaaaagggtgtttctgaattcttgagttcaccaccaaatttccttttgcctttcttaataccacatatttgatttgaacatagtgaactagaggattgtcaccttctctagtaatcctgctttaatactaagaaaatggagattactttaatcgagtgttactgcctatattttgcaatgagttgactgttacattggtgccctcgttaactcatggctgacaaaacaagactcaaggagtcagcgactgatctgaaagacttgaaatgaatggtggatgccttaaaaaacaaagagatcaggggtacacttccatatttaaaatttgatacaagattggaagaattgaaaacactttgaaattgttgactaaacaaacttcgttggtcacaggtaaaggtc

SEQ ID NO: 2676 - DNA, 1418 bp, Glycine max
  Intron number 1 from transcript Glyma14g09440.1 (locus Gly ma14g09440) derived from phytozome v7.0 (chr-ID Gm14; pos 7513447 to 7514864)
tgctgttcctccagtcaaagaccaaggaggctgtggtaagcaagcactgtgactctcttaataacttaagtcttcactcttaccgttcctactttacccttctttttatcaatttttttttaaaaaaaagtgaaattctttacttgttttttaacttatcgttgtcgatcgattttaatttatgttttatatattaattgttatcagcttttcgagtttatctgcgatttgttgcattatcatccacattatctattttttttaagcaaaaaataaatataaagtatatctgtagtactagtatagctcctactttaactttaccctttttttcaattaaaaaagaagaaagttcaatattttacttcttttttttacttaatcatcgtcgatcattttttagattatgctgttggtattctttttcgtgtcaataattgtttgtagtttttcacttatttgtgtttttctgcgatttattgctttgctgtgtgatcattcacttgatctattaatatctgaaaaaagttatctacataatacctcatactttataccccttttcaataagaaagaaaaagttgaattgttcacttcgattttaattaatcatcgcgaatcaatttttagtttatgttttttttttaaattaatttcgtgtcgatagttgttaaacttttttgtgtttatctgcgatttattgttttgctggtgcttgaacattctcataatctattaatatctggaataaaaatatgtaaggaataaatttaatattttattatggtttgtggttggaaaaaaaaaaaggagtttgtgtttcttagatttgaaactttaatgcaaggttcattttgagacccactccaccctaccccttttgtccttacgattcaataattgggtcaggattgcaaaagtagcatgatggcccgtgatagttgaaatatctctcacttttaacgtcatcagtattctgggtgtgttcaaatataagtagttagggaaacaccaggatattcaaatggtttgtgcctatgtggaccttttgcctaacataccaatcactaatatagttctttgtctttgtttaccttaccatttttttaccttttgctgtctaagaataatgaatattctttatttttgaacctaagtaaacaggcaatagtaaaaaagttcctttagcctaggatgaagtgagtcttgaattataacagagtgaggagcaggatagtgcattagtacttcagtttttgtagttataatgttacaacttaatgagtttctggctgtgacctgagtatttttataacctataggtatttttttaacaaactttgcttatcttgagatttgtttaatttattttttttaatttagggagctgttgggcattctcagcaatcggtgcagtg

SEQ ID NO: 2677 - DNA, 966 bp, Glycine max
  Intron number 5 from transcript Glyma11g35920.1 (locus Gly ma11g35920) derived from phytozome v7.0 (chr-ID Gm11; pos 37493884 to 37494849 reverse strand)
ggagcagctggcctttgaagagggtatgttaattgttatacttcattactttggggctttagatggaataatcttcaaagatgtgctcttttagatgaatgatacaaaatagaaataaaaggacaggatctccattaaggaatgaaacaactcatcaaaaagtataacaaataatcattcctttgttaagatataacattgatatatgtctatttgggaatacatttttttttaaaattagaatttaactttttcaactcatcaattgttcaaaatgtttcctcttcattgttggtagatgataatggaaactttagaagatttgttgaaaagctttttgaaaacggtagcggcatagcagtgcgcagcagccattctttttgaataattaataatattttcatcctagttgtcataattaataacagaatctgtcttctgaattttgtttatttccttgacttatttatttttaattgtgaatatgtcatgaactttgagcatttttttttaattttcaagtatttatatacatatagcttaaattatctaatctatacaaaaaaaggtttaattactcatttggtctctttacttgcacaatatttatgcttaattccttgtatctagaaactacttgttttagtctctacacatactttttaatctgttttaatctctgcagtccaaaatccctaggactaaaatagattaaaaagcaggtgtaggactaatacacgttaaaaagtgtatgtgtaggcaagtagtttctaggcataggaactaaaatgtaaagattgtgtaggtataaggatcaaatgagtaattaaacttaaaaaaactcagaataacagtcatccttctatgaactatccctccattttgtgattggccactacatgctaccatccaatattgataactatgatatcatatgcaggaaaggatattccggaagaaggtgat

SEQ ID NO: 2678 - DNA, 1662 bp, Glycine max
  Intron number 14 from transcript Glyma04g37780.1 (locus Gl yma04g37780) derived from phytozome v7.0 (chr-ID Gm04; pos 44228852 to 44230513 reverse strand)
gtgtaattgccaccttattgagtgcacaaacactggtacatcatatatctttcttgtgtgttttgtttatgttactgccaaaagatggtaagatactttactccttgccgtgtccttcttccttcttgtcgcgtccttccttagtgttcagccaaacaatcctccaaaggggtggaatacctacaaaagacacttcaatgctcaagttaggtctcgacgcaaaaagaataatgaacatagtaaatgaaagtgaatagaataatgtttgttaccttgagaacttaaccctttatatatatttatttatgggccttacctcttaattgaggagatgtaatatgagattacctaacagtgttaatatagtattaagataagttaaattccttaaccttaaatggggtgactgtccagaggatactaggctatgccaaaggggtttcattcaagttgtcgccaaaagagtactgggcaatgttgaaggggtcttaggttatgtcaaagggattctaggttgtggccgagagggtactagcccatgccgaaggggtcccaggtcacaccagtatagtttactttccaaaacttctggcattatcatctattacacacaaaagaacaagtttattttttatgcattattagggtaaaaaaaactgtcaacctattaaaaattcttgttgatataacttttataatagacattataaaagttaacaaaccattaattagagtttgtaatggaatgacaatgtaagaatattttacattattagtatgtttactatttattctaaaaaaaaattaactctagtgaaatctatataaaagtttaaaatttataataactcatgattggataaaatgtaagaaaaggttaaattaatttgaaaattttaaatatgttctcatactcaaaagtttgtagttacattcctatatttataaatcactttaattgaattcttgattaaggttttgtcaagatctcgttcaggttctgtcaggtataagaatgtgggataaacaatctatgctgacaatgtaaaggattatattgtcatatattcacaaatcatcatatatgataatttattgtcttttaaaataattattttaaaaatcataataataatgatttttgattggttgatagtcttaaatattttacagtgcatgaaaattaaattctaagaatctaattgaaaactttcaaatagtttagggatcaagtgactagtttaattattcaatggtttcttaaattatttgaaaaaaattgtactttaactagaaactcaattaaaaatgatttataagttgagtggcataattataaattattaaagtaaaaacttgtttaaaaatctccaaataattcagggatttatatattaatttaacctaaaaaattacagcagcaagccggcaaacatgtacagtgatcaatagtgggggaaaacttgagtcaccaacacaacattaaacttctttctttgaagcatctggcatttttcatcaaatgtcctacctagttaaatatttcaatgacatcaaatgttccttaaccaattctttagcaaaagtcttttaaatgcatccttgatgcatgtattaatcgtgactaccctgattattataaaataattatgtgacagtcag

SEQ ID NO: 2679 - DNA, 5367 bp, Glycine max
  Intron number 2 from transcript Glyma11g27360.1 (locus Gly ma11g27360) derived from phytozome v7.0 (chr-ID Gm11; pos 27071763 to 27077129)
caggtccaaattttattcattcctatgcttatatactttaatatcaacaatgataaattgcatgcttaaattataagattattgatgaactaggtttttattgattcaaaagtgtgatgcatatgctctatatatagagttgctgatagtgaggctgttacaattgacagcttacagataagcataacagcttttacaaataaatgaataacatcttttacagataagtaaatttttttacagataaatgaataacaatttaaatacatttgaatttctattcttgtggtttatccattacgccccctcatgatgaaggtgtcatctgtaacctttatcttgaaagcgtgttgcgcccaatggcttagtgaagatgtatgcgagctaatctttggtggagacatgagatactagtaattacttggcctgaacctattccctcacaaagtgataatcaagggagatatgtttcatgcatgagtgcagaatcatattagagcaaagatacgttgctcctaaattatcacacaatagttgtggtggttcatgcataggaacctgcaactcagttaggaggttctttagccacataattacagttgtggttgtggcaacaacacgctatttagcttcagttgacgaccttgctattgtgcattgttctttagacatccaagaaatttgacttcctccaaagaaaatgagaaaggtagaagctgaggtcctatcatcaaaattttcgccctagtttgcatcagtgtatgctagccattgctcggaagttggttttagtagcatgagttcatggttgatgatggactttagatactggaagtgaagtgtagttggtttatgcatgaactgggagagtttatttatggagaaggaaatgttaggccttgtgaggctcacatattgaaggttcccaattattttgcgatatttagttgcatctacaaaggttgtaccatcaagaaggtgaagtttggacgatggtgataagggtgtgggggaaggttctgccccatgtcaaacctctcaagtatatctctaatgtgtttatgttgtgagagtagaagaccaaatggcttagggatgagttcgatgcccaaaaaataatatggagttaccatgtttttgagtgaaaacacctatgacatagcttcaataacatcacacaagaacctagtgtgattacctgtgagtagtaagtcatcaacatacactaagaagtacgttgtgatgccacccaaagccatttataaccgggaagggttggttttttttggtcaaaaaaacataggaggggttaatttcttttaggggttcttcccgggttcacgggttaaaagccaggttttgtggctggaaaaagtcccttcaccattgttttggttcaaaaaaaattatttccttcccattttttttggtttttttttttttttttttttgggcggggggggggggggggggggctaaggaccacggaccattccttataagtgcatcaaattcaccctctagggcttttttgccaatgagtatgtttcatggcctcacatagattggatggctcgattttgaagtaatgggtgctttgatgttatgagcatgagtttgggtttgaagatgttgttcttggatttggtaaccatagggtggctactggttgatgatggtgtattatctctgggagggttaaccgtaacaattgtatctagaattgaagcagagtgattttgaagaattacttgatgagaaatccgaacacaaagggacctcttgaagttgaagaggacatacaattggttgaggatggggtgagtcatggggtgggttgagagggatagtaatatgtaaaggttggtttgtgattgtggttagggtttgggttggtggcttttgtgttagggtatagtagggaaatatgtgatcatagaatttcatatgtttggatgtatatattttttgtgttccaggttcaaggcataggtagccatattggaatgttgcatatcctacaaatatgcatgtctgagattttggttggagtttgttggatgcgtaggggcacaaccatgggaaacataggaaaccaaaggaatgaaggtgagtaggatttggttcagtgtgatgtagagcttggaaaggtgactgcgtgtttagtattggggttgagagtctattgatgaggtaagtggtagtgcagaaggcaaaagtctagaattggggaggtaggtttgatgtgtgaagataggcttttcctatttcaattatatgttagtgtagtctttctgtgctgacatttagttatggtgtgtgtggaggggtggtgaagtgtgatattctgtgtgtattaagaaatgtttttaatttgatgaactcaccccattatcataataaagggaaataatttgcaaattaaaaaaattctcgacaacaacttttgaattttggaaataaaattaagacgtttgatttattgttcaacatgtataaccaagtatactttgtataatgatcaacaaaaattaaataataagaaaagccatcaaaagacctagtgggagtaagaccccaaacgtcggtgtagataagctcaagaggttgcttgcttttgatagtggatgtagaaaaaggtagcttgtgactcttgacactaccacacgaaatgcaaggtgaagaattgctctttatttcatgaagggaaaggagatgacttatgatacaatcaaatggacgccccagaatatgatgccatggaaggtggttggttgtgataagtgctttgggtttagatgatgggtggggcatgtggtacaagccattgttaagttgtcattttagaagcggaacccttgtcttcagatccttcaccaagaaatggtcagaaaaaattcaatcgagattgggttagtttggcatagggaagaaaccaataaaacattttgagatatatttggaacatgcagtgcttttggaaggtgaagagtataaaagattttgagatatatttggaacatgcagtacttttgtgaacaataggaagacctgagccatcacctacaattatttgatcttgtccttggtatggttgtgtgagatgtagttaatcaagatcacaagtgatgtgatgtatggccccaaagtccatgatccaattagtcacactcgggagtagcactctagcatgatgtgttgctagagcattgttgtgttttggtgggtatggatagccatggatcttatagcataccttggtagtgtgcccaattttctcacagtactggcatatcaccttttttgaatttggagatgtggatctaccagtggaagatgaatagtttgggttgtacctagactgagtgctctttttataatagttatgctttacctttcctgttgcatgagcagtggctatggaatctggctatggctcatccctctttaagtaattctcgaagtcagcaaggagatcatggagttcatcaaagctaattggattttcctgagtgcgtagtgttgcagttacctctctatactcagcatcaaggccattcaaggtgtgaatgacaagatcaacatctttcaacggagaactaatgacaacaagttcatccgatattgacttaataccattaaggtattcataaatgggtttggagccctttatgaagcaagatagatgcatgatttgagctcttgtcttgtcggagaacatcttgtggaggatgtcccaggcttccttcgaggttttgacgtttcccagcatgatgataacaatgtagtcaaccgaggagataatggcatgaaggatcaattgatcctatcatttccaataatgaaagtccccgcgagatggggcagggcacttgattgtgccatcaaaacttattagatcataccccacaaggagagtattgaactaaactctccatgctagaaaatttgcgtaggtatgtttgatggaggcatgagtgtttagggccatgactgactatgcgtcagtggctggaatgatttttacgccattagtgagggacgaagtcatggtggcagtcaaggatcatctactgttaaggaaaagctattgttagcatataagagtattgatgaactaggtttttatcgattctaaagtgtgatacatttgctctatatatagagctgctgatagtgaggttgttaccattgatcacttgtagataagcataatagcttttagagataaatgaataagaagttttatagataagtcaaataacaacttttacaaataaataaataacaatttaaatacatttgaatgttgaaacaaacactttaaatacattaaatttttgttgtggtttatccattataaatatactttttatttttaatttagtttaacttttatgtgctataggtataaagatctaataagattacaaatcattataaatataacttttaagatttattaagattgcattttttatttttctaatatcatgaaattaaattcaattttggtctcctaattttttttttgacacggatttgatcctcttactatttaaagtataatttggacttatctattaaccttatatttaatatttaacgaaaatgttaatgttacactctcctatatttagtccattataataacaaaaattcttgttttgcatgttgtcacgttattacattcatactatcgtgactctctatgttgatatttttgttaaataataaacatcaagttaatagataaacaaaaatataaaattaaaataagagaactaaatttgtggaaaaaaagggaccaaaatctttaacaagagtaaagggattaaaatgtaattaattcgaataattattacaaactcaataatctttttatttattttttcatcattaattttattgtgtatgataaaaaaaattaagtaatataatttatgattgactgaatatatatatatatatatatatatatatatatatatatatatatatatatataactttacgctatcaaatgcgttataattatatatttgttttccctaaaaaaattatataattgtttatccctaaaattatttatattttgcttcctatttaaattttatttacttttaattcctatttctattaaaaataattgatttttaatcatttgctaggaatgaaaaatatatactttttaaagaataaaaataaattaattttaatagaaacaaataatttaaaaaaatatataaatagaaattgaaaatatatttaatatttagtgaaattatattttgaagtgactcttcataatggctgttttggtttggtttaggcaattagcgacgacagatacaagagtgtgacaca

SEQ ID NO: 2680 - DNA, 1617 bp, Glycine max
  Intron number 3 from transcript Glyma20g25010.1 (locus Gly ma20g25010) derived from phytozome v7.0 (chr-ID Gm20; pos 34713895 to 34715511 reverse strand)
gttcttgcacgtgtacctataattgagaatcagaggtaagtccaagggtttgatgctattttccacaaatgtgaaacagatcgattgctttctggatctcctgcttcactgtattttactagtgaccatgcttttctcaatacattagaaaatagagacagggaaaggctgtgtacacgattggcagtttttttttattaagataacattcacaaacttattagatgatctctcgtcggttgaaactaaagtatttgtagttatattgtttctgaatcttcaaggggatccaaaggaggtagagtatatattttttaacatagtttctagaatcttacgattcacattttgaatcacatgatttgactttgatatgatttggctagccaatgatttgcatcaagagatgaaccgcagatgactatgaatcttatgaattatgatacatggctgaatcaatgcaattccatatcaccgatacaaatcacttgatttataattcatcaatttttattttatttcacctaatgttttaaaataaaatgaaaaagttataagcttaaattgtttgaaaaaaaggaactaaaggagcactactaagcacatcctatttgattattcagatgttttagtttcattcttctaaaaccagggcttcacaccgtcacagtgtcaccctctgattctatctattgtatttggttgtaccatttctgttttaagtcttgtaaaatataggcttcaaacactcagttattactcatggttttgttttgtgaggcttttggtcattttctagtttaaaattattgcattgagcatgattcatcatttatatgatatatataagctattctttgttatgtgtcagttttataattagatacaatttatgaataacaaagaaacaacaaaagcttatctcaataggtgaggttggctacttggatcacacgataccgttcggttcggttaaagatcaaacttttggagatattgtttaccatgagatcccctttaacaatttcctccaatgtcctccttggtctcccactctccctttttgcaaaactaaaaaccatactatctactatcctcacggatgtttccagtgacctttgtgaatctactgtcttcacttatatcgttgtatgatttgtaaatcatgattcaaaaattagcttaacggttcaaaatttgaattgtgattcaatgagcttgtttctgaacataaatgggataaaatgtatgattttaaacttgattcaccaaaattgatttgtacataactttagggaaatgatatctgttgctgcaagttttttaaaggaaactattagcagctaaataaataattgatgctaaaagcattcattggtattccattctgaatatttttagttctctttcacttatttaatgtagtaggtatttatatacaccacgctaactcactttcagtgtagagaatattcattttcaccactgaattgagttttcaaacagttgaacattttcttatacaatttatagcaaaatattttttaagtcaaacttgaagcctttcttctccacataatagggagtgccccacggaattgcgagaagccattgcaa

SEQ ID NO: 2681 - DNA, 1458 bp, Glycine max
  Intron number 3 from transcript Glyma17g31730.1 (locus Gly ma17g31730) derived from phytozome v7.0 (chr-ID Gm17; pos 34951177 to 34952634)
ctgggaaagtctccaactgtattatgctttcttttttactcctacaacaataaaaattgttttagatacaattttaggcttaaataatatattattcctataaattaagtttttttttaaatagttctagtctttaattttttattttagtactttaaagattttaatttttgtattctatgctataaaataatagcattaacgaacaatgtaatcgtgcattaatattttattgacttatcaagtcataaaaaactttcacaaaatagtcacaagtaattttttttagtaagttgtaattttaaatgtatcatcaactcttttgagtagtagacgaagatttaaaaatattttaactaaactaacaaattctatcagtggtaagttaatggataaaaaatgttgtttttatattatcatttaatgcaattaatgagtaatagatattaaaacaaaaattctttaaaggctaaaatcaagacaaaaaatctttaaaggtctaaaaaaaatccttacaaaatagggagtaaaaggttattacagccaaaattttattagttggaattcttaaaattttactaatttaaaattaagattcattaaacaaaataggttaaattgtaatttcaatttatatttaatttctaatacacaattttgatctctattctttttttatgattttaatctcacattttagaaaatctacaattttgattaatttgttattgcatatatttttcttttgtttgaattgaaccatcatctaacatatttatatataatttaatttattataatgtaaacaatcaaagaataaatgtatataaaattgaggattagaccaaaattacttattttttaaattttaaagactaaaatcatagataaaaaaattaatgggaaccaaattaaattgtaattaattatccatcgaataagattacatatatttagtaggaactagacacatgaaatttatctagtgagagagagggttaaaaatgtattcataacatcatttctctcagagtaaattatactaacaattccgaaattttgtgaaattacaaaaattttcctacttttaatattcatcacaacttcccttggacttagggaaaaaaagtataatattttttgaataattaagggagattagtataaatgtataagatgtcttattgtaatgtttttttttaataaaaaagctaaagaataattacggagtaattagtgtaatttcatgcaatcttgtgaataattagtgtaatttactctttctcatatgatatatagcaaccatattgtattccttaaggagttttttcatattataagagtatttgcaagcacaaccacatatcttctcctaatcaacacaagggtgtgaaatgatcttaattaataattaattaatttaattatttgtctattcaagtgtagaattccaaccac

SEQ ID NO: 2682 - DNA, 957 bp, Glycine max
  Intron number 2 from transcript Glyma14g09970.1 (locus Gly ma14g09970) derived from phytozome v7.0 (chr-ID Gm14; pos 8031651 to 8032607 reverse strand)
acactggatcaactgtcaaaacaagcaggtatggttgaatacaatacataatcttcatttctgcacttaaatttctccatgaaattgttatgattttgtggtaagatccaacaacaaggaaatacaaagtctattacctggattaactacgtgttggggagaattaaatatgcatgatgatccttatgatttaattagaccctaagtttgtatgttatttctcattcctagcaagtcgtagtgcaaaaattgccgctataaaaaacaaattgaaatccttaaaggagaagagttctagtaccaagaaggagaagcaaagtgacaatatttctttagtcaattgtgtaagtatataatatgcagaatcaagggataattcaacggtgtatgaattgaaatgtggtgcaattgtttatactcattaaattggaattcacatatttaattaagccttttttatatataatttaggccattagccagaattgtaactgcagaagcatactgggggttttctcatagctaaatttaactgagttttctcatagctgaatttcagctttactttgcgatcatgtatgctttcactccttaaatttaaaaaaattagcatttctagaatcctatgcaatgctaaggttttgatatagtttatgaagaattgttttaagttccttaagtttaccattttatcatcataatagcaagattatgctctcagattcaatttgaaattgtgatcgcaaattagtgcatggtatttatcatgttaacatacatagatttatcatggtatttatcatgttaattcatcatggtagtttgattgtttgagaaatgatggtaaatgtatagtggtttgtcaactctacagcgtcatttgggatcaagttgctagcattttattttcttcctcaccttttgtttgcaggaagaagatataatagttgtgatacc

SEQ ID NO: 2683 - DNA, 792 bp, Glycine max
  Intron number 1 from transcript Glyma10g33510.1 (locus Gly ma10g33510) derived from phytozome v7.0 (chr-ID Gm10; pos 41858102 to 41858893)
gaggccaatcctactcctctctccttgatctcaaggtcagttcatgtcaaatcagggttccgattctccgttctttttccgtttcttaacaacattgatttttgtacttcactcaaatttttgtccacgtgacagatttggtgtttgtttagctgaaatactttttgctcctcaaattcggaatagtttggaatagtttaaagtggattttaaagcaaccgcgctttcgatttttctttattttaatatattctgttgaaattgatcaagcaggatgttatcagtttgttcaattagtttgtagttaatattatcgagtggaattgttgaatgtttgtaggtttcagttgttgttagttaatattatgttgcatgaaactgtaaaagtattggctattggtatactccctccggtctcaaatattaaaaaaaaaaaccgattgacgttgatcacattttattgcaccaatctcaattaaaaattatttttttctaaactcatctttcattggaatttgtataaggaataaaaaggagtcattgtaactaaaacctcaattaaatgaatggtattttagaaatagtaacattaaatgagctaaaattagttgaaattttcttacatttcagatcaagaaaaaattattttttttcttcttatatttgagactggagggagtatgtttagcttatctgtttttatacaaatacaaattggagaacatatgaggttatggcttttttgttttgtttccagcaacttgtttcagaaaaagatctgatagtaaggga

SEQ ID NO: 2684 - DNA, 1757 bp, Glycine max
  Intron number 1 from transcript Glyma18g10060.1 (locus Gly ma18g10060) derived from phytozome v7.0 (chr-ID Gm18; pos 8847766 to 8849522 reverse strand)
agaagaaaaaagtcaccttctccagaatttgcgcgtaagattagattcaattcctctttgctatcttcttccctttcctttgtttttgtttttccgaagtgttttcaacttttccatctgaattgtaattctggactgaatttgcttgttgagctttagttcctccgaattatgtgcctgattttgatgttttctttctgtgattgttgttttttttagaattgtgtatattttttgtctgatttttgttgttaaacgtgatcgatttctggtcatcgcatgatatgcgggattttttttaatttcccattgttttccctgtgtgatcatgatgagctcaaaaaatggcatctttgtgctgtgcctttctgtggttcacggaaattgtggtgtatatttgaaattttgaatagaggaatgtgttgtttaagtaatcagtctggtttactgggttacgaggtcaagatattgttgaagattcattttgggtaagaattatgttgatgctggtgttggctcaatggttggtagttaaaggtgggtgatgccaacgcctttaaaggtggtagttaaaggtaggatctcaacacaccccctttcacccaagattggacatctggagcatggagattctaggactgatttttttttttttttttttgcattgataaactgcaggaacaggtagttgttttggacagttgagggtgactcaatatcagatctatgataagctttgataccatcttgaattgccaatctaactcaaccccaaaatctatttcatgagatgaggattgtctattcctttataacctctattttagccacatttgaaattgatgtgagatctcagcacatcccctcagacccaggattggatatctggggcatagggtttctttttatattgcactgggaaagtgacgggaccagatagtgttttttttttacagttgagggtgacccaatatcggatctatgatatgctctaaataccatcttgaatttgggttaggcttaaatccgaaaatctagctgatgaattgagaattttccaaacctttataagctctattttagccatatctatagttgatatgagatctcaacataccccttcacacccaagattggacagttgagggtgatgcaatatcaaatctatgataagctctggtttttcttccctctatgtgggtgactgctctactctttatcagataaacaaaacatgaggggtcctctcatcttttgtaattttcctttcaataaatttctttaacccaaaaaaaataaaagtataacttctcagttctgagtctatatagatcaatgatgttcacacagattctgattcttcttcaaactattagctgatcatatagtttcctctattgattgggaaatccttttttcatttccaaatatgttaaggaacttagtttttattgttgaatgtttttgtattaggatcgaaccctgtccatgtggtataattgtaagactattaccatacggactaaggatcccgattatggaacttagttgggggcaaagctgcaataaatattttttgacataaagcaaaagggatgttaggttcagctgataattagtgatcccttaagttttgctgcatttgaatatgagactgtggttcatttgtagaggtaactttgatatctctctcgctttttatctttgttggaaggctgataatatgacaccttattagggaagggtggagtatattc

SEQ ID NO: 2685 - DNA, 5882 bp, Glycine max
  Intron number 3 from transcript Glyma12g16200.1 (locus Gly ma12g16200) derived from phytozome v7.0 (chr-ID Gm12; pos 15318782 to 15324663 reverse strand)
ttgagtgtgtgagctggttggatctttttatatttgtctgttgtgtgatttatcctggttatgttattatgctttttaatgcaagtttcattttattaaggatatcttgccactccagtgatggaactcttgaagaccccgaacagtcagaatggatgtagtccaatgtggcctttgtagtttgcacaacctttggaatttcgtctgatgttgattcccatagacataatgctcaaaaaattgaagagggtccaccctatgatttccaagtaagccttgcttgctcaaaatttccaatcctttttcactggcatggcccggacgtaaatgccaaagagaattatcattggacaagccattgggagcatgactcccagcttgtgaaatagttgagacagaacctgccacagtggacccttgaaagatgtagaaatttgcttgcttggtcccctacattaccaatgatttcccattccctcaaatttacataactccacctttaaccccgcaagaaaaagcttttgaattcatgacactcatagagactagatttttcttaaactttggaacatgataatcaaggttctaacaatcccatcaagcattttgatttgtataaaacctatactgattaacttgtaaggaacatcatcagaacattaccatcagacttattctcatatgttacgaacaagctttttatatggatacatatgataaaaacaatctaagtccaatacccattgttgagaatgttgctatagtttttcaccaaaaccaaattgtttttagatgaagagtcgttctgaacaacgaaaacaatttgatatttctttgctttctttggacaatcctttttctaatgactaggttctttgcaataagtacgaatgccttttggaccaaccttgcttttcttgctaccttctcctcctcctcctcctcctcctcctccttcttcttcttattcttcttcttcttcttaagagaggctaacagaattatttctaaatcttcatcttctattttgacatcaatgccatgaagcttcattagaacaatgtttaactcatccaatttttcttttagtgggatacctttaaagcccataattttctccacccccctccacttctcggtgttcttggttcgcaaagacttgcataaaatgataatatgctgatcgatcgaactgtgaatcttccatcctttgagaagctccaaatgatcatgtcttcatcacttgtaacctccacaagaatactataaatggccctagcatccctctcgttgaagactccctccacaatattcttgtcctagctacctctctaattgtctatgagatcagccaccacaaggtcgctcattcctggaaataaatccaattaaggacacatattatacatcaaccatggatctttccacacctgaatacgagttcctttccctactctccagtgggctcctttcacaagagcctttgaggtgcgtatacttctccaagaataacttgggttgtgatcaagctaagcatcccatatatccttccttgggaagtatctcgcctttagaactccagacactggtggatttggattctggacaatctaccaatactttttaccaaggagggctatattaaaccctcttaaatccctgaaccccatgcctcgtttctcctttggtatcaacaacctttcccaacttaaccaattcatatctctttagctatccttacggttactccagcggcatgagtttaccatatgatggatttcatcaaaataaatagcaacagaaatttctgaagttgaaacaagaaaaaaaaagtgaacattgaattgtattttatttaaaccttttcacaaagaaatttaattttaaaaattaagttttgccaacgaggtcaactaaactaaattataacaaagatcaaacctcttaaaagcaaatgactattcaaactctttatagattaaaagaaaaaactataaaaaaaaaagtcagctaggaaagcatcaaaataaatcttgtcaggtttgaacaaactaataaaataccacataagtataagtaatttatatattaaaaggaaaaaccatcaaaagtcaattaggaaacatcacaataaattttgatcaaaagtgtaggaaagaaagctttgaacaaaataataaaatatgacaaaagtaataaaaagaaaaacatgtgaatatgtgtttatactaatacccttgaccacttttcatattaaaaggcatacatttaatatttaatatacatatattttaatttaagtaaatatatcatagattaatagaaaaatcatgtgcatttgtatttattctaaatatttttaaatatttatttatattttgttgccgtctagctaagtcgtggtaaaaaaaagtttggtaatgaaaagaaaatgtatattttgaaaaagtatatattttctctaaattatttgaaaagaagaaaaataaacatataatttccaaataaggagatagaagaaaatggaaataagtaaagaagatctagtagaatagactctaaaataaacttcaaataataattttatttgtttacttttttatataagtttcttatttgcattaaaatacatttattaaatatataaatctagagaagaaataatcacaaattcgttcgtaaataagaaaaatgataaatagataagatctccataatatatactgataattataattatttttttctgtactaaaataatgtcataatatcatattccttgtttaagggtgtatttaattaggattttaaaagacttttttattttataaaactcttgtgatatttaatcaacatttttaaaagataaaaaaaacatgtaatattttatgaagatttttttatgagacaatgaaatccaatggtatagaattgagattttttatcacttaaaaaaatcatttgctatttaaaatcatacagatttaaataaattatattattgattgaattttatatgacttttttagtggctgttataaatactaaacccaccaaataatctcacctaatcccagctaatatcctgatacttttttttgtcatcccatacattttttttctcccagtctctcttccttgatagtctctccattgacataggcaacaacattccaatcccacacgttttttccagcttttacgctttctcctttttttccgggttgttttggttattgcatatgatttcttctaggatatttctgattattgagtccccaatccgtgtgaagaacacattgactgcaatacgttaatggttcttccctttagctattcactactccctttcatatagcctgtagtatttcaaacttatgggtacaaagagaacataaccattgtgccatgttttatttcttactatatttttattggaagataaaataataatgagtatctataattttatttatgctttcttataatttatataataattattttttattttgattttttaatcaacatcctataaacattgatttacataataattatctttagggacaatagttttttttaatttatgattattatttatgggcaatagggttattttttattttaactgtgaatatatataattgttgttagaaatttgtgtcaatgtcagtattaacacaagtcgaattcatgactattaatgccaaaataaaaattcttcccttcattcttaattaacctcaaacttgtacgtggatgcaatataggaagatatatatatatatatatatatatatatatatatatatatatatatataaacataccaactatgtttgctatgcagcttgggtatagcattttttggtttgacttgtagagggctacattaatatgtttattttaaatttatgtgaattactaatttttgttaatttttttattagtttgacatgataattattattgtataataactagtctcttagcaaaatgggagattcacaacaaggaaataacaaaagaaaagaccaagaggaagagaactataaatcttggactatggatgacaccaatgtgtggttacacctcttagtggaagctatgaataatggattgcgtgatgctaattggttgcttagtaaaaaaaaatgtagaaagagttatattttcttatttgaatgctaaaattaggtttcttaaaatttacaatcattgcttgagtcgaatgaagggacgagaagtaagcaattatgacaaccatcatggaaggatatcataaaatgtattagccacttgcaactagatttggtattcatgtacgttcttagtgggtgggatggttcagctcatgattgcaagttgttgagtaatgctttgacaaggaggaatgaacttaaagttacccaaggtaagtacttaatttttagataataagtatgttttttttttcttactaattttatatgtattgcatatgtaattaggtgcaaatttctagcttgtagattgtggatttcttaatcagcgccaatttttagttccattttgagatgtgcgatgtcatctacaagattttgcaggtcatggtaatgaccttgaaaatgaaattgaattgtttaatcttctccatgcatccttgaggaatgtgattaagaagatatttggtactttgaaatcacaattcataattttcaagacaacacttccgttttcatgtaagacatacaaaacttgtattaacatgtgcaacatttcttcgtaaagaatagttttgacctattgttcaaacccaagagaaggaatgagaatatgataatgcatggaggacaaatatagctttagatatatagagaaatactatataggaggaacactgagtttttatatattgtaactgtccaactccaatatttttcattttgcatactcttaaactttttattttattttattatatggctttaataggcacttgaattattggtttgtgttcaatgattttttttgtgcgcactctttccaattttattagttacacaacaaaagaacgtaggcaaattcatcccaattatattaattaggtgtttttatcctttggagtcctcaattagcatgccaagaaatagaatttcaaaatgtaaaatgtggggacagaattcatgattgttagtttacaaatatttgatcttcttgaaatccttagaatcctcttaaattgataaagtcttttcaaattttataaatttctaatttataaatccattaaagttgaaactacaaaatcctagtcataagagtattttaaaagaatcataaagtcattgcatttctataaagtctttaaaaacttacaagaattttttgtaaaaaaaatcttttaaaatcctaattgaatgcaccccttaatcatgtagtgctataaatatatactaattaaattaaattatatataatattaatattaactttatttgattttattactttttatttaaatttcttattttttcaaaatatttttaaaataggaaatatgataaatagaaacaagatcttctgcaaaatatataattaagaaaaaaacattctgtaccaaaataatatcataatatcaatttccttatttaaaagtcatgtagtagtactgaatccatatagataccaaacgattgtttaagtctaaacctaacaagcaagcaccacaagacaccgggatggcttcaatcaagatagcttttgcagtggtctttcttgctttaatagcttgcaatggtattttctttcaacatcatgtttgattttatgaaaacacatgatatagttctaggaaagaatcaatattattgaataatctgtatatatttttgcagggc

SEQ ID NO: 2686 - DNA, 2032 bp, Glycine max
  Intron number 1 from transcript Glyma04g06060.1 (locus Gly ma04g06060) derived from phytozome v7.0 (chr-ID Gm04; pos 4603941 to 4605972)
aaggtgaggctacaaaatattatcctttttttccttgtaggtcatgcatgatttctctatcttcttgtcaattaaaatttttggggttagagaatagatttacaaatagctattgtcttatgccaatgaaggaattttatcaccaagctaatgaaaagccaaagatttttgggatgacagcatcacctgttggtaaaaaaggtaattgtttatgtgccaactttgacagcatcaccggttgaaaaaggctttccttgtaatttgtgactatccaatttattccccaatcctcatatagagggttcttctttgtttatttattttgtagttagttttgcttcttcattctcattttaaaaaaaaatccttgtgattcatcaatacaacatccattgtaaatttgaatgtcttatttctttcactaaaaagagtaaatgaaaaacacacttaagaagacaaatcagtgaagatgactatgactacctacagtaagaaagaaacaaaaacactaaattagaagtagaacaatcttctgaaactggtaaatagctagtacttgattcattttgttcaacttacttgtgccccggaagtgtattgttttcacatgttttattagagtgtgcccccatttttaaatttgtgacctgttaagtatcaccaaatttcttaccttccctgtcatatagtatacttttttcttaaattgtatgatgtatgtctgttttaaaagagtttggtcctatttatttcccctcgattaccttccccatgatggggaaaaatttgttttgtgatctgactgctaaaatctctgtatagttttttttttaattatttgatagaatgaaagggccttttagggtaaaaatctactcaatctgccttgcctttgtgctgcttccacttacacaaaaaatatatattttagattcaacattcttgtataagtcttccaacgtgattatagaaactgaaaaacattaataaaaaaagagaaaaatttaaaagtgtatttgtacttgttttacttgtatttgccacccaatttcaaaacaacaaatgcttataatatagggggcaaatgctcaaaattttgaaaattaggtggcaaaatgcatgacatattgaaagttgggtggcaaaatgtgcaaatttcatagtttggtgacaaaattcgcaaaaacgtgaaagatagtggcaaaaagtgcaattattcttgtaacataaaaaataaataaaaaataattttattttaggaaaaatactatagtaaaatgtttaaattttttcgggttaaatttaattttttaattagtataaaacctttaacacatttttatactctatttctttaacttctatctttcctatttatttttctcttatttctttccattctatttcatttctaatctatatagagcaaaaaagcccttccaagggacagctatggttttaatcaatatgttttgtgcgaaagatgaaagttttagccattgctgcaatttgcaatttaaaaaatatggatatgcaatttatctctgcttcaaatacaaccatcaagttaactttcttttcatataaaataaaagctctccagcaagcgtatttatctagttattttaaattagaatttgatgtatttatgccatgatttgctgtgccctgcctcctgatgaagctcttcactgtgcatttttttaatgattgcttttttcttaaggaattattattttgtgatgttcatattacgacaatcacttggagtccatattgtgaatataaagacttgctataatatgtaatttatgtattatatcctgaatcaggtgtttcctctactatggattgtgaggatcagatatcagaacttgaaagcatcttggattctcaggtaattaatctcttgactttgatttgaactaatttttccacgagtgcacttgtgatagtatgtttataccaataaaaggtaaatgcttttttttgtttttttctgtagagatatactgttgaagatcggacagag

SEQ ID NO: 2687 - DNA, 1581 bp, Glycine max
  Intron number 2 from transcript Glyma18g38570.1 (locus Gly ma18g38570) derived from phytozome v7.0 (chr-ID Gm18; pos 46208009 to 46209589 reverse strand)
aaagatcctgttatcatttgcacagggcaggtttgtatatcactttttttaattgtctttatgtatgataagagtttagaagttattatgcaaaaatagaaaccaaagttgctcctttaatgtctccttcacattcatttatcatatgatttatagttgttagttgagtttccctacatggtaacctatgaacactttttggttttgttcttttttatatcattattcaatgatgtgatccttattattagacttttgtaaaacagatagtgtgtgtttggttaagcgttgaaaccacgttcaacggaaaaaaacacgtgttccaatgcacaaaaccaaaagcaatgtgagggaagctttttcttaacgccagttgcgttgagcgaaatgcatatgcaaacatagctttagtaactaagaatattacatggtttttagtcctgtgtgaaaaagggggaaagagaccatgaaagacattggaggaagttgttaggagggatctcatggtaaataatatctaaagatttggtctttaactgagttgaataatgtcatataatccatgtaacagacctcacctagtggaataaggcttttgtcattgttgtaatcagtaaccaagaatgatgctctgtacaaaatagaagggcagtggagaacatagctcatggaaaaaaagtgatgggaaattcaagcactttaggtcaaggaataatgtactctaagaactgtgaatgaaatgaactgcaaagaaaaaaaaaaagaaaaattgttcacctatatttgagggttatctactactaaccttgtattttataattgttgaaaaggagccttcatacagtcatacaaagttgtttagttcttggctttattcatttattgctatattatttacttggtaatatatttgatatttatgtacaaaatattttgagtcctgctgaaaaatgatttcttccccagtgccccctgtccccccggtttagtgtgagctctatgaattcaatgctgttcacaggtgtaaacactgcattcaaaattttgatgagaagaataaataaataagtttgtgttctctgcagtattatacagttatctaccattgttaagtttaaacttcatggagttgttacatgctatataatgttggattcttgagaaagtaatgctagtcaagctttaaactcatttcccatcctcctgcaggccattggatctttttgagtattttcacatcatatatggtacaggatccaatggctgagaagagtgtgacttttggggtggtgatggtggtaagtttggtcagtggcagagctagccattaatatgatcatggttttgactgggggtttcggatgcataaagaaaaaaaaaactatataagaaatagtgggcttttaaaaaattaaagaaaaggctccacccctagtcttggtcttgggtaagttaatagcaatactctttaaaaactagaagtatactagtatagagaatatggactagtaagatattatttagaattcattcacatttagaaacttgtaattctgttatattgactctttttgcagacat

SEQ ID NO: 2688 - DNA, 558 bp, Glycine max
  Intron number 9 from transcript Glyma04g06210.1 (locus Gly ma04g06210) derived from phytozome v7.0 (chr-ID Gm04; pos 4750083 to 4750640 reverse strand)
taccccttggtgtaattggatctccattggaagtaatttgaagtgattctctaatatgacactgacattacttttttccatcaggatgtgcaaataactttgctcctttgatgacttgacattagtttttgtatataacctgactaagccaatatctttatctgtaaaagtctccccatcttttcattcttcatatttattactagtttatagaggggattaggaattttcatgttcaacaattttggttgtctaagctgtttagtagttgattgattggttttgggtgtaagagtcctgaaattgaagtttgaattcgtcttcctcgccatcaaagttctgacttttcttgagtatttgtttttttgtggtatacgttcatggcatatagctcattttacttttattggttttttgtttgaatgtctaattcttgaagttgcattagtttgtcctgaatatcagcttaaaaaaattgtcgtttcctatgtctttttactgtaattcacttgagtgtttgtaggttctccaagttgctaaaccattgaaccagatccc

SEQ ID NO: 2689 - DNA, 5473 bp, Glycine max
  Intron number 5 from transcript Glyma06g20990.1 (locus Gly ma06g20990) derived from phytozome v7.0 (chr-ID Gm06; pos 17414281 to 17419753 reverse strand)
aaaaggtattatttttttgtcttatcattcttgcatgttagaacccgaggaaaggtagagctaaaaaataagaatatatgaaatgtactattgagaagttattccaattacaaaatgtattgagtctatttataagcaatagtaactatgcatatttacaaggttaaccagtaaacctcttggttaccgaataaaggtattgaattacccttttaacaccctcccccccccccctataattcaaaagctctagacttatacaacattgaacactgctaaaaaaacatcagaaacacacaatgttcaacatctttctcagcatcaaaaacctctcagtcttcaatcctttggtcaaaatatcaaccacttgaacttctgttggacaatgatgcaaacctatccttcctctgcacacttgatccctgagaaaatgaaacttagtctctatatgtttgcttctcccatggctcacaggattcttggccaaatctatggcaaatttattgccaatttgcagcctaattttctcaaaattgtcacacttcaactcaactagtaaggacaatagccagagaccttgacacgatgcattgcaatcagctacatactcagcctcacaggttgacaaagcaacaacattttgcttcctcgagctccaggatattggagcacctgataacaagaacacaaaaccagaagtgcttcttctatctactttatctccacaccagaagtgcttcttctgtatagcccacgagatgtagatcacccttctctttctgatttggaaacaaaataccacaattttctgtcccctttaggtacctcatgatcctcttggctgttgctagatgagattgctttggacgagtcataaatctgctaatcactccaacaccttaagaaatctctggtctactgtgacaaatgaacctcaaacacccaacaatttgtctatacaaagttgcatgtacattttgttcactttttgagttgtcaatcttcaaattggcctctactggaactgctactgagctgcagttttacatgtgaaacctcctcaaagttttagtgatgtatttcctcttatgcattataatgcctctgctagtcttcatgaactcaatgcccaggaagtaagaaagttctccaaggtcagtcatctcaaattctgaccctaattgtgtcttcaagttcttaatttccctcgtgttgcttcctgtaattaccaagtcatctacataaaggcatagcagcagagcttcatcattcttgagaaatttcacatagacaccatgctctacaatgcatctcttgaatccactatcagttaggaatgagtcaattctcttattccatgctctaggtgcttgtttgagtccatagagtgctttcttcaacttcagcactttatcttcttgtcctgtagtctcaaacccaagaggttgttgtacatatacttcttcttcttctaggggtccatttaggaaggcagactttacatccatttggcatagtttccaccatttccaacttgccaaagcaactatcaaccttacagtctcaaacctagtcactggtgcaaagacttctttgtaatcatagtcttctttctgcataaatccctttgccactagcttggctttgtgtttagcaatacttccatctggtttgagcttgttcttgaaaacctatttgacctttgtagctgttttgccatttggtagactagtcatctcccatgtcttgttcctctttatggctttcaactcttctctcatagcttctaaccatacttcctttttaattgcttcttggaaggtgacaggttctgcttttcccattagtgctagatgaaccaattcatcatcatcatctattgcactatcaggaaacatctcatagtcttctagtcttgttggaaagcttctagtccttgtggatcttcttccctctacttcttgaactgcacttgtagatttagcttgaacttcacctgtaacatcatcaggttctagttcactcaatgtttgtgttgatctgcatcattggcttcttgcttggatcatgcttgtccttcatccatgtgttcaactcatcaaattgcacatccctattgaaaactatttgattcgttcttggatttaagagtttgtatgaccctgtgggattatggccaacaaagatcatgtattcactcttgtcatccaatttattccttgtttgatcaggaatatgtatgtaacatgttgagccaaaaactctcatatgcttcataaatggtgttttccttgaccatacagcttctagtacttgatttttaagttgttgtgtggggcacctattcagtacatatgttgttgtgacaactgcttctccccatagggctttaggtaggttttttcctctcaacatgctcctcaccatgttcatgatggtcctgtttcttctctcaaccacaccattgtgttgtggtgtgtagggagttgttacttcatgtaggatgcctttgtctgtgcaaaaggcttcgatttctctagagttgaactctcctcctccatctattctaaggatcttcaacttcttccctgattgtttttcagtcatggctgtgaatttcttcaggttctcaaatacttcactcttaaccttgagtaagtatgtccaaattttcctgctaaattcatcaacaaaagacacaaagagcctactcccaccttaagagggaacctcaaatggtccataaatatcatagtacactacatgtagtaaatcattggctctagtggatgtgtagttgctaaaggatgctcttgtttgtttgttaatcatgcaatggtcacaaatatatttgaagattctaaattgtggcaaaccagtcaccatatcttttgcatgtagaaggtttaaatctttgaaattgagatgtccatacctcatgtgccaaagccaagactcatctgatttggtttttgcatttaggcactaagaatcaaatgcttctagcttcacttggaaggtcctgttctctgagattttggccttcagtattttcttctgcattctgtcaaagatctccattgtgccatcatggaggttcatgttgaatcctttctacagtaactgaccaatgcttagcagattgttcttcattgtgggaacatacaaaacctatgttattaaggcctgacctccatctttcctttggataagcacatcaccagttccttctgcttcaataactctattgtctgcgaatttgaccttgcttttcttcttcatatcaaaattcaccaaccactctttatgtccagtcatatgattggagcatcctgagtcaagataccaagtatcatcgtttccagtctttgtatttgttgtcttcatcaataacaaggtgttgtcttctacatcaagatcttcaccttttgccaagtttgcttctggatcttgtctccccttggactgattctgagttggtgactggcattctgcagagaaatgtccaattttaccataattgaagcatttaagcctctttctatcaaatcttttctttcctcctctatactacttgtaccttcctctaccattggacgattcaggttgttctgagttatgtttttcaggttcttgctgttgaggagcctttccagcatttgatcttggatctctacccctacctcgagttttgttgtagcttctaccactgcttcctcctcttctgtgagtttgtgcttgcaacgcctgctctgtgtgcctctcagtggttctttcattgagtcgttgctcatgggcttcaagggatccttaaagttctttgatcttcagagactctatcttttcggattcctccatcactacaacgatatgatcgaatcttggggtaagagttcgcgatattttttcaacaaccgtggattctgtgatcatttcgccacacgatttcatcgaattcatcagcttgatagttcgattgaagaaatttgcaaatcttttttgtatcctccatttgcattagctcgtactgacgcctcatggtttgcaaccttactttcttcaattgatttgcactggtatttcccttttctagaatgtcccatgcttctttggaagttgcagctcctgcaatcttctcaaaatggtgaatatccacacactggtgaagaaggcacattgccttgcaatctctcatcttgttctccttgtggatagctttctacgccttcgtggcccctttaggaaggcttgggtagcattcttccacgatgtccatgacatcttgatagtcgaggatcgccttcatctggatgcaccatctttctcaattgttgccatcgaggatggggaggacaatgacaaagcttccagtgttaagagtcattcttgcaacagagtctccctggaattccttgctctgataccaaatgttagaacccgaggaaagataaagctaaaaaataggaatatatgaaattattattgaaaagttattcctattacaacatgtattgaattacccttttaatattacacttataacctcaaacaggggagtgcaaaccaaaccccaaagcaaaaagcactagaataatgctacataccaaaaagtaacaaatttaattaaaatatattaatagtgcaccgttctttattttaactatctcatttaatcataaattatcgtagtatgataaagttattaatttttataattattacttgaaagttatatttaatttttaaataattagtagtataaaaatctttacataaaaaagtaaactaaaaatatattagacaaaagtacatgaatgtgatggtttgcacttatatgggaagatattttattccattacgtcccttgaatgatcaagcatgccctgcctccactgttaggtttgaattcgtggagttttatgcttctcactttggaactagataccatcattgttatatatatgtaaagtttaatttatgtaattattattataaaaattaaaaaaatattacactgtaattacattctaattaaattcacatatgtaacttcctcttcatactccagccaagaggctttatagtttcaaaccattcagtacggtgaaaaattacggtatccacatttatatttgggtaagtttattcagaaatatttttaagaaaaaaatgtgataaaattttatataagtttattttttcttcaaattttattttcataaatatacttttgaataagcttacccaatgtattaagatcagaaggggccaaactattagctaaattggaacttaattaccatttacaatatcaaagtttctatataaatatgcagtacttaaatatgacagcaatatatataggatatgctgtatgccacattctaaaagcaaaatagcaccttcctgtagagtagagtccagaaagaaaaacattgaaatttgagtattattatggctatgatgcagcaag

SEQ ID NO: 2690 - DNA, 1822 bp, Glycine max
  Intron number 4 from transcript Glyma16g23600.1 (locus Gly ma16g23600) derived from phytozome v7.0 (chr-ID Gm16; pos 27423843 to 27425664)
actctgctgtgcaggcttacctgctgggagctgaggtaagtaagcccattacgtatggcctaatttgattttttctttttcttaaattcactttttgtcatgttgtagttttatgattatgcatttggttcataatttttttattacttatttgatctctcacgttttaaattttagcaattttggtttacttttagcccgccatcaatttcttaacagaaaaaaatttaatgtgacatctaaataatgatataatgatatgatacatgtgtgatatggacgtgctaacataatggatgatcaagtagtctagtacatttgttgatatttgaaatgattttgtttggaaaataaagccttcggtgagaaaaaagaaaaggaaaataaatcctacggcatgatacattttagaatttttccactaatagttatttcttgataattgtcatttataaaattctaatttattaattactttagagaattaaatagatattaattatttttatttttatcttttgattttatcatgaaattttaataatattatttgatgaatttataattttgaaattaaaaacatttgataatttttttaattttctttaatttatagattataaattataaatatttattttatataattaactatattataaaaaatatattttaatatgtaaattgtagtttaaatttatagttattaatctaagaaaagaatgtatttttaatatttatatttttttgttcaacgtgatcgaagtctctatacctttatattatgaatttggtccttaaactgtaaaagtatgtggattttgactatttttttgagaattcattatgtttttttttaagtttggaaaaaatgaatctgtatattttttaaaagtttgaggattaaattcatcaatatgaaaacataaaaaccttgatgaattttaatttaaattatgatataaaattattttaactaatttcttttagagattttgaaatttaatttagagacaaattaaaggaaatatatttaagaaatagacaaataaaaaatatttttattaatgtttagagtattgtgtgaaatgtatatctgataaaagaaaaagaaatatgtattctaatttataagaaagcaaaatgaattaacttttttttaataagttaaaattggattatatcagtttatagaaaagttttttgagagaacatttaaaaagttgaagctaaaattatttgttattcacattaacaaagggaagcctttagtttttatctagagtgtgtttgaatggacgaatttaaaattatgaaaaattttaaattttaagaatttcaaatacttcaattgaaattcttttattttcaaaattttgtgtttagataaaaaaaattaaaactgagggtgaaaaaaaatgaatgaaaaaagaaaagatatgattgatgtgctagttatatgtgttcctctacgctcatactcgatcgatgttccatgaattgtatttgttgattgaagaagactgtaagaagagaatttcaatttcttttcttttagaagaaaattgaaatttcagatttttagttgtttaaaattgtgttttaaaattctaaaattttaaatttttcacaaaaaatttcaatcaaattctttgataaattatttttcttattaaaattctctatccaaatgcactcttaatgaatttgacttccaaattaattgaataattggaattgttaggaaataaaaaaatagaataatctctttctatttgccattgcagcttggttttgattctatacatttcgcaaggattga

SEQ ID NO: 2691 - DNA, 6493 bp, Glycine max
  Intron number 9 from transcript Glyma10g02520.1 (locus Gly ma10g02520) derived from phytozome v7.0 (chr-ID Gm10; pos 1763743 to 1770235 reverse strand)
tcatcctactgtggttgaagttttcatacacataggtctgttttgtagttttatattcttaccttggctattgcagaatggtagctatttgttatgacattttttttttaataattgacatacttgttaacagaagttactttgtagcaaggtgattcactataattttaataacatagttgatagttgtgaattgcaaattgcattgaattagatttagagatacaatgaaaagtaacttgaaatatatcatataaatgatgtatagttctcaatgttattattaactaggaattgacaaaagtaaaaaaagcataagcctcacaaaacaaaatcattagttgtgtgtcatgtcttcaaaacaaaaacagggtaagtattgatatggctaggtaagatgcagttcactttgtcaagtttctgctttaaaagagtgaaaactgagtaatggaatacaatgttgttaatggcggatggcggttcatggcggaaagtcaaaaatccgccataaaaatatggcggatggcgtagcggaaaatggcggatgtcatggcggacacaaaaaaaaaaaaaacatatatataaactcattgaaattgaaaaaaacaaaggattgcattcaaataaactaaaaaagtttcatgagttcatacaataatcaagtaccaacaccaaataaactcattaaagagttcaaaataagaaaatgataaaaacataatgcaaagtgcaaagtgaaggttaaggctctaatcatcttctccaatcccaacataatcatcttcgttgttatcatatggtaatggagcatctccctctcccccttccccatcagacgcctcaaaattgaccatgatttcttcttcttcagattcaacatcaatattctcctcaacatctagatcctcatcattttcttggactgctttttgcttccttgatgaagatccaacaaccattgcctgttttttagaagtttgggcagcagcaacacttgttttttgctttttccgcctagtatacatcctacactctccaacccctgaagcctgatacacagttgcccaatttagagcatcatcatcttcaaataccaaatcatttccagcatcattatcatcatcttgatccatctctcccacgagccattcattgcatacatcaatatcattaagagaaattggatcaatttcatctcttgcattatatctttgcttcaattgttggttctatttgacaaacaccaaatcatgcaacctcttgtgctcaagcctatttctttttttggaatgaatctacaacataacaaataaatgttgatttcaatctcaaatatactccaaatataacttgatcatcaaaattaaataaaattaaaaagtatagttagagttttgtcacaattacttgctcaaacacactccaatttctttcacatcctgaagcactgcaagtcaaactcaaaatcttaatagccagcttctgcaaatttggagtttgtgacccaaacattcgccaccaatatgcgggtgcgcttagaaatcttcttcattaagtctctgggcggcaagcacctccttttttttctataaatagtatgataaaagtttcttactaggagaatgggttttcctttgagccattgcaaagtcggaaccaaagtggtcagcaccaatcttgtaaagatgcaactcggttagaattttctgttgcacatcaaattgtggaatcaacttcttaatgcactcaaacaaaccattggtgacctcaaaatcaaactccaagtcagtgttgtcataaaagaactctggatttaagaagtgggcagctgcatgcaatggcctatgaagctgacaattccatcttttatcaatgatttcaaacacatctttgtacttgttttcattgttgttgaaagacttcataattgtttcttttgccttgtccattgcttcataaatatagcccatggctggtttcctttcaccatccacaagacgaagcactttcacaagtggagccatgactttaagagtgtaaaccacactattccaaaaagaaggcatgagcactacctttgcagcttcttttcccttaggctccttagatagcttgttcaaggtccattcatcagaagtaaacatctttctaatattggctttctctttgtgaagcctttccaaggttagataagaagtggcaaatctagtaatagcatgtctcaccaattccctcttgtttgtaaaatttctcaacaaacttaaggtactagaatgggcatagataaacccaactagattaattgcccttctaatggtcttccttatcaagggaagcttcccaatatcttcaagcatcaaatcaatacaatgagctgcacaaggagtccaataaatatgtttccttttctcctccaacaacttacccgctaaaacatagttgctcccattatcggttacaacttgaacaacattctcttctccaacttcctccacaatggcatcaagcaactcaaaaagcttttcacctgtcttgatgcaatcctccctaggaagggaccaatcactagaaccatgagcaagaggctccaagaagattgtcttcacaaaatcagaaccatcaacagacttcaaaaacatggtaccagcttgagagttaataaaaaaattaatgatgcatctttgtttccgatcagtccatgcatcggacataatagtacaaccatacttgacccattgctccctatggcctttcatcaaattttcagtatattcaacttccttcttcaagagtggaaatctgatgtcatgatagctaggaatgggcaaatgtggcccatattgaccaatggctgcaaccatgttctcaaagcttttcaatttaatgaggttgaatgacaaacctgcttggtaccaaaagcgagcaatatgttgatgcaccttcaatacttcattcttatccattgactctcttatgttcatttgcctcagcatctccatttttctccgattgattgcattttctggattcttacagaatttgtccattggtccttttttagtcccacactttgtctttgcacttgcagcagcattacaagaatccgcaaactcatcttcttcacttccatcacatccaatcggttcaccaaattcaaaatctcttatatttgccatattaccactgccagaagtactgtaagtggtcccgcttttttttgtagccatatattccttcaactcttcaactacatttgggggagttttcttgcaagctgcaacgttgcccgacttcccaatcaggtgttgtttggctcgggttattcctcccttagtgatttttccacaaaaattacaaacaatggtgtttgtatctccttccactagtgaatggcaatatttccagcctgggtctgccttatttttcctcgttgcacttgcagtagcagcatcggatgatggttcagccatttaaaatcactaaaaagggactgaacaggaaaaaaaaattatggtgtcaaatacgaaaaaaaaaaaaagggactgttaacagtaaaaaggggtgtcaaatagcaaaaggaaaaaaaaagttgtagacagaaaaatggggtgtgtcaaatagcaaaaagcccaaatcaaaaaaaaaaaaaaagatcaaggttggctgacccgcgtctgcgtcttcgtcttcttcgtcttcttcacgagacagaaagaagaggcgtcgcggtcgcgggaggctgcgttgccggggcttgcgcgaagttggccttcgtcttcgtgtaagggtgtcgcgagcggcggcggttgggtgcgcggactgtgcgggtgtcgcctgtcgcggcggcggctgggtgcggcggggtgagggaaggacgcagaggtgagggaaggacgcagaggtgaggtgaggtgcggcgtgggacaacatttaattgaatgcataaccgggtagggttgggtcgggttggcccaactcctaccgcggacaaaaaccaagcaaatcccgccattttccgccaccccgccataaccgccacgaccgccatggctatggcggccgccatggcgccgccatcccaaacccgccacgccaccgctattcggtggcgttttttcgcaaatccgccacctaaatccgccatggcgccgccatggccgccatttaacaacactgatggaatatgaccgaatagggtgcaaagtgagggatagtgtcaagcccatgttttagaagaatgaaatctaagcaatggaataaaatgtcaagtactgaattaaggtatgtatgagattattattgttgtaaattatgtgatagaaattgttccatttaccaaagtagacatacaatgtaccctagaagtagaattaattatttttctcttgtaaattgtgttttgtatttattaggtttataaccatcgtgtatataaatcacctaagactgagtgcatttttcactcacctaacagtagctaaaatattatctcctttgatctcaagttggcgttgttgatggattggcaagtgcaccaattcctctcaagcagtaaagttaaaacgaaagtctaagtgtcgaattcatagggactttgtttgtacttaggtagatgaatattttattaataaaagaagttaaagaaaattgatttgaaaaaattatgagaaaaataataatttaaattagcagaaaattaaatcaaacaagagaagaaattaaacaagaatttaaattgattaattaaagacagaaaaattagaaaatccaatagtattgcagaagtatattcagaagatgagaatgttgggaatttaatttaccagagctactctttgatataatgttaatgattttttctctatttataattattccaatttacacctgcatctactaatatactctaacttctttggtccttcgcatgaaagaacctaatttatatattttctctctcaaattcctttacagagctaaaataataaattgcattaaaaatataaatgtataacaagttaaacaaatatcaatatatccttagtgatgactttatttagatatcatttcccagttctattagaaaataacgtctcccacctaaaacttaccatgcaaatgggtgatcaagctacaaataataatattaagcacaagaaaagataatgcaaatgtaatattcataaatagataagataaattacaagagtagtataagaagagaaataacaagagtagttaactgtcaagttcccaacaaatggggtttagtctctcatagtcataggaggctttacaactgcaagagggaaatatttagtgaaagaaaataagataaggaaagaggatggaaggaaggaattgttcctaatgattacttctccttcttctagcctttgtctttcataaggaattgtattctcttagaatttatgtgtgttttttccttattccctcttcttcttttataggtgcaaattagcttagtgctaagtgggcttctcgcgctaaatccgcctttacttttcttaattagcctgttttcgttaattagtcatgttttccttaattatcttgcttttttttgttttattttactcactaagcatcataaattatcacttttaatattctctgcacaaaaatttaaatgatgttaatttaataattatttgttcaaaaaggaagaattaagagaaaaaaattacaaattcctatataatttaaccccaaaatatactcataattggtagttatcaagcatcatctctgttttgcatccttatttcagccattgtcaaggctgaaatgcagtattttgtcttgggttcttctaaaccaaaccaattgtcactgtttcagcactgttcatgaaaactattcatcagtgcaagtgaccattatttatgtatagaaaatgcttagcctgttatgaatgtcaaaagggcaaatttaaatctgtcaccactggtccttcttgctatcttattttactgactatatatcagtgcagtggtggatgtacatacataaatagcttaaatatgtatattttgcctccctaattttgaatatttaaaccccttacccctaattttttactcctttcatgtatttattatttttatttaagtatttaatttaaaaaatttattttatattcttcccaattgactcagtagaataggataagatagctatcttctcctattgtattccgttgtttgttgcgtcaatatatatgataatgtcttagatccattactttatcagtgcatggcaaagatatgcctaattttctaatcattcagcttttatcttcaaattatagccttatgatgactaaaattcactaatcccaatgacatatagtaatgaggttttctgaaatctaaatctcttttttttttgtagtcgatgccatgtgttctgccattttgaatcatttaactctaaatttgtcctattattgtttctttttatagatcctgcc

SEQ ID NO: 2692 - DNA, 718 bp, Glycine max
  Intron number 1 from transcript Glyma09g24660.1 (locus Gly ma09g24660) derived from phytozome v7.0 (chr-ID Gm09; pos 30455128 to 30455845)
gtatgctcaatatctgatctcttagttatatcatgtttatttgttatttcaactaatgttgtgtagttttacgaatttatcgttttgctctttgttgtcgttgctgagggacagatcttgcaatgtctcattttataattacttgtctgagggggcaaggttttgtactgttctcaaattgtcaatatgattttccttgtctaagcatcacgtgtatgtttttgcatgtaaggggaaattcaatcagatgtaaaaaatctgtagatgaaagaagaaaatctatttaactagaaaaattattacaaaaagggactgaaaatatcctccttaaaatacagcagcaaaatagccatcccatcccatagatataaattcaaattttggaattcttagaattcacttaactaatatgtaggtagtacctaaaattggttgtttggattttgatattttgcatgtcagtgtattctagcacttattttatgtatggctgaatgcaggatcccaatgatgataggggtgaaagtagactctatattggtaaccttgatcttagaattacagagtgaggcttgctaactaaccaccaagactttgtttttgttttgtgctgaatgcacatagtgacatattctctccttttcttctcaatatattccagagctgctttgcttaaaatgttttctccctatggaaagataatttctgaggacttctt

SEQ ID NO: 2693 - DNA, 741 bp, Glycine max
  Intron number 7 from transcript Glyma10g32470.1 (locus Gly ma10g32470) derived from phytozome v7.0 (chr-ID Gm10; pos 40944805 to 40945545)
actggtattgaagctagattgcttgaattataaatctattgcttctttgataactttccatgcatttgaggcatttcatttttataacctatgaatttctgatcttatttgattctggcttctaatatttagattcattttccaattagtcctttatttttcctataatatcttacatacggttcttgttttatgtatttactcctaaaaatcaacgtacagactacaaaatttattttaataatttaaccaaatatgaaatggtttttttgttttaatcttagaggaaatgtgttttgtcaaaaagcattatttacaatcaaatccagattgttgatttatgtctcctatgattttatatagaaagtacattttgaaattgaatattagcttttgcattctgctgtataactagtttaagtatactaatgatgcatgattctggattcttggagataaaatcatagagtttaagcagtgaataatgcaccctccttgatttgtaaggattatatgttatagactagagaataaattactatgtagagatcttaatctatctggttcagagaaagcagcgatttgactaaaaatcttgagaattgttgcttattctagaatctagatttagttgttagattttgtttttgtagctcctccgtgaatgatgagaaaataagagttttgatgtgataatcttaaacaggtgtgaagcattttcaacatacccccggacatacg

SEQ ID NO: 2694 - DNA, 9612 bp, Glycine max
  Intron number 12 from transcript Glyma16g09970.1 (locus Gl yma16g09970) derived from phytozome v7.0 (chr-ID Gm16; pos 9882346 to 9891957 reverse strand)
gagtggttatccgtataaacattcttttgctatctgtaagacagaacgcttgatagcatgcagaggctgacatagtcttctgcaccttttgttcctccgggaacaacaagtcatttacatgcggaaatttcatggtcacccgcgactctcgtcaaccgagaggagcgaaattagtgtcatacactaattttcgtccgggtacctttgcttgatgacatgcgacctttctttggtccttgtgaggtgcttggcacccatcgttaggcaatttatgaaaatccgggaacgacaagtcatggtcacccgcgactctcgtcaaccgagaggagcgaaattagtgtcatacactaattttcgtccgggtacctttgcttgataacatgcgacctttctttggtccttgtgaggtgcttggcacccatcattaggcaatttgtgaaaatccgggaacaacaagtcatttgcatgtggagattttatggtcacccgcgactctcgtcaaatcgagaggaacgaaattagtgtcttatctttactttccttttatctccaataaaagacaagtaaagaggggcaactgtcataccctaatttcgtccggggacctttgcttgatgacatgcgacctttctttggtccttgtgaggtgcttggcacccatcattaggaaatttgtgaaattccaggacatgccgaaaaaccaaaaaaaatatattgatgcacaatccgtaagtttccgtgacacaccggaaatcaaatggaagcatcgttgcataattaagtgaggttccgtaacattccgtaagtcaaaagggggatgattatgtaatccgcaaggttccgtaacattacggaaagaaaacaagtatcgttacgagattcataagtttccgtaactttacgaaaaaagaatcaccaaaaaaggtaagggggtgaacttatcaagataggggtgtaaatagcaattcaaatctaggcccttctagaacattttggaagttgggttgcttaaggaggaagcaactgggcggcaagctcctccacatttttgaaaaatggttttcggggcttccgcggcttccgtaatacttccgtaaaatttccgaaaaccttgggtaagcatattccacttaacattggtgaaagggaagagaaaaaagatgaaaatcaaattcgaaaacagttccgtaaggcttccgtaacttttccgtaaaatacgaaaaggggggtgaactttgtaattcgggtgcgcttagaaatcttcttcattaagtctttgggcggcaagcacctccttttttttctataaataggggaggggggagctgtttcaaaatgttcagcccctttggcacttctctctctttcgaatttgcttggaaaaatcgtttccgtgaagaaaatctaagccgaggcgcttccgaaacgcttccgtaagcgattctgtggaaattcttcatcgttcttcaccgttcttcatccgttcttcgttcgttcttcgttcttcaacgggtaagttttcgaattcgagactttcaattcatttcttgttttgtctactttcactttaatttcgtttactttcagttttcttttcttccgtttttaacgtgctttaaccatttatttaagccgttttctcgtctaataaatgataaaatgaatttcaaccgatcatttgtgttgtaatctcgtttaatcactgttaaaacgaaatctaaccgatcgttcacgctataacctcggttaaaccaaaaaaagtaaaataataataaaataatcaaaatatcttgaaaaataataataaaataatcaaaatatctttgaataaaataaattaaaaaaatcaatcggacgtttttctttggaagtttccttgaatgaattgattaataaccaaagtgaaactaaaggctaaaatcaattcgcctagtcaagctcgtccataaaaataggcttttgaagtttgtcatttcattttctcactaagtaaaatggatcatttttaaggtccaacgccttaaaatgatcacctcttaaagtaaaaaagaatcacttgataaaaaagaactacgtaggtctgattttctcatcccaaattgaggaatacgtaggagcaaagggaaacacccttgtcgaccacaaaaagagaaaatataaaaagggtatgaaggatatagagacataaaaaggtaacataaaaaatcaaagtcatgtttgcacattcgattaaaggctgccgtcccttggggcggacgtgtggggtgctaataccttccccgtgcgtaaatacaactcccgaacctttcacttaaaagttcgtagatcgcgtcttttccggtttttccgacgttttcctcaaataaacgttggtggcgactccgcgcgtattcctttcgtggaacacgcatcccgcgagtcacgcgtcgccctcccgccgaagggtaggttgcgacaggttgctttgggttcttttttactaacccagctataattagattcttttgttaaacataccttccatatttaattgtatacctcccttttccttttttttatcaatattttcccaaagactccccatttttaatcttctctctctttttgtataatcgttcacccccttcttaaaacacaacaccttcctcctcaacacatccccagatcaccaatgttttgttatttcacaattttgatcctaatcaaatcagatggtgaatcatacaatcccttctttttttatctctaatattctaatcccataatgacttcgctaaagccattgaaggttgtgataccaacctacatgagctaccaaaggggcagctgtgtgggccacttcttcacatggatgtccttggtccccaacttcatctccatgggtgactttgtcttgcacttcatcttccactatgggggaccatgtgaggaggtgtagaacagggttgacgcatatgtgccaaaaggaagattgaggtaggtgacgaagaagaacatgtattgacagtggctggaggcctagccattggaatcacacatcttgaggagtacacacttggtggggtgggcttactggatggaggtcttgatgacctccttgataagttatgagacaatgaggcccaacacaaagaacatcccctactatccttgaagctcgcatcagaagatgaagtgtgacaatgactacaagcagtacaaacaacttccaaattttgtaccatacggtgagttggggaggaaagaggttgaacatggtttctagacagaaaagagaattgaaattggcaaggaaattagaaggatattttttgaaaaaaaaatagtgaaaaaaaaaacaaaagggtggcgtatctattaatttagtagggtatatataacaattgtctaattagatcagaggtttgagtaatcagttttaaacttgacaaatctaacccaatctaataaatatattaataataaaataataattattctaattctacccatatgttatgtatgcatcgtaaccctaaaaaagcatagacaacaaaattgtgaccatgtcctaaaatgattcttggatgcttgcatccagaaagaatgatcaacaatgtaagtgatacataacctaataccgacaaatgtttaacacaatgatggaattaatctctctctatcattaattgtaaattggtgttcatttgtttattcatattcatttgatactacatatagctttagtatataattatgtatgaacattttttatcgataagtttattagaatgttagtttttgttagcaaagaggatcgaatttactacctttcccctcttcccttctcttttaaccatccaactcatcttatatctcctattatgtataaacattaagaagtcagtagagtaaacaaattattttatccctcttcaaaaagatataagaaaaatgaagtatctaattatacctaaaaataattaagaactttttttttccatttttttgaattttaaatatatattaatttaattatataactcagctacctaactcaaaccagcccaattaagacaagttggtttaggtttggttgcttaataacaacaaaatgaagccaatctaacctaacctaattatgtttaattaggttggatctaaaattagactaaacctaatctaacatgggtttcttacacccttgaaaaaggaattggctattttcaccccttatgtggtgaatttttccaaattcctaaaatatccttccaacggaagcatgattttattcaatacctatgcaacaaaatcatacttttgttgtcaagtgcggggtgtggaaaaaatcacaatgaaagtgtgattccaatgtgattttgatttaccccctacacttttcaatgaaagtatgattatattgcatgaatatacaacaaaatcatacttatgttgttaagtttgacagacaaaatgcagaatgtagatttttaagatgccaacacaaatttgcaacacataatcaacatacaacaaggacaaattgtgcaacatttaagaatttttctggtcaatatagaggatcaaaatcaatacacataactgaaaaaagatgatggaagtcaataaaccaagaaggggggtgaattggttttcaaaaatgatatatttttaaaaatagagttgcagaaaaaacttttctatacaaatcgtatcacaaaacaaatgtgaatcgaacttaatcaatatttccttacataggatccttcattaatttcctttctttcaaaatcataaaacttgaatcttttcaaactttgaataaaacttgaatgatttgattaaaccttgaatgagtgaaagatatgatcaagagagaaagacacaatcctttatactggttcattctctatttctagataagctaatctagttatctaatccacagcttgaattagatttccactatgcataaaaaattcttacaagcaatctataatttccaccccataagaaaagactaaggcatccaacactaggaccctttgtgaatatagcctaagaaccacactcttagcccaaactagaaaaactctattctagcatgttgcaagcaattaatgcataaatacaagatcgtgtaaaaaccatatacatgaaaaaactaagtacgagagatacaacctgaccaatctttccaacaaaaccttgctggattgagaagttgatcttcttctacttaaaagacataactcactttcaagaaaagatcttccaaataaaaagattaagaagttgtgagttactataaagctattttctctctttcgcttgttcaccaatgaaagcacaaaatcttgctcattctgaggctaagaagtaattttcaagatgtattgagaattctctaatgatatgatgatgtgtagatgtgagcacaagctagttatttacagagaaaataattataactaattgtaattgattaaatgtataaggtaatcaattatttcaatgaagtaattgattatattatctaagtaatcaattaaagtgttcatccaacatctggaaatccactcaagaacaatgtaatcaattagatgacttaagtaatcgattaaagtgttcttgttcacctctgaacaacttaaacaagggagaagtaatcgattaatccacctggtaatcgattaaagtagagagttctgaaaaaatcagtcgttgtctcaaacaacaatgtaatcgattaaagtactactgttttcaattaaactgatacgagacttaactctttaagcttctgatagcttattgtaattgagacgttaaagaagtgctgcttgggaggcaacctagggttaggtttgttttatttctttttgttgatttgtttttgccctagcatttagtctatttttaaacacttgcatcatcaggagtaggggtgcaggaagaagaatcaccttaggaaattgacaattcattgtagtgatttgactttctattcttgatgtgttgggatttcacacatttgctctggtggacagggatctctgttagactattggcaagcataccaatgtcatcgcaagttacaaattttataaaagtgataatctttgcatggacttgagttacttagtttctctagatgaaagtaaacaaatcaatagttatgaatagcaaatttaatcaaaatctcatgggtttaacaaaaataacggaaataaaaaaaagtagcagaaataacggaattagtgtgtcagaagtacataaaattatgaaaataagtcaaatgaatttaattaattcaacagaaacgaaaggttggatttcatcattcatgccctcagtatccaaataatattcataaatatgaatattttttctaacatcactgacgcatacattaaatcaccctgaaccgatcccttgtaatcgagaatcctaagaatatttaccaaatattgattcctcgcatatgaaataaaaatcccagcattacaatcataatcttgtgctatttgcaaccaaaatgttatgttatattcttagcaatgtaacataaagagtaaattcattcaattcaaattctaagagtactttctagtcaaatttaaaacccaatttcatgaaattagtgatcaaatagaatcaagcattaaaaacaaaatgaaatcaccattaatgagttgaaaatgtttatatatattatataaaatatcaaaagaggtacataaggatgtgatccacgttcacatctttgcagctccatctccactttttctctcttctctcaccttgttcgtgcttctccctctagtttatgcactacatagcttctggtttctccttttgcatgcctttttaaacaaaatggtctaagaggtaccagaccaactcccccaggcgagtgatactcacccaagcgagttagttccttcaagttgaagtaatttcactagctcaggcaatttgatcactaccctaggcgagtggcactctcaaattcttcaaaaatgacccttttgatcttaatcttggcgtggtttctagatccaacaaataaccatcaaagcatagaggttatggatgaatcttccatatttaaaaaaatatttataaatgtacaatatacaaaacaactataattaagggaagattataagaaaactattaaaatataagataactgctaacattctaatcccaaaaaataactaaaatatggcacttatcaactcctcccaacctacaatcttgtttgtcttcaagcaaagtatagaaagaaaactaccaataacaataacataagtataattgtcagaccctaattttgtcccagaactatcattcactgatgttttgattctcgttaatcgaaaggtgttgttcaacaccagtttttgcacaaggcatgagatcgttcaacgttttggtcaaggatacaaaaaataaccaaggggaagggcaaaagggtcatttcaagcaattttctagaccctggctcgcctagcctagcctctgactcacctaggcccccaaattgcttagggctgaaggaaccaactcgcctgggcaagccaatttcttcaggactaagcattagctcgcctgggcgaactgccatagtcccaaatgccctatttcctataaataggaatgagggaggctgaggaagtggttggacattcaatattaagaggattttgagagaaataagagagaagaagaagaagaaagaggagaaaaacgaggccgaggcgctaccaaattgcaactataatcaacttctacatcgttcttcgttcggtgttcttcgttcgtcatccgattatattttgttttaaggctttggatatgatctatgcgcccttagtggtcctctttgttttgtgcatcttcatctccttcttctatcattagtaatctattttcttcttgtaaagtaaatttcaactgatcattagtgtcgtaaatcatctttttaaagagattgaaagttaatgaataagaccaagatgaaatcaacatataactgaatttatctttgttggatcaagtggcctcggaataattaagaaggggggttgaattaattactaatgtgtcttgactaattaaaaaatttatccttcttaatgttactagattcaactaggcttttactactaagttaagaaagtaaagaatagaaacaataacttaaccaaaagtaaaagcggaaattaaagagtgtagggaagaagaagacaaacacaagatttatactggttcgaccacaacccgtgcctacgtctagtccccaagcaaccaaccggttcttgagatttctttcaaccttgtaaaatcctttacaagccaaagatccataaggaatgtaccctcccttgttctctttaaataaccaagtggatgtaccctccacttgaactgatccacaagagatgtaccctctcttgttctcagtataacaatccccaagtagatgtaccctctacttgtaccacaaaggatgtacccttcaatgtgttgggacaaaaaattctcaggcgattagtcctttgaatctttgtaaggggaaacaaaagatatctcaggcggttagtcctttgagatcttttgtttaaggggaagggaagaatcaaaagaattctcaggcggttagtcctttgaattctcttgaaaagagagaagagagacacaaaagaattcaggcggttaatgcttctattcttttggcaaagggagaagagagacacaaaagaattcaggcaattggtcctttaattcttttggcaaagggagaagagagacacaaaagaattcaggcggttattccttctattcttttggaaaagggagaagtgaatgaaaaagatgaatagcacaagtttttgaacaatgaacttttcttggaagagaaagtattgaacaaaaacttttagagaggtgaagagaaatgaatcaaaatgttatgtaaaaacttgttatgaaacttgttgaaagatgttgagaaatgagttagaaagttctgtagaaaagtgttgaaggattgatgaaaagatgttagatgattttaaaattcatgtcatggtcacatatttataatttcttgatgactcaagttaaagtttgtgactcttggcattttctttaaaactagtcaccctttaaaaattgtgactcttttgaaaactagtcacttaaaaagttgtgacttttaaaaaaatcttcagaaacaagtcacttgaagaattgtgacttttggaaatttatttttcgaaatcagtcactagtaatcgattaccatcaaggtgtaattgattacacatcaacatatgtgactcttcatgtttaaattttgaaaatcaaaatgtttagaactctagtaatcaattacaagtattgtgtaatcgattacacaagtttaaaatgatttgaaactattttatcactatttgtgactcttgaaatttgaaatctaacgttttaaaacattggtaatcgataacatgctcatggtaatcgattatagctttgtaaatcagttttgaaaaaaatgatggctactggtaatcgattactaccttatggtaatcgattaccagagagtaaaactctttggta

SEQ ID NO: 2695 - DNA, 1976 bp, Glycine max
  Intron number 1 from transcript Glyma01g35580.1 (locus Gly ma01g35580) derived from phytozome v7.0 (chr-ID Gm01; pos 48080839 to 48082814 reverse strand)
cagtgtaagtgctgggtactctcttccttgccaataaatttgtttgttacacatcaccttcattacttttttttcacatggttttgcttgattattttggaattatatgttacatttgaaagttttaatcttctattttctttgactagttggttcctcggatttgagttttcagttcaaacctaagttttgttttcatgttttgattatttgggctttcttcatttctttaaaagatcatttcttttttttattaatggtcgacaatattacaaattatgcccgtggatggtttgtttcattatattaacgtttttatttttttgttttgcatttatcacatttaaccctattctatcaatggttatttgtggaggtgtttgtgctattttgtgcagctataagcatttgctgaatgcccaatgtgaaatgctgatacagttaagaattccctgttgttgtcattgccataatctactttggcttctcattggtgttcttctcatcggtagcactaatagacatgcagaggggtttgtttgggttttttttttattatgttttcttgttcctctctctcttctgctctgagtagattctttaaaaattggtttagagttctggtatacttttcactgatgtgttttctgattctggaagtgggttcattcttttactaattcatgaatccattaagcacatccagttgaagactctcagaaatgggtttctgtggtgccctttgctcaattggcattattactgtatgttgaccattggattctgaatttgggttcatctaacacaaaaaaattctgccaattgtgcagtcagttaaggggttttaagggaaaatggggagacattggtctgagaataagtagccataaaataagtatcactattcactaatgtggtatatgtatcttgagcaaatacactttgaccttttgggaaaaaaggcattcgttttgtaagcatgggattcagtattctgcttaagtaaatatacacaattcaatcaactgtaggaatagttttcgtgaaacattcatcttcataaatattttatttaaaatactagctttctgtaggggtgtccagtgctctatggaaggttgatttgaaaatgtgtccaagtcaaaaacagaacaaaatttgatttttttataatgtgtcatcattaaagaaggaaacttgcacctctgtatgcatgtcactgtgtatgtgtgccttgatcagtaggaaactactcgtatttccagttgtaacttccatggaagcttgtaagattatgatcttatatttgctgttcatattgccaaattgttttagctgtaggctgcgcatttgaattagggataaatgtcttctccaccatggaaacactaggaaaagttagttgtttgattagagttggtagttcaaatcaagactggttgctaaaactgaggctaagaatttgaatttattttgaattttcagtatatttcttcaagtgataaactgttaggaattaggcacgggaaaattagttagagggatagttagttaaagacttaaagggatcatcttgataaatagtgggagtatggaaaaaggaggcattctgtcttgtatcatttgagagaactaagaagtatcactgatgtgaaaggagaaatccttggaggaaaaggagaattctttctcctatattctgttcaatatcattcaagcaataaaattaattgtggggttcctaatgttgacattgaaagccatcaagtttttttaaaagcttttaagttgtaatgtaagatggatttcttatttctaacatgaagtcttagagttgcaccattgtcatctaaggtctgtgcttaaatctatttagtccagtgaagatatacaatttcccacttatttgtttgcaccatagctgattaatcctcaataattaataatttttcacatggatttattgattttgcagg

SEQ ID NO: 2696 - DNA, 3721 bp, Glycine max
  Intron number 2 from transcript Glyma05g28140.1 (locus Gly ma05g28140) derived from phytozome v7.0 (chr-ID Gm05; pos 34024847 to 34028567 reverse strand)
tgtctacacgggaagccttggtaatggtgaatagtcccatctatcgtatttaaatgcattttttgcccatttaattaatttgcctaatttgatggctgatttttttacctcatccatttctgtttttgctttacttacaaggggattggggttcctgggctgctacttttactataattattcttaaagtgggctatagctgttttacgttacgtttagcattgtcaatatatgctgtgtgtcgtggttgatcagaggtttacattgttgattacataaacaactggcaagtgcagtaaaatcacacagcttgaaaaaaaatttcatggagataaaaaaaaatactgaaatcgtaacttttttttttctttagcaaacaaaagttatgctgatttttgttcattgactgatataattgaatttgttgtgctgttaaacgtttaactaataaccttgcgcagctacaaattctgaatccagggatttgaaaaaagggtattttcttaaaataaagcttaatattgttcatgcaaagctactatcataatatacagtatattcaatttagctcattgtactattttttttttaaaaaaggttcaaaatacaatgtgtttgctttgacttctattcttattttcagttaatacactcttaataattataaaaatattaacttgcttatataaccttgtttgatataagaggttttgtcaaaacaacaaaagtcaagtgtttcgtttgacttaattcaagtgcgcattaattagtatgcgttacttttgtaattgtggacaaaagtatcttagagaaacagcacatattggtttaattttgaagtccctttagtcttttgtatcatggaattcattttttaggcaccctaaactttgttgtagctagctgtatctgcatctaagacttcatgctcatatataattgatcctacagtggaccatagttttggtaatgttgttacaaagatacatgaactttaaggacaccttcatccaaaataaaattaagtcatttgccttcaacttgttttctttgttaggctgtttcaaataagtttaagatattcatgatcagtataactgctccaaatagtttcccacacacaagaacttttgactgtatgtcatctaggcccgtttagtacaatggctagaaagtatccagtgattgaggtgggtatagcgaacacagaaattggaaggattttcggatcatcaaattggcaatggagcaccatacacttacctggttttatacaggaaatcaggtttcataacgtacacgaaagacttaagttttaatttgattacataaatttgatctagttcctaaatttatgcaaaagatgcccataaggactttgtagcagaccctttattattatttgaattttttttaagtattatttgaaatcattttagattgttgtctgtacgtttagtgttcaatatactttagtgtgttattctcaaatataaaaattggattctcacctttaataacattaaatttttattctctaataacatcaaattttttataggaatgatctatcattactataacatttgcaagttattatcttatagtgatacattattagatttagttatttaagtattgtgaaatttattatttactattttattttattatatttttgaaatatttaattgatatgttatttataattattttattattattttttatgtaaagtgaattcttacgagtcgaatttataaaattttcgcgaatttgagtttatttaaactctcgaatttaataactttttatttttatatatatatatatatatatatatatatatatatataaataaatatatattcatgaatatctccatagtggatgacggatgtaattttttgttcttatagtaacttttattgtgtgagcctataattttatttgtctgtacgatcgtgtgccattagtatcatgtgccaatagtacttccttctgtcagttctccgatctaaatgtgctgagccgaatttaatttgtctagttgtttacaaaaattgtatatcaaggtccattttgtgacacaaccctttaagttttgcagaataaacattgctcttgtagttttggttctttcctgcaaaaaatgtttcatgagccatctctattttctaattagaaaatttcataaatatataaatctaaactaattagaataatcaagtttgactttcccttcgataagtaaattaatttaagcaataatagagctaaattaggaattgaaaatgctatttgttgcaataagaaatgcaagtttgatatataaccgcatgctctggtctgaagccctcagcccttgacgctttgcttatactctagcccactatatactcagtatatgtcctttttgtaacaacaaaaaatggcagggattgaagctatgcgtgaatttggccatcgataacaaatgtactgaaatatagctacttgcaatcgaggaaaagtagaaaagcgaaatttaatttgagggtgaatttaatttgccttatgttattactagtatctaatttacgtgccttattttattactgattgctaattaacgtattttagtgtgtatgttcatgaattgtgttttaaacttgtgtttgcatgtttacatattcacgtcatcccgtcattatcatgttttttttttctttttttgattttcatgtataagcataatttcataaaaactttttggctgaaatgcgctaatatactagtacgtgtttaagcatacttttattggttgctaatatgcttatagtattattgtaacaaaaccctatttaacaataacaatcatttgcgacgtcagttgtttaattgaatccattaaatcttttgttcttatggttaattttctcctcaactcgtgtgaaagaatcattccttaatttttgtgtattccatgcatgttttctctctattttctacttaactacttatcaaactttaacacgttgaatgtttttggtatgcctcaacctagaaaaaagataaatgaagtagaacatggattactaaatgcgttagagtaatgccaattaaaaaaaaaaatagacgataaagctcagaatatgaatgctagcgtatatgttttataaaagcttttgttattattggctatggcttataaaaatatttttagtaactaaaatatgactaaatttaatttcaattattcttttagttttatattagttttaattctcataaatttatttttttagaagtctctaaatgtcagcattgagtaatatatgactattcacgttaagttaaagatgattttgagatgacacatatttgtaacgtgttggatgtatgtcacaatatcaataagtaataataatttttttataaaaataaaatttataacaaataaaattagtactatttaaaaattaaaaaaactaaatttaactatgtttcaaagactataagcatattttatccaaccctttacataactgagaggtttgcaagtagaatattgctcgaatagatcaatgctgttgtccggaccaggtcactaaggaaagacataaaaggaatcgctatatatgttcctttaattatatagttttttcctttaactatatagtttgattttgctaccacgactataggagttaagcagtcaacaggagtacttgaagctgaa

SEQ ID NO: 2697 - DNA, 1990 bp, Glycine max
  Intron number 5 from transcript Glyma16g25400.1 (locus Gly ma16g25400) derived from phytozome v7.0 (chr-ID Gm16; pos 29356476 to 29358465 reverse strand)
cttgacttgatacaaggtagattatggtattacctaactatttactgcattgtttaaatatcaaaatcccaaagatctgtccttttcagggatgagtctactgaatgatttattcaataatgttacacagtaatggcaacttattggtgtgcttgggtatcagtcagtttgtcttgagtatctcatagaacctatgaacttttagctgaaaactggatgcaaaaatgtttttattttttatagtatccaagaatggggaattttaaacagcatgaaatgacagatttttgaacaactgtggatagaaatttgttgtgcttactcaagatctataaaaatggtatattttaaacattagttatatgcggtataactcaatgctgcagtactggttttatcattcattacttattttgatattgtaatacacatcatcaagttcctcccaaagtaggtaaactataaggtatcgaaccatgcctatactgaccttttaccatccttacagctacatattccttctaggttgactaacttaaggaaaatgtatcaaacttgctatgaataatagttacaaatgacttaatttccattctatggatgtcatcaatacagggaagggaaagacaaccaatgaagcttctttatagtttatatcaataataggttgaggactaggacgattgaagttagaattagagtattgttgttctaggttttagatcctttaacatatgaacatttaacatatttaacacttgaaaacttaatagaagttatacttatacaacatagatgacgatagaaactcttctagaattttattaacaggtaggctgtacttttaggacttcaaacctactgtaatcatcccaaaactaactgtaataataaaaagttaatcctaaaaattattccatgtgaaaattacagaatgatatcaaaattacataattatgatcaacaccccttgaaggaggccttggcacaacagctggagttgtcgccatgagttgtggcagttatagattcaagtcatagaatcaacctcttgcagatgcaaggtaaaactacctagtgcctaaaatagacccacacagaggttggacccttcattggaccaactcatagcatgaggtttataccactaggttgccctttttatgattgacaccccctatcttgagtcaaatatgcgatgatactatgcacagaataatgtataacttttgaagtgaaaatctgccatgcaccatctaataaccttcaagtttacaaggttgagaactgtctacactctacaccatctgattaactgaattttttagcattgatcaaacttacaaatagtatgacaggtgtaattgtttatctgattaaaagataacaatacatttaatgccggttccctttaatgatgtccttcaatccatgtatgtagccaaccttgcattatgggatatgacttagttgttgttttacaccataagcatgtgaaagaatatccctctgtaaattcatttacattctagatttttgaagggaaagaaaataaatttaatccaagttctaggaaaattctatgcaacctaattacaaattggttcaaacaactctttaaagcaatcttaatttgaattcctatttgagctaaatgtttttgaggtcattttgcttttttcacattctggactcttttcctcagagaattggtattggaggtaatagtgttaaagtgttaacagtctattcaaccttgaaattagtcattttcttaagccatttcaattctattgcatattgtgccaaggatcctggtggagtaattatttgcattatcactatgtattattcattacattctgcatggcttttgtgtagatgtgctaacagttgtttattgcagcctcttacattgttgttaattttatggattgatttgcttactttgttcctttctgccttcagtgtttgttgaaacattggacaa

SEQ ID NO: 2698 - DNA, 3039 bp, Glycine max
  Intron number 1 from transcript Glyma09g42080.1 (locus Gly ma09g42080) derived from phytozome v7.0 (chr-ID Gm09; pos 46732006 to 46735044)
aaaggtaccatctacttcactaaattcttcattttattatgtatcaatgctctcctttctcattctgaatcaaagttacttttcgtccaattcaaattaacttttaatttctgaggaattttcacctaaaataagtatttgattcccatctcatgctaaaaaaatctttatatgtttatcaagaatttaaatgtaaaaactactgaaaaaaaaaattaagatgttgaagttattttaaggtttaattattctacggttttatacttttactagatttcaattaggtagttgaacttcttttatttaattgggtttttgaacttttctttttaactagatttttctgtttaattgtccttataaaaaactaattataaacacctaattaaaagtataaacaatagaatgatacttttcgtaatgtgttatagtacaaattaatcaattaaagaaactttagggaaaacttaataaaaattcaaggatccaattaaagaaactaattgaaaatccatccaatccgaggacaagttgttaagggtcccaacttttcaaccttcttgcgacaagtgataatatgtgaaaagttcagctttttctttcaacattcacctttcttacttctttctttttgcttacgtgggagaacttttttaattaatgaatgcaaatatggagtccgttcatattatgcaaaaacattttgaaatttgtgataacatatttgtctgggtagagaattgtgatttaattttaaaattataaaaatttaagtgatgatcttattttaaacaaaaaagttcaaatatcgttaaaattttctgaatattataaaaatagtattggtattgttattctgtaaaaaaaagttttggtttgttatcactaatttcattattttaatatttttattaaaaataaaaatggttgaaaattttatttggtattaaaattttagcaattaatgagtgtgattcttaattattttctatatacacaattatttgatttataaagataacatagaaaatcatttagtaattcatttacatcattcactgtaacaaaagatattactttatctgtaacttctgatttaactataactaaaacattaaattgttagtatttattattttaagtttaaatattaattatttatatgagcaaaaattatttatgcataaaagagagattactgcataaaaaaacagaaaagaagtacaaaataaaaaaatataatatattctatagataggaaaaatgcgtatataatttgctacgaattatagcatattttatatatagacattaatatttttacttatttattttatttaatttgattgattttttttaaaaaaaaatcaatgcattactatttttatacattataaaaaaatttattttatagatgtaattttaaattatgttgaaaaaaaaataaaaatatgataattcactcaataaaatctgattgactcaaatattaaatatgtttaaaatgcataactttattaagatttgaaaaaaaatatatatattatgttattttttttctacattttaataataaagacaaaaaagacctagcatggccgtgttaggaaactagtttgataaaagtatgaggaaccacatattaatttaccttattttagttaatacaaaaataattttattttttttatatttttatttatataatatttattttgaatttatctaattttttttgtgacaaaattatattctagaatcgggtaaatatttatttttgtctttgaacctgatagacattaatgattaagttcttaaaagatgaaaaaaataaaattttgttcttaaatttttaaaaaatgtgacaaattagtcatattgttaattttctatgttaactcaaacggttgtccctacatgatattttttatggcttggcaaatgatagtctccatgtgattgttatgtgtcatatcaacgtggctgttatatgtcaaaaagtaatttttcaatttgatctccaaacttaataatttgttgacattttaatcccttaatttatttaggtatttttattttgattcttgaaattacttttaaaattttaattaaatctaatactacatatagattattagcataatgacaataaataacatttatttacattgataataattatttatagtgatggaaattgaatgaaataattatcaaatatagaaataaaaaatattatattttatattttgaaatcactattaatttatttattacattttattaagttaaaattttattcaaataatattataacggtgacaccaacaataattgacacaagagtatgcaagaaaatggttttaacacttttatttttgttccttttgtgattgtcaaatttttttaattgtcttttcgtcatcaacattattccataaaatagattaattaattaattaatccaacatttttaggtatattaatagcatataagataataacttgattagggtagaatatctgatttgaaatcttatagaatcttattagtaatgttatagatttagcacttactattgcaatgtaaccattgataaattagtttcatatttatagtataatttaaataataaaattgaaaaaataataaaaatgagcaaatatgataatatttatactaataattttatgcaacatgagacttaattgaaaatttaaaagtgctttcagtaactcaaaagttagaaggtgatcaagttcaaaaactaaaatgataataagttattaaattcaaagatcaagttaaaaattaaataaatgacatgtgacaatcatgtgtatgtcacatcatcatccaaagtgtcatgtaggtaaaattggttgagttaatagaaaaaattaaccatgtgactaattttttatattttttttataaatttaagaataaaattttaattttttatcttttaaaaacctaactattaatacccaacgaatttattgtatagtatctctagaatgtagaaaagatattag

SEQ ID NO: 2699 - DNA, 1558 bp, Glycine max
  Intron number 5 from transcript Glyma17g05930.1 (locus Gly ma17g05930) derived from phytozome v7.0 (chr-ID Gm17; pos 4182959 to 4184516)
ttggagctgtactaacaaaaaataaccccgacaaggtatcccccttggaaactatatattttaatgttcatgttttttcttggcaaacatttaatgagtttttgattcagttgttactgtggattatagcttgctagatttcagtttttgccgataaatgtttctttagactgctaatactatatgtattactatgtattatactccctttggagtcatatataagcaaaaataactattttcacattgtttcagaaagttagttaaaatcatttaattttactaatttcaagtaaaaagtaagattattcctaaaatgaccttcattgcaacttgatatcataaataaaatagaatccttgaaaatagagttacaattaagtgaagggagttttaggaatgatgtcattaaataggggtgaaattagttagatttgcttatatttgagtccaagacaaaacaatttttttgcttatatatgagtccagagtgagtagctcgctagattcacaaggtaaaatacacactaagttacttattcaaggaaattacttagatttgcttactatataggaccacttgcaacctattcaaggaaattacttataggaccacttgaaaaggatagccgtcacttgctccataactatgtagtcaaagtagatagattcattgctcatttaatgattatcatttatcaaacattatgtgagaaaagaatattgaatttgttgactcaaacttgttttagatgattgagtcaatttcattgctcttcccctggtacacacacaccaagaaaaaaaaaatgcatgttacaaataggatggctaattcatgttatagtattgcttttcaagtggtcctataagtaatttccttgaataggtttataggagcaggaatattttagtttacatatatagtaaggtaatgtttattgctatttgttgtgaaataatttaggaaccctatcctttagttgttatggaatatttatcaagacacattttacttcctttaagcatgaataagattccttaaaactgtctttgtagccagtttttgacagtgtttggagaaatatctttttcaattttgttttttcaataaacatttagcttcagttgtttttgttatgcactcaaaaagttgttgaatgaaattgaagagctgtgaaaatggtcactaaacctttttttttcctttcaaaataacttaagattttttatgttcatgtatgaagattttcacttttattgctttggtgtgtatttaataattaatttaagtgagatttcaggcagaggctttgccctgcaacatgttaatagctttcttcttcagacatttttttatgaaaaaataattttgcaactaattttaagttactggcctaaagaaagactgttgcaatcttctatttagaaatttagccaggcatctccatcttgttattctcagcaaattttgtttgtgcacctttaatctacattcctcattggcttgctttctgttttaggttgctgcactgatacttgaaaatacattcacgtc

SEQ ID NO: 2700 - DNA, 3775 bp, Glycine max
  Intron number 1 from transcript Glyma07g16690.1 (locus Gly ma07g16690) derived from phytozome v7.0 (chr-ID Gm07; pos 16372423 to 16376197)
ctgattgtcagtccattgctcatttcatcaaacaggtcaatcttaaaatatctcacccatttaactttatttttttctggttgtgtgcataatcatgtgtgtataatgagtagtatgttcttataaaatgttatcataaggaaacctaaagaattcttattttatgaaatatgctttaacttgcacgtatgtgtactcacgaatattaatgttagagaaattttattcatgttttctgcaaatttttctacaatgagaaaacagacaggaagagaagagaaataaatattgaatgaatccattttttgtttctatgaaaatagtgaggatgcaaatgtaatgtgattaagggggtctaattaaacatagtataagttattattgtaaattttctaatatatgagtttaattcttacgaataaaataaaataaaattaaagaaacatgataaaaattggaagtcacaaaattaaattaaagaaacatgataaaaattggaagtcacagaatcagttattcaatccaatccaatttgtgacttatagaatgttaagtcacaaaatctaaattatattcaatttgtgtctctaaactaaaaagttcatgttcattcaatcagtcttttattttttactatcttaatcaatttttttccttcaaagcccaaattgagacataatcatatttggaggaaacgacgaatgttttaacttgaaatcaaaatattggaatcaaaatattaaacacgaacactacattttattggatgagtttgagaatgtcagattaatttgacttattttgtcacctctaataaaaatattatatttttacaatttgtttgaaaacaaaaataaaaagaaaaaaatatccatgaaattcacaagaaggacttcttagtaaattgacataaaattaggggtaaataatctctctttctccccccccccccttgttttagcttcttaaaattaaatcaatttatattaagaaaaaaatattgagtgaaaaatttatttattttggattaaactaatttttaattaatataaaatttattcttaatataatttattttattaaatttttagtttttttaatcatctaaataaatggatagaaaattttctaattctttcatttttatttattgaaacaataaatatttttttacttcatttttttatttccattcttaattatttttttctctcctctctcaatttcacttttaatgtaaagtgatacagaaaaatgagtcataaaaaatatgataaagacatattataaaattatataggtacgattcttgcttctaccaattttctcgcaaaagtttgatattgggatgaccttataaaatatcataggataatgacatttagacatcatttttcttaacaaatatctattcgacatcctattatctctatctctctctaggttatgatggtgatggacatttgggtctccaccaaacattatccaatgtcataagacacctctttgtatacgttcctttgttggtttttcatataaattatatctgtacgagagaatcctgctaaagaaatgtttagacattaaatatgggtgcctacgttcacaaaaattagaaccatgaccaaacctctgcgttggtgctatacactttgcttaaaaaaaagaagaaaaaaagaagaaagaaagaacacttgttagatttggttctcgtccgcagtgaattagtatatatgttttccactaatggtggccatgagactggggtgcgagtgcgagacaaagaaaaagaaaaaacgaatgttacccatttctacaaaataagtaaaggcaaaagttccaaaaaaaaagtatgttcagaacaatttcaaaataattaatttccctaaaataacatgtctgcatcaattatgaagactaaatatgacttaaataaagaaggtatatagaatatatggcatcatccccttaagacttcctataagcaagaatcctcatgatttggtttagatcctttgtcgcacttagacaaaaagttaattgacaggtaaaacaaattaaatttcaaaatcctactattgtttttaaaatgataagtaaatactagcaacaaaagttttgattctattttttctttcttttacatattctcttctattaagtaaatttcacataaattattcttatatcctatttaacattctcttaaaaatattgcaaagcaatctcacaatatataactgctactatttagcattcgaagaatttcaatctgtgaaacttttagaaggaaaaaaaaattaaaatcacaggaggacacacatactagaatcaacaaaaacatagaatcaccgactagtacataaagccttatgatattccattattttccatttttagttagacagctataatgaagtgttctagctataggatatatatgggaccttcaaattaaaacgtaatatagtataggctccactttttttttttctttttctttttatcattcagaaatattataattaaataggctccactttattccttgatatagttacaccataacaacaacagccaaaggttgtctcgttgggtaattaactatacatgaatgaaatatgtcatgctctatcaaaatacatattttcattcacaaaaaataataatcaaaatacaaagtttcaaagaaaccacagataaaggtcttttctcttatgggtttgctgtaaagtttcctttagtcttcctcattttatcgaactatttcacttcatccacttttctcattggaacgtctcgttttttttttttatcatttattattaaaataatgactcaccaagtgttcaattccatatttttaaaaaaaattaagacttaaatatgtttttaatctctcaaatcatattttttaatcctttaaatttaaaattacttttttagtccataaaatttataaatgatatttttagtccttttgtaaagtgagtcaaataagaaataaaagatttacggtttttgtagttttttaccatcaaaattagattttttttattttatattttaaaatacgattttatggagttttaaactactagagtaagtcaataaaaaaattaaaacaattttaaatgcgattaataagtttttaattttttatttacttgattataatcattttaaccaacctttaaaagcacactttaaaatatattgaaagactaaaaaaagtaactttaaattttgtggattaaaaaaagactcaaatttaaaagattaaaaacatatttaaaccaaaaattaataaaagattgcatcaattttttttaataacagtcacttgattgtatcagtaaatacagtaacagtaaatcacttgagaatatatgtacatttttttaacaagactaaaaatttactgtacattcttgaactgtaagttgtccagctagttacaacttcagctagtttatgagccaagagtatttactacacttggaatagattggcacggtaaagattttacattatcatcatgcatgtataataggatagttgatttttataattattatttgaaaattaagttgattgagaatgtaaaatctttagcactttgaatgtctggaaaattctaactgagttaatacatgtaaatatgtaatcaaaaactaattagaatgaaaccctagtggtttgcaacatattaggtgtatttaatttttcatgtagaaaactatctcagttaattaagttgatggacagaaacttg

SEQ ID NO: 2701 - DNA, 2192 bp, Glycine max
  Intron number 1 from transcript Glyma20g31490.1 (locus Gly ma20g31490) derived from phytozome v7.0 (chr-ID Gm20; pos 40124095 to 40126286 reverse strand)
agcctagtcgctggaagcacgttgacgaggctgaggtacgcgataatcgcatatgtcagcgctttgcattttagacgcaccgaatcaattcaatttttatgctattgaataattagtattcttatttctttccgacctaaaccctatgatttcgataggatttaatgctatgttctggatttattaattgatcttcacaaatgcagaggggaatcttcggaatctgagatggtagtagagaaggatgatatggaaacatgtcttagagttaaaaataaagaagaggatccatagaccataggaaactctgaaattgattgaatgatgtgatatgatatgcagataaaaagagcttatcatacatttatagcaagaaaagttacagaaaactaatagatgcagcagctgaaacagagaaccctacttattggcaatataaacactaatgtatcatccttactcttagactggttcagtaaccacaacatgatagtttcgaaaacaaagttgaagaacagttcgtgaagtattgtagtttcacttttgattgctttactactttcctagtgcttttgcgacatgtgtgttctaatacaagaccctgatgtatatggtatacttgaaatggtggaactaatgtctttgtcaattcccttctttcgaggggttctttaatgactatcctttttcgttgcattttggtttgctctctttctgccattcaaataaaatgtaattgacttttatttcgctactgctgataatctgttgtggaaaatctacaagcggtctaaataacatactaataacatcatagatcctattattgatgtccacattgtaactaggctgaaatacttgccttaaatttaatgagtactcggagggctgtgtgcgcttttcaatgttgttaatggcggaaagccaaaaatccactataaaaatatggcagatggcgtagcggcaaatgacggaagtcatggcggacaaaaaaaaaaaaaaaaaaaaatatatatatatatatatatatatatatatacatttatatacatataaatattaacaaaacaataaataaaaaattagaaaaacaatggattgcattcaaataaactaaaaagtttcatgagttcacacaataaccaacaccaaataaactcattcacgagttcaaaataacaaaaaggataaaagcttaatgcaaactgcaaagtaaaggttgaggctctaatcatcttctccaatcccaacataatcctcttcgttttaattagtagaagaggactgaacagaaaaaaaaaaaaaaaaacagaaccaaaaattaataaagagtgtcaaacagaaaaaaaaactgaaccaggtgcaaaaaaaaaactgaaccaaaaaaaacagaacctgatgccgccgcagtctgtagtcgttgccgctgccgtcaccgtcactgtcgccgtccgttgctcgcgtgcgtggtgcgtggtgccatcgttgacttcgggtgagacctcacgctggtgcgtggtgccgtcgtcgctggtgcttgctgggtgctgggtgctgggtgctgctcgtgctcgtgctcgtgctggagttcgcgtggtgctcgcgctggagtttgggagttcgtgtgctgcgtgctgctcatcccattttgatttgaaaaccgggtttagggttgggtcgggtcagcccaagacgacccaatctcattttgggaaaattttcagaaaaaaaaagtttcttccgccataaccgccaccaccgttaagcctatggcggccgccatttgaaacccgcaacgccaccgctatttggtggcattttttcaaaaatccgccacgtcataccgccatggcgctgccataaccgccacttgacaacactggcgctttcaggttgaaagaaattagatttgtaggtatcttatgttttatgggctatatttagcttgtaatctctgttttttgttcatttctttttgtgttgttaatagtgtttttttttttttgtaaatatactatggaatttttggaatatgttatttatcattagctgggaagtttggaattttgatgctttgttcatgttctatgaaattaaatgaaattctgtttaatatatgaaagtacttatgaaattctgtttaatataatgtagttgggcttctttgacagcttgctcgtagggttcgtgaa

SEQ ID NO: 2702 - DNA, 1495 bp, Glycine max
  Intron number 3 from transcript Glyma12g10170.1 (locus Gly ma12g10170) derived from phytozome v7.0 (chr-ID Gm12; pos 8010541 to 8012035)
ccagacacagagaggtttgtgttaaaaataaaataaaaagtattaatttgttactgtgttcttgaagtaccctaaatcttctacgcattttgcaacttttttgtctttttttctttctttttcttaatagatgaacccataatcatgcaacacccttgatggactggatccagttttgcagacctcactaggtttaaattacctcttgggcatcagcacactgaaaacgggacaaataatgagccacatggaaagactgcttgttgggtatttagattttataaactaattatcataataataataaaatcaatcagtttttttttttttttttcaattaagtgttccagacttctagggtgtaaaacttatttctaatattcattttgaaaacttgccctgctctcatttgattacttgtcttagttatgacttgcatgcaggttaccttgttgaggtttggacagtcttgttttgtcaggtggcattgttatacacgttttatgctactgtatagtcaataaagtgtacaacatttaagacagtttccctttttatagctgaaatgtgatgatctaaacagaaaggtgccaaaaggaagaaatgcatttatgctcaattctgtagtcttgtttcctctgtaagagtaaagcttgcttctcttcgtaagaattgggtttcactttggcacaagaccttatgggatttgttcaacagcttgtttgtttttgaagatgttaaagatacttttgaagcggtaaaactttttatagctgttacagtaagaaacacattaaggagatatagtttctcttctagaatcatccatttgcatgtattgaactgcatcccaggaacgcaagcttatcaatgggttgctaaatgtattttccatcatatttgataaacttgaagtcattatgcaaagtcacaaatactgcagttatatactgcttttttcatcttagttgataaacttgatgagatgatacaaaactactaatactgcagttatgtgttcttttttgcatctttcaaactatgaagtaacccagtgctgtcagatcttagttgtgttacatttttattgtattatatatatatatatatatatatatatatatatatatatatatataatacaataaaaatgaaaataaattaatattaatttatgaattctgatccattttatgatacttactgaatattaaatggatgtacaaaatcacctttgcaagagtggtttttgttctcgagttaggttcttctgtctgccaactgtgagcactgggtctagttctgtcacctgcatctttgtattttaagaaatctgtcactatattttgaagctggatatttgcagcacattgggtgtgatgaagataatcttattcatgttgaattctgttgatttttttttatatatattctctaaaactatgtcttaattgagctttaaaataagctgtacgtatatcttttcagaaaataa

SEQ ID NO: 2703 - DNA, 5068 bp, Glycine max
  Intron number 1 from transcript Glyma06g42550.1 (locus Gly ma06g42550) derived from phytozome v7.0 (chr-ID Gm06; pos 45870648 to 45875715)
tggtaagatcaagaagatcatataagtacttttttgtgctccatcacattatcattactggctttcctcggattaattatgtgtgtcttttgaaatatttctgaatctcgaattatttaatttgtcaccttaatatttttatttattaatttatcaacttacaatatattaattactcctttttactatgtatttactgccacaatacatttatggaataaacatatcttagtgatacatataagattcatataaaataaattagaataataaaaagtaaactacatcaacacctcttgagatttgtgtaattatataaatatcttttatttttttaatcattacatgtatctttttggtagaatatgtcaatgtaatacttaaagagatattaatgttttcaaacttaatgggttagggtaggaaaaaaatataaagttatgtgtaattttatcaaagtttatcgagaattatttatacttaattcattctatatataatcaatcatttccttatataagatgtatgcattatcttaaacaatagataaaatgagtttattatttaaatcgtatagttttgggactaaaaatactttaactttataacttttaagctataaacaaatattctttagagaaagattaattttaaaaaatatatttgtaaggatgataatttaagtaattcaaattacaaatgaaagttgagtttagaaaaaaggttaattattcacaataatattcaaatactcactgagagctgttctttttaatgtatctattatctttatacaaacaaggcccctgccatggatgatgtaacgttttttgcttacgtgtcgtccatttaggctcccaaattctcacccaaaaacgtcttaatcatggtacagtgttaaaaactttaattattaattattaaaatattattaatattactattattattaatatttgacacccacccgatacatttacgtttccaatgtgccgcatagttatcgatgcactaattttgtttccaaggcttttgcattttttcaacattcgtttcattttgaattttgcttctgacccctctctgtttcccattgcttctcaactctccgtttcccattttccttcctctccattcttctgaaccctctgttcctttccattgttctggattcttttctctcctatcatgctgcgttttcttttttcatttggttggtttggctgaaaaaccgaaaggctgttgcttggtaaagctgttgttttctctcccgtgaggaaaatccaaaggttgaagctttttggcttggtttggtagttctttgcttggttggaccgaaaaatgatttctgggttcttttctatcctatccttctgtgtgatgtatttgatttctcctttgatttgtggttttgagggtccaaaaaattgtattttttgtgttcctcgggcttatttgatcgtggctgacacaaaagtttttttgcaacacaaaagcttcaattttttttgcgtcttttttctttgttttgtgttatgacttttcgcaggacaaaagcttaaatatttttgggtgttctgcctttattttgttttctgacttctcgcaatacaaaagtttaaatgcttttgtgttcgtgagccttctccaacgtgctcattgtttcctatacctagctttttgtgttttcgtccttttttggtggtctaatggttcaatatatttttggcatgctgatttttttatgaatgcagagaaggtggaagaacatattaaagctgcgatttttatctcaaaaactccatgagtacaggttcgtaaatacaaaagcttaaatttttttaggtgttctacttttattttattttttgacttctcgcaatacaaaagtttaaacttttttgtgttcctgagccttctccaacatgctcattgctttaccatctttaacttttctatatactgactgcacttgcactatgttcttggccgagaacaacaaacaatccgagaacgacaactctcagaaagaaaaccagtcataggtatcccccaaccgtaactacaggtttgttttctataccatttcttccccatttcttcatttgttagttttgagtttgttttcatctttatctttcggtgcctattttggtgttgtgactttctgaaacaaacatgcataaatctttttttgtttggaagtgcttttcatcttagatatgcatcattcgataaatctcttttaggttttatgaaaactcgaaatataaaaggttaaatctttgttgtccattggtcattgtttgttgaaatgattttttttttttgtttttagtccgtttacaccttcgttttccatcatttgtttgttgtgctgccttctttggtcttttgtttgttgtgggatgaagaggagtccagttgttaaaaaaccaaactaagatcagttcgttttccatcatttttgttttcaaaaagcagatgttatgggatgaagaggagtccagttgaatattgaagtccaaaatccatgaccttttttcaattgtttgttgccaaaaaatttatgtaactctgttttgtatttaatttttggatgtcgttatttaattcccttggggaaggagacaatattttatagctgtttacattttatcaacaacgtcaccaaaataatcatatattaaaatgtgttttcaataaaaccttccattatttattttttttaaaactaattacaattgtatttttacttcacctaatcacggtctcaaaaaaacataaaataattatcaaatcttttactcctacttaagttaagacaaaataattgtccatttttaaatttttgagaaagttgataaaaatatatcattatattttattttaagaaaattgaacttgacacgtatttattgttttagatacaattgtagattaatacaattttataatcattcgatattaatacgattatattatctgactaacaagtacttgatatgtttctagatttgttgaaattaatttgaatgaaaagttaaactaaaataaagttaattcaaatacgttgcagtgtttgttgtacgtgaattttagtggttatgaaaatagtgataaatttacatctaaagatgaactgcgatcatgtatccacctaattttcttttctaaacaaatctgttggagtcagataatttaaatacgtttatagtgtttgaagtaagtgaattttaatagttataaaaatacagataaattttcatgtaaagatgaagtgtaatcatatatccaccaaattctattttttttctttctacattatatgtatcttttatagaagagaaaattttccctttaaatattaaacgttatatattttattgaagtttaattaataagcatattttattcgtatttttgttaattttcatttcaaattaataggtacttaacaatcaattttaaatattatgttaggatatagaaataatcataattttcaaattaataaccatattctattaggatatcgaaataatcataatttagacgttgacttattcctaattagtaggtacttaacaatcaattttttaaaatactacactatcaattttaacatattattcaaatcattttcaattttgtatttatttttaccgtaatcatttttaatttattaacatttaattaataagaatattttatttgtaattttgttagtttttatttcaaattaataggtacttaacaatggattttaaatattttgttaggatatggaaattatcataatttttgaattaataagcatattctgttaggtttatgctatgtaatttttgtgtgtgtattgatttttttaatttatggtggaggggattcaatcaaaaagaagaaaaaaaatgcagtcaacgatttgaaggcatgggcagacactactaatatctgattgtagccatctgcatcccaaaggttctttcatgtgccttcttctcatatttttattaatgttgtaagatttcagttactatctataacgttctatgaattttctctataatttttgtgtgtgtattactttctttaatttatggtggagaggattcaatcaaaaagaagaagaaaaaaatacagtcaacaatttgaaggcacggactgacactactaatatctaattgtagtaatgtgcatcccaactgttctttcatgtgccttcttctcacatttttattaatgttgtaagatttcaattaccatttgtaatgttctatgaattttaattgtagattaaacgtggacgaaaagtttatactttgtaatttttgtgtgtgtattgctttctttactttatgatagaatggattcgatcaaaaagaagaggacaaaaatgcagtcaacaatttgaaggtacggtctgacactactaatatcttattgtagtcatgtgcatcctagaggttctttcatgtgcattcttctcatatttttattaatgttgtaagttcaatacctttgggtatcaaacaattttttaatttctttttaattttgaataaatagtttatagtttgttttaattaattataaccttatttcgttgacttatattttttctcaaatcttttttttgtctcttgatgtttcatgacttagtgttttttatctttcatgacttagtgaggtacatattatccaatcatgtaatcgtttgattcacatatttttattgtgcatcatttattttattctaaataatatcaaacaatatataatattaacatgttatcttaaaatcatactttattacctatatgtaactcaatattaattattctaacttttcaatactcaaataggagtatgagccgtgcatcttcacggaccaaagtctagttttggaacaagattatctctgatataaaagacacatgtagaaaattaaaaaatacaattaaaattcatagtcattgtatatattgaaacgatttggatcatgttcatgctaattttgtttgaaaaactagggagctgctgggcattttcaaccgtggcagcaact

SEQ ID NO: 2704 - DNA, 6238 bp, Glycine max
  Intron number 3 from transcript Glyma17g31720.1 (locus Gly ma17g31720) derived from phytozome v7.0 (chr-ID Gm17; pos 34922474 to 34928711 reverse strand)
tggacccggtcacggcattaggtattcatcaaaatgcgaattatataagtatagtcaatagtcatttacgttgttcaaaatttagatttgaattcaatctagatcgtcaccaatatgtatgtaactagtgttagactaaacattttaacctgtgatattacaaactacaaaagaaacacaggttattaacaaaatgcagaaaatacagatcaaatcatacctccagtcattgtcatgaagagtttcttattttttattctttcaagctctctctctctttctttctctctttacgagcgttgtagattttcaaaatgttaggaccaaattattacattctcccatttggtccaaacattttgacttaatgctcaatcttcttaagaaatgaatatacgaatcatagtgatagttcctcttacaacgagtaatatcatccatctattacaatatactaaatttcccaagcaatatactcaaagtggtaataaaacttaatgaataaacccaatgtttattcttggtccaaaacataatttttctcaaataaatcaatgtgcacccaaatatgagaaaatatcataatataaaagtttcaattttaacatataagtatacaatcataaagtggaaccaagtctcattctttctacatgatccttaaatttaaacggtggcatgcccttagctaaaggatcagcgatcatcaactcggtgcttatatgttcaatgaccactttcttgtcttttactctttctctaatggctaagtacttaatgtcgatgtgcttacttcgacttccacttttgttattcttagccataaaaacagcaactgagttatcgcaaaaaattcttaaaggccttgaaatagtatcaactatctttagcccagaaatgaaacttttaagccatacaccatgtgatgtagcctcaaaacaagagacaaactcagcttccatggtagaagtagcagtcaaagactgcttaacactcctccatgaaatagctccaccagccatcatgaaaatgtacccagatgttgatctacgagagtcaacacaaccagcaaagtctgagtctgaataaccaatcacatctagattgtctgtctgtctatacataagcatgtaatctttggtcccttgaaggtacatcggcactttcttagcagctctccagtggtcaatacctggattactctgatatcttcctaacattccaactgcaaaagcaatgtcaggccttgtgcttacttgagcatacatgaggcttccaacaactgaagcataaggaatgtttttcatttgttccctctcaaagtcattctttggacattggttcaaattaaacctatcacccttcacaatgggagcaacacttggtgaacaatctttcatttgaaatatctctaaaattttgttaatataggtttcttgtgatagacccaaaatacctcgagatctatctctatgaatcttaatgccgatgacataagatgcatcacccatatccttcatgtcaaaattcttagagagaaattgtttcacctcatgtagcgaaccccaatcgttggctgcaagtaaaatatcatctacatataaaacaagaaaacatattttactcccactgaccttgtggtatatgcattgatccatgggattttcatcaaaaccaaatgaagaaattatcccatgaaacttaaggtaccactaacgggaagcttgttttaaaccatatatagatttattaagcttgcaaaccaaatgctcaccactattagaggagaaaccttcaggttgtttcatataaacctcctcctctaaatcaccattaagaaaagttgttttcacatccatttgttgcaactcaaggtcaaaatgagcaactaatgccaagattatacgaagagaatctttcttaaatattggagaaaaagtctctttgtaatctattccttccttttgagtaaatcccttagtaacaagtcttgccttgtatctctcaatgttgcctaataaattccttttggtcttaaagacccatttacatccaatggcatttaccccattaggcaactctacaaggttccaaactttgttactctgcatggaattcatctcatccttcatggcatcataccataaatttgactctttacaactcatggcttgatcaaaagtttcaggatcattttcagctccaatattatagtcagattcttgcaaatatataaatataattactaggaatagttgattttcttactctagtagacctccttaatgttgcatcaacattttcttggggatcatgttgttcaactggttgttcatcattttcatgaatttgatgaccaacttgaactactggattatcaacaacagtttgtggaatgccaatcatgtgttgttcatcatccctttgaacttgaggggtatgaattacaaccaatttttcatttgacgtggaaggttgagattctatataatcaatttcagaacctaagtccttcaattgatcactcccactgatcaaatcattttcaataaatttggcatttcttgattccacaatcctagtaatatgatgtggacaataaaacctataacctttagaccttttggcatatccaatgaaatacccactaatggttctcgggtcaagtttcttctcttgtgggttatatattctcacctcaaacggacaaccccaaatgcgcatatgtttcaaactcggtttccaacctttaaacaactcaaaaggtgtctttgggacagccttggttggaacacgatttaatatatacactaccgtctttagtgcttcagcccacaaggatttaggaagattggagttgctaagcatactccgcaccatgtccaataatgtccggttccttctttctgtcacaccattctgatttggagaaccagacatagtgtattgggcaacaatcccatgttcttgaagaaactttgcaaaggggccaggtgcttgtccattctcagtatatctgtcatagtattctccacctctatctgatctcactatttttatttgcttgtcacattggttctcaacttcagccttaaagactttgaaggcatccaatgtttcgtatttgttatgaagcaaataaacattcatatatcgtgaataatcatctataaaggtgataaaatatttctgaccacgtgcatccatatctaaacaacaaatatcagtatgaattatttctaatatgcttgaactcctgttagcacctttcttagacatgttggtctgcttacccttaatgcagtccacacaagtcttaaagtcagcaaaatctagagtattgagtactccatctttcactaaccttttaatcctctcaatggagatatgtcctaatctccggtgccataacatagaggaattctcattaatattacaccttttaataccagtttgaacatgcatagaactataagtggcactattttgtaaaccaagaagataaagaccatcagacaagataccattcccaacacattcagaattataaaataactcaaatgatgtgtctttgaaattaaaggaatatccaaacggtacaagtcttgaaatagaaatcaagtttcgggaaaaacttggtacataaaaggtcttttctaattttaaaataaagccactacttaagtcaaaatgcaagttccaatggcctccacatgtgagcctagcttattgcctgataaaatgttttgctcatttcccactggtttccttaggttttgcataccttgtaaagaatttgcaatatgaatagtagatccagaatcaatccaccaggtgttaatattaacactaaccatattagattcataacatactaatgagattgatttacctttcttctcaagccatttctgaaacctggggcaattcttcttcatgtgtcccttcttcttgcaaaagaaacactttgccaccttcttaatatcagcttgagttggcattttatcattctctttcttattagcttgagacttaattgctttgttcttcccataagcagtagtcagcaatgcattctcacccatctccattacaagcctttcttcttcctgaacacacatggtcattaattcattgataaaccatttatctttatgtgtgttctaggaaatcttaaacggcccatattcatgtggaagggtgttcaaaatgaaatgcactaggaaggactcagacatatcaacctctagtttcttaagttgaactgaaatatctcgcattttcatgatgtactcacgcacacctttcacactggtgagccgaagagaagaaaacttcatgatcaaggtgcttgctaaagtcttatctgaagtgatgaactggtcatcaatggccttaagcaagtcttggaccttttcatgctggtcaacaaaaccatgtatcccagccgagattttggtcttaatgaaaatcacgctgagccggttggatcgctcccaccgctcatatagcgcaacgtcagctgtgctactttcatcagtgattgcaagtggttcgtctttccttatagcatagtctatgtccatccaccccaattgtagaagaattctctcctttcatatcttatagttatttcctttgagttcgggaacatcacattgaatatcagaaaaactaatagtttgagaagctgcaaaattcaaaggcttatgtcaaaatttgaggcatactaatcttaattgtatcttttaccaatgtaaacataccataaaattgaatcttgtgacataaaaattgtttgtgggctaaatttttaattcaataagaaacaattaaaccttatgatagaataatcaaattacttgctcaatatttatgctttacgggtacaacatgaaaataatttaatttccatcgtaaatatttactttatgataaaatcgacaaattatacatacatcatgatgtctctgggtaaatcatgaaaaataatacgtcattttatcccaattaattatacagatataataaaaattcctgtgagataaaattcattatataagtataattaattacaatattatgtctaatttcttatatgatctttaaccaacttaatatataattttaatcaaatatagatgttgtggctaatccataattaatcaaaattataaagatcacttagacataaaactttattatatgagaataaatggtattttgcatttcaaaatcaagatacaatataattatgaataagattctcatataattttataattgaaacataatattatgcatttgatttcatatatatatgcatagaataaaattttccagaatatattcatgcataaaataaatcaaaattccaaaaattgtaaagcagaataagtatatataacatgaaaaacgattacttatcaggaaagttttactggtttagtggtctgcacatactacagcatttgatagagtcaagggtttaacacccaactagcacaaaacgtaagagttttcatttttttttttacaaactacaaaagaaacacaagttattaacaaaatgcgaaaaatacagatcaaatcatacctccaaccattgtcatgaagagtttcttgtttttggttcttccaagctctctctctctttctttctttctttagatgatgtatcaggctgaattcgaaagggatgagctcagggaccaaatccatgtgctatatataggcattttatcatcaagaatgcatttaatagtcattaccactcattattggcggttacaaatcattagtggccattaccacccattaacagtcattcaatttggcttccaaaactgacgagcgttacagattttcaaaatgttaggaccaaattattacagctagtccctcctaaagcatgcacatcttgagttagacatttcatatctataattttatttattgacaaatattagtttgttagaatgttagttttttattattagaaaagatggaaccacaagctttcatttctttccttttctcctaaccatccaacctaccttatatctccttcatatctataattgaaaagcctgaaagaaaaatgtaaattttgttaagagatgcagacattaacttgtgtagttttagatttcatctgaatttaagttttatgacttaataattcttctcaaattttcatgcagtgtggggagtatagggcaaggtgggcaagaagaat

SEQ ID NO: 2705 - DNA, 2352 bp, Glycine max
  Intron number 3 from transcript Glyma08g38190.1 (locus Gly ma08g38190) derived from phytozome v7.0 (chr-ID Gm08; pos 37081304 to 37083655 reverse strand)
ggataacagctgtaggcgagagggtcaggccaggaaagggcgtcaaggtttttttcttttctctctacgtgtttttttagtagatgaattaatttgaactttgaaaataagaaaatgataagtaagagtaaatgagtaaaatacaaaaagaaataaatagggacactgacggtaatgctgaaaagagggttgcatgcatttgaaagctcacttaatttaatgcttagtattaaaattgattcacggtttcttcagtctggcgggggatggatatggtatgtgtaaatgtactaattaataatggtgctagtacttcttgcatgttcaattttttcagactttggctgatttaagaaagaaagagagcgctttgacgagtcaaaatatattttttaagttatttaatttttaaaaaaaagtaaaaaagttaatattttttaaagacgtttatgtcccttaatatattctttcttttctatttttcaaatgaaacggaagaaattggaaatttgctttcttttatggtaattattttctttcttttcaaattttactgttccaacaaagcatgagatttttttttatccgatgtgccgccgttttgtcactgtgactgtgagggggtcagcaacttttttcaattgatttgatcccatgtgccgccatttttcatgtttaataatctctctcctgttccgtatctatgtcggcgtgcctctttttattactgttctcatgttttaaaattaaatttagtgaagtcatttatttgacttaaatgacattttaatttccttattttgtttacttattttgtttaatatgcacatttgactttttatcgtaaaaaatccagaaaattttaatcctttcattttattataaaaacatttaattttatttttctttataattttgatcaaatttttaattttttatgttttatttcttttcttttgataatattaaattcataatttaatatatttatttaagatactattaaaagaattagttgattacaaagtaaaaaataagaaaaattaaagattaaacaaaaattgtggatttttaaaaatataataaccaaatatttatattttgaaataaagaaatcataattgtgatttttaaaaaatagaagaatcaaatgtttcaattataaaataaagagatcaaattatagattaaataaaataaaaaaatcaaaattacatttaagtttaggaattttgaactattaaaatgctatgtgtttaaattaatttaagctagatatttttttacattaaaattgcgagaatagttttttaactttaaattacaaagaacattaactttgtgttccgtactactatgtattctccctctatctccctccgaaatctgaaatctgaactctttccatcgtagggtatacattaatgctgagtttggctttaacttttgcttttgctttccattcgccaggaaagctgggtttgactacaacatcatttctcactctatatattgaaatttgcacaattacatgaatgtggggtttttcacagtgtgtctctggccccgcaaataataatgtcctctagcgtctgattctgaaacaaactcacgggatttatcagatccttgtttggatgtttttgctgtcacaaattacatttataattctaattcttatcataataatatcattaatcctaataataataataatcacttttgtaagaaaagggaagaaatagacattttgtctacctaatgagaattaatagacaatttggcatttcattttgacctgtttttagttggctctagtgagattattaagcctttgcgaagtcaaaattttgaaaattcacaatcaaattgactattacaacttttctggtacaattaaaccgtgatgggtccttcagtgtttgtctactattagaaaagacgggaagattgatggcatcttgtgtatattatcttttggtagaatgggaataaaagaagagagcaaaaagtgggtaaaaacaattaaagcaacttctgtgcatgcgccattgcatgcatttgatcacttttcctttggtcgtatgcattttcagcttagaaaagtagtttttaccagaaaattttgaccaccccatatggtgaaatttgatttttcttggctttttctttgcatggaatgtggcattgtgcacttcatggctgtcaccggtattatgaatgttcctacagtgtacttgggtaagaaatgttgctacttaattttatttttggtcgtttcccaacttatttttaaacttgatactgtttgaaattaaattgtggtgattattaatttattatcaggtggat

SEQ ID NO: 2706 - DNA, 671 bp, Glycine max
  Intron number 10 from transcript Glyma13g25660.3 (locus Gl yma13g25660) derived from phytozome v7.0 (chr-ID Gm13; pos 28877978 to 28878648 reverse strand)
ctccggaaagacacaggtattctgttgaatcatacctgtgtattaaatttacaaacacttacgtgttcattgatgaaattctagagatttaggtagagaaagaagagagatagaagagaccatgaatatgaataacattctcttatttatattggtgggatacaatatagtacaaaacgtaaagctctaacccttatttatacttattctatgctcgtaatttccaatcctaattaaataaggaaatataatgatatatagaaaccactcataagtgatcatctaagatcatctaagatactccaaatttcatgaggtggaaagggtggtggtcctccattagctttgcctgaggagcatctgttgtagttgctttttcttgatgcttccatttcttggcttcttttttacggagatcctttgcctggctttttattcttataaagattttaaccttattatgttctaccaatatcatatgacggtctaatgatgaaactatttgatttctattagatactaattactaaagtatatatcttcatgcgacaggctgttgcttttgctctctttttctactctgcttggtagtttgttgcttttgtaaattatgtcaaaataaactaatttttgatactttaccgttaggattgaacgcctggaattgtttg

SEQ ID NO: 2707 - DNA, 1555 bp, Glycine max
  Intron number 5 from transcript Glyma02g46690.1 (locus Gly ma02g46690) derived from phytozome v7.0 (chr-ID Gm02; pos 50584518 to 50586072)
ggccaaaaggtggtgagaggcaatcctaacccaaggtatgtcctcaggttgatgaaactaggaatagaaattaacttataaattccaatttaatgcatgtgccttgtcaaatgaacttttttattaatattgtcaaatgtcaagtttttgctgttgtacttgctgtctagacaacagttgaagtgaggaatcaacttgatataatagtttattgaagcctatatattcacttctcaaccattttgctttacaatctgtttctcttattatcatgggttttagcatagtctgaggctttgagacccctgttgcagttttgtagccaacatggtccatagaaaacagtttgtatcttacattagagtatatttagaatacagacgtgaaggatatatatatatttgcaaaagaatggcgggaatttttggtaaacaccgacttttgtgggtctaattaagaaatactaggaataactttatagatttgttttggtaagggatactgagatggacatatgggtgaggcggatgattttcatgttttcaagaatagcaatggaaagtagtatgctagattctgaaatttttatactttgaatgttaagctcatgcaaggattaggacaataggtgtacaaatttcatgtggatgactttggaagctgttttttacattcattcagaagtttttttttggtcggttttctgactcatcaatgtgtgatacttgcaaaattgtacctggtagttgaaggttgatgagaactggtgtggatggaggatcttaaaaaggaactagaatgattaaatcacggtaactaagatacaagttggaaattaagagcatgatttctaaaaatttgcaaagaaacagtggcaaattaaagtggcagtagactattagattttgggaagtattgtggaatagatgttgctcccaaaggaaaggagtgaatattaattttgcaagccaatatgaagttataagaaaacttagggtggggggaagaggaagggcaagaaatattcaggcatcattgcagtctttatactcagttatgaagatggtaggaaagtaggattaccatcctgcaggttttcatgaatgactggtgtagccgatcccaatgttacaactaagcctgcttattgatgtcattttataaagtcatcgggcacttgtgaacaattacttataaatagggctatattcacctgagttagttttgttatagttgtcctaggaaatgtctgtaccaatgctttctaatttcatggtgacaatcattactgtggatgtcattattacagactcaaaaggttacttctcatgattctggttatattaatgtgtcgctacttcaggaaatgcttgaaagcatggaattaaaatcaaatgtgtgcttagacctttatgaatgaggcttgtttcacgttaatgatcattgatctatgcttatgatactaacttgctgcagtgctaaaatatgctactcaactacatatttcttgtttattttgtatcttactatgcttcttatgcaggagctattacaa

SEQ ID NO: 2708 - DNA, 3477 bp, Glycine max
  Intron number 2 from transcript Glyma07g24950.1 (locus Gly ma07g24950) derived from phytozome v7.0 (chr-ID Gm07; pos 27389921 to 27393397 reverse strand)
aatcttggactgggactatcatcggtccccctagtgtaagttgctgtctgttatttttgacacattggaatccccagctaacatccctatttgcttctatgacaaagtaaatattttgaatttcagtgggggcttgtttaatatatctttgagtaatatgttatagattaataatcagtaaattggtttttttgttctttagacatagacatgtgaaactctggcatatatggattcaaatgttggatgttaaattataaataaaggttccatttgtataaaaacaatacatattattaggtcaaatatatagaatttttagtaaaaccaactccaggtttagtttactgatatggtgctactcaatagacgtttgcattttgtatttcgtacaaagtttttggtgggctgccatttttagtggccggagagaacatacctatgttgtggccaagtctctaaaatactcagttgtatctctgtcttgggacctacattgggcagtgctgagaagtacttgattcagtaacaggtcttttttctactagtttctatcattttaccatctttttttctcagcaagtactactcctattttatttcttttgtttctgatttatctcattttatgtgtccattaatccatgcaacatcctcatctacataacgctttttttgtttgctctttacagcccaccattgagtcagtaccataaagcatagtaggttttattgtatggttatgtttttcttttagcttgagaagcacctttccatctcaaataacaccttcctttcatctgcccagtatgaaatcctataatttttacatatgcatatataaaaatactcttgtactaacgttaaaatactcttatttacagatgtttaggaatacccccattccattaacattatataatttagaaggatgtcaactgccttgtatattttcaaaaaaagtttgatactaattctaccctctcatctaagcccccaccaattttcttgtttgactcccacttctcttgttgaccaatttgtaaccttgtcctcaactgaaaatcttctctatttcaatctttctctttcacattctttctctttgctttggatggaataaagaggttgcttgaagacattatcatggtcaaatttaccaacagagaatgacaattgattctaaccctttgtcttccttttatacaccttccattttctgggttcaagctttatcagtggtgatcaagatggatcatgaagttgggggaatctcttgctgcaccagaagagctttcaagtttaaactgaaatagttctttcttcttcctgagcttctttgttcttatgttttggccttttggatattatgattgagatatcatcaggttgctgagtttttctatggttgcaaacctttctgcgaagtgatggtaggatgaattggatcaatcacgaaaacaaaagtaaacaaaaaaatatattggactattggagtaattacaaatgctagcaacacatcctttgacacatttttttgaacactctactactggctgaaatttattgaaattcactcaaattttggtgagtgccacttatcatataatgaatttctctcctaattttgtagttttcaataaatttctactaatgatggagtgtgtgttagaaggaggttgttagagtgtgttgttagcactcctcttagagtaatacttgaatgcagcaagattttccggtgtctttgcacctgaaataccaaaactcttgaaacagtcatgttcagaacatgacatagaagcaaaaataattcttctcaattaaatgtggaaagcagggaaggggagaaacccttttaaagatgcaatccaaccacacacaccatataactaccaaacctgaactcctgtagaaaacatcagtgggtgcttggtttaagaaatatttttctatttttattttctgttgtaacttttaattagaaaaatgtcaactatattatttttttgttttcaaagatttgtacaggaaacactaaaaactattttttattgttttgattattcctatataaactgttgaaaataggaaacaaagtgaaaataagataacatttttttaatgaaaaattaaaacagaaaacatttctcaaaccaaatacctacttagtctctttttatggaaacctttatattataccattaaaaaatgtagagtagtgggacaaatccaatgttctaaaattctaataaagcttgttgcaaagcagcagtagtcatgagtaaggtaagtttttcaaacttgcatgaagtcatttgacacatttgtaagaatcctgttatgtacttgtagttgtatctaaacaaaatacttacctaagagtgtgctttggatttccaaatgggtatgtcaagcacgaattattgcaagagtgaggtaacgtatctggagaaaaagtgaggtaagttcttcaaatttgcatcaacttgtttgtgctaatccttttaagcacttccatctaaacaaaagacttgacctaagagggtaatgagtttgttaaggataaatcatgtaatgcccggagtatacggaactgaagtaaaaatttgcaggagctaaacactagaaaatccaatatccaaactcatctatccaaattggttcagagtagtcttaagtaaaatcaaaaggcattttgagtttacttgtctctctgtcatttaaatctgcaattctgtatggaaatgaaaattccattttcaggaataatcttaaattcttgattagaaattagaaatttagagtataagtggataataggctgattatgcaaagtagacagatggaacaagaaaagtaaagtctctgaaaaggaatgcccatacctaaatgtccacccagaacttgatagcattaacatcacccaaactgaaagaaatcagtcgtacaaagaaagcattcccttgggaattaaatttccaacttccaagagttagcatggatagctgtggtgcttggtttgcaatcatttctgatcaaggccatacctgttctgtaaaccaaaactatttaactcctagagtattgttttgaccagataaatatgtcttatgattttctattcacatggaattgattttcaaaacttcaaatattacccaaacatcatgattcttcccacaattaggcttacaatgaaccttgtaagaaaaagctttgctggtggttgtctcacaacaagtgatcataacatggaaatgtttttgatgaaataataaaaataataggtgagataatgacagatattaaatgaaaaataaattaatattcaaaataattaaatatcttctataagggattttcaaaggtgtctcactttctagctgctaagcaaaactaaaactagtttctactaaataatatattgatatggcctgtttttcctgtccatcatgttattttaccagactgttc

SEQ ID NO: 2709 - DNA, 5175 bp, Glycine max
  Intron number 1 from transcript Glyma01g24530.1 (locus Gly ma01g24530) derived from phytozome v7.0 (chr-ID Gm01; pos 31964674 to 31969848)
tttttgtcaccaaagttaagcgtatcattgtaaaggtactgcttttaatttatcactacttttattttatttgtagaaatcaaactcaagtaggttgagtttataacaatttatcatggtttctcaaaacgatttttttttttgtttaattgaggaaattatacaaaatgagagtactaagagtttgcttacttggattttcatttttaatctgttttttatttataaaagaaatagttttttttctgtataaatatttgaaaataagaaataaattgaaaataagatgataattttgtccattaaacataaaaacagacataaataggccttaattttcaaaagcaaaaattagaatttctttctctctttaatttaattttcaatgttttccaaatttctagttttctcttctctgcatcaaaatgaaataagggagacgaggcctttctgtgtttcctttttcaaaccttttttcatatccatatcgcgattctcctcaacaatcaaaatgtcatcatttttttttcaacacctctactggcataaagtaaacgggtgtagtaattttgttttactcgattttcgagtgaatttccctatttatttctgaatttcttttttacgaacatgacagtttttagaaaggtgaagatttaattttagtaccaggcatttataaatgtttattaagttaattatttttgtgtgagtggtgatatgattgtttaatgtttttatatgttttttttaaaaacaaggtattattaaaaaatataacgagtgttattactaaatttttcgaatatgaggctgtaattttagtttatatttatttactattgtaataacttgtttttttttcttaatttcgttttattgccctaaaagcaaaagtttgggtttcacatgtctctgtatattttttaatgttttatttcaatgagttgaaattgagaggaaaaaaataaagaaaaaaggaaagggacaagaaagaaatataagtaaaatttagatgaaattttaagttgtttggatggataaaattaataaagaatagttccttttcatttatttggttatgttcaaaaataaaggaaaacaataaaaaaatttgcaaaatcatataattttatcaccaatgaaataaagcatgacatgattcaaaaactcaaactcaaaatattcatataaaggtagaatagaaatattaatatattgacacaagtgatttgagacttaaatttcttaattaagatatgagatttgatttttaggtagaacatgaaattataaataaatgtatcattttattttaagataaatctatccaatgaaaactaattaattgagtgtcaaataaaatatttcatatttcgtagtttaaaaaaacatattgcttaataaaaaaaaaagaaacacttaacatatttatgctatccagccaaaagaaacattaacatatctatgctttgcaattgcatcttccactttattccttttggcaaatcttctctatatttcatatcatctaaaatgtggaataaatgcatttctactcttctttcatccttccaatttcattcttttccatttcttctcaaagaaacaaagactaatagtgctataaagatattataaagatattaacaagcttatattatttttatattgattgtaattgtaattagtactcaacaactttttacttggactaaaaaattattctctctatttaacaccagtccatcacaaagagtaaacatacatttttatctaattaaaaaaatgattaaatatgtttttttatatctaaaagatatattatttttaagttaatacatacttttggtcaattattaattattaaatacctgaaaaaaatttattttaacataggacctgtattactcttactctgttattccgatgttccgtagctatttcttaatcataatcgttcatcctctttgcaacccagcttctaccctttcgttcctctttgcaatccagcttctaccctttctttgatacagcgacctcgttgaaaacctatattacatgaggctatgaagcacggatacccaagtctcttgtcgtgttcggtgttcgacactagttcgtgtcactgtccaacaccgacccaacacccgtgctacgttttatattttagacattacagatgtttacgtgttcgtgtcggtgcttcatagacttgaggatgccactgccgccggatccccctctgtgctaccgaaggccaccaaggaggccctcctccggatccccagcgtgatcctcaacctcatccttgaaaaaaaaaaacccttttatctctcggacgttctattgttcccagaatccctttttttttctttcccatcaacacgatgtcttcttcgttgctctatacatgggaatcaagctctgcttcgacaagagctcaccgtggcaaacgattttggcgagtcttcataggctgatgcttgtgcagatctttgttttctccatcgatcagcgatggcagcaacaaaaacaagttgtattttcatgtgattggttttcattttatggtttgtttggaaaaaaaaaaactcatggatgttgattttgaaaaacatgttcgtctttgtggttggatgccattttgcgatatcctcttgcgatctggtttcgagatgtttgcatctaacagagaaaggtcaaataatgtattaggaatttttattatttgtctttttaaaataaaacataaaataaaattatataattatcctttaatttatgttgctataaataaatgataaaatgttttttttcttctcaaaagtgaaaaggtataaagtattaatatacaccttctaaatttttaagtgagtcccaaacttcttaattaatatatatatactaactcatagtcatggttaagatttaaataattcaaacgaagttatacgtttttaagtaaatcaaatttgaatttgacagaattaatttctaaccgtagtaaaggtaattaaaatgtatatttaaatacatatttactaaaattttacattaatatatatttttattaaaaaacatgaaaattaatattcaaatttattttaaaaagtaaaatataatcaagcaaacacacctttaaattttttaattcttattttatagaattacttaaaaaaacaaataagaaccgagtttagcaatttgaaaaactaaaaaaaagttttaatatgataaatatctaataattcaaaaataaatagaagatgtatttgttgcgaatgaatggttaaggattaaataaaaataaaaccttatcttctaatacgaatgcgaatattctaaagtcttctaaatttttttgatagacattaattactctccacataaacactttgataaaattatttgtggtttaggtttgtgctggacttttgtcaatcttttcagcgtcctattagcacccctaccctgaatgattagatttagaggttccctccccctttcattctttggataaacgggaacaaaaaaagtgcaaggaaatatatttaatgaagagaattaattaatttaaaagtgagaagggtacttgactctcgtttaaaatttgaaaaacaatcaaaaaaagaaaattttaatattaataagcattatctgcataaagaaaatgaattttgaaattagtttgaattaagaaaaacttagtttaggtaggtcatgtttaacaaagatagctaataagataattgaaagttgaaagatgtaatatgaaaattgaataaaaaagttttagttaaaaatgacacggagaaatttttttaaaataaataatttaatttcaaataaagtgataagtgataaattttattaatttattgaagataaaaataaaaataatgatctaaattttatgtttaaaaacaaatcttattagttatatatagaaagaaactttatcatatttattgttttttaattaattcctccttcaagaaatatatatatatatatatatatatatattagattagtaagataatatatttttgaacgcattaataagataatataagaagtagggtaaaattattatattatataatataaaattaaacaattgattacaacgttatagaataattaattatcttattttatcttattcatgaatcgctaggtttaaatctaaaagatactttaaaaaaatagaaaataaaagaaaaaaatccaggataatggaaatttagtcgaatagagaagtggtgtgattgagtgatgaagcaacagcagtaaccgtgattcgtagggcccacaaagccatgtctctgaactatgccacctattaaaagtatttagtacttatttcttttacttgtacgcattctcacgcgctcgagcctcctatttaattcgactcggtcctattgcatagactccatggatcccactcgagctttcgtcaattctgtcaagcgtgttgttgtcaaggtcccaccttgttttcattgtttcgtaattcataagtactattataattatcccgattgttatttacaacatgcatgcattctcttgtctattggatagagatggttctttatttgttatggaaaagatgtcacgtattttctagatgaaaaattgggcatggtttttgttccttatagtttgatggtattttttaatgttgtgtgatgtatgggtgactatatatatatatcaagatgttctatctcatctaagctgattaaatagaatatgtgaattattcctgtacctatctttaattttattgataaaaaaattatatgcatcatgtatgtatcgctgccatattgcattattttctgatgtaacgtaatgatacaaaaagggaaagaaagtttttaatctagactctagagggttttaaatggtacattaagttctaattagttcacccgagtattttactcgttttactctaacatttaccattctttgggtttctttttatttttgtgcatagtttacttcttttgcgttgttgtcgcattgattatatgttagtgatatttttctttggctgagtgatacatgctttatttataattctaattctacaattaacacatttgcttgttggatcatctttaatgaaggttggaacagctgttgttactcgaagtg

SEQ ID NO: 2710 - DNA, 1949 bp, Glycine max
  Intron number 2 from transcript Glyma08g06750.1 (locus Gly ma08g06750) derived from phytozome v7.0 (chr-ID Gm08; pos 4838189 to 4840137)
taatatacactaatccaatttccaacgcttacaaagtgagtaaactttaggtttcaactttgaacttaaactatacaagtttatatatattttgttgaacaaatatatgtagtagaaaaataagatagccgaggaattgattgcctaacatgttgattaatgttttctttatatcatcaatcacaaaataggtaattatgatatatatattaacattgttcatttggacagggacgacatactaattcaaccttgagcttgttgattgaagatacacttcctcgtgcatttcccggtgggactggaggagtgaaaaatataggcaattatgcaccagtaagtttatataaatagccacacgcactctaattcaaacatatatagtactttaaatcggtattaattaaggtacctagctacacaaattaactcaattaaatgatgaagttgagtgactaaattaacgcaggttttccaagtgacgaaagaagcaaaagccaaaggattttttgacgtcctcttcctagatgcagaggaacataaatatattgaagaggtatcttcgtgcaatgttttcatggtcaaggtaattaatattttgttactttgccaattttacaactttccttcaacatatattacatatgtatatatatgcttgttaatatgcatgcatggcacctcttcatattttagggtgacgtgatttcaacttcacctacactcggaactattcttcctggaataacaaggaatagcatcattcaacttgctcgtgatttgggttaccaggtaattattactgacattttaatatatatatatatatatatatatatatatatatatatatatatatatatatatatatatatatatatatatatatatatatatatatatatatatatatatatatatatatatatatatataaagtatcaaaaagaaaagaaaaaatccgctacacaattcatggtaaacacatttacgtacagcacgaaacattccccatgtttttcaattgtaaattaatgtatatcataaacatggtgtcattcaagttcatggtccaggaaatgtctcccaagaatttaaatgaaaataataaatactttaatgttaaaaacggtgttcaactaactagtatcatgcgtattacctagatatttatacaatataaatgaaatataaaatgtataaattggaaatattttttaaaaaaataattgtcaaaaactattttaataaatacaaacataaacagtaaggtcatttcaaacgtttggttttgaacattttaaatattagtttaattctagagaatattttaataaataaaaaaattgtaaacacctcattatatatgcttattgctaattaaacaatttgagaatttaaaaaacaaattagcaaaaaatattttaaataaataaataataaacataaaaaatattaatttgatatgaaaattcaaaacatgtcaaaaattttataaaaaaaatataataacataaaaatgaaaatatgtataaaatatatatttctctcaaatgaattcttgaatttgttatatagggatggattaatctaatttggaggcttgttaataaattttaatactattattgtaacaacacttacaaaaaaaattggccgttaattttgccaaggccgaggaacgcaaattttcggttgatgaatttctagaagctgatgaggttttctgtactggaactgctgttgggatctctgcggttggaagtgcaacctataagaatacaaggtacaatagaattcaaaatcttgattcgatcattaattttcgtagctttgtagtttgtaatattaatttatactttattacaattaataataaattactgctattaatagtgtaaaacaattgggtagtgcagggttgagttcaaaacaggagccgacactgt

SEQ ID NO: 2711 - DNA, 729 bp, Glycine max
  Intron number 13 from transcript Glyma11g19670.1 (locus Gl yma11g19670) derived from phytozome v7.0 (chr-ID Gm11; pos 16454157 to 16454885)
tgcatgtaagtgaccttaaggcttctcattcttcatggttgttagagtcatataatgttgatcgtgatttcttatgtagttcctttgagtctggtacatgtaaaatgcaatgtgatttcttgcctcctatgtctgcatggtgtctctaagatggtgatggtgttctggttatcaataagattttaatgtaataattttgttccataaattttaaacttgtttacttctgttgttctctctaggtgtttgttgggatgtctaacatgttcttatttgtagatctgttaattgggtgcttgtctaattaattttactagtagcagaagataatccaaattacattttttttaatgtttagatccagaaacatccacaatattattttgtttcacgatttaacatgttggctatgccatttgtgattctgttgattttctgttgtctactggaaaatggaaattgctctgttataattgtgtggaaaattaagaatgctttaatttgctgaaactattgcaaatgcaaaaactaaataattcatgactgggaataaattaatcaattaactgcatttttttctcggctttcaaaatttgtgatgcagaataattagctatgtaatcactaagttggtgtttgggcttgttgatatgccaagctatgcatctgacaatgtcttggataaatgattaaattagatttgttgttttttctttttaggcactaaaa

SEQ ID NO: 2712 - DNA, 3488 bp, Glycine max
  Intron number 1 from transcript Glyma13g17170.1 (locus Gly ma13g17170) derived from phytozome v7.0 (chr-ID Gm13; pos 20969636 to 20973123)
ctgttatacttggcattgatgtcagttttctatcttccccccttttttttatttttttcttcaactcaatgctaattttgtggtgtgtgtacgtgttttattatttattatttaattgtaatcatgaatgaatactgaggaaagtttttaaggtggtttggacacatacatataaagaagaaaagctagtgaagaaagtagaaggtatgatttgtagtcccatgaaactaaagagagagagagagattaaggaggacatcagagtaagttgttcagaggatctcacagtaaataatttctctgaaaaattggtctttaactgagtcgaatagcattgtgtggtctatctagccgatcttacctagtgggataaggccttttttagttgttgttgttgtaatcatggaggatatggttgttctttcttagtaacaattttgtggctcagtggaaagatggtacattttcctttcatgcgtaattgaaatggaaactaggcccccaggagagaaataacttttagtggaagaactaaatcgttcataaagtacagtgataaatacttctgtactgtttctgttttaaatgaaatggttttcttcatggactttgtttgtctgttccgtgtgtcaaacaaaagcagtcatatgctacttgcctttggataatttcagaaactaagaggggggcaaaccacccatagcaactaataaaatgtctttggataatgcaactattactgttatgaacttatgatatgttgaagcatgcctatagtagttagtctgaagtagtttcattcacacattaccgtaattataccatatatatctttctatgttggatatcttatcttcagagttgaagtcatagtgttctaacctgtttaatgttcggaaaggtaagtgaatgttgtatttgttagagtagaactgcagtatcaattataacatttcttcaaggctagttgattgtagtttggcactttggccattgtgactgcagttgtttcgcacaatttttctttctaaaatgatctctgactttattgagatgaaggaacgctctgggtgtgatatgcgatagaaaagtaccactcaagcttaaagggattttttatcacacaaccataagatctgtaatgttgtatgggactgagtgttggatagtaaagagtcaacaagaaattaaatgtcacaaagatgagaatgttacaatgattgagtggttacacgagacaggataggattaagaatacaatcattagaaagaaagctcatgtacctcctattatataaaaaaatggtagaattttgtctttgatggtttaagcatgcatagagaagacttgatgaaggagcaccaatgaagaacagagatttagaggtaaatggttattgttgttttacaatctatgtagctgaccctacctagtggaaaaaagctaagtatgttgctgtatttctgttttggtatgtaaatttcctttgtggtaggcatcaaggtagttgaatcaggatacagatcatgaattggaaaagctaatttccaaatcatgaattgctagattcatgacaaataataaaacataacaagcacacacacatttgcattttgaagttaaatagctaacaaagtgtcgtataagcttcaaaacaaacacttttgctgtataataacagccacaaggccaaaaaaaagtgtctgtcggctacacagccactgcaaagaggggaggggactaccaacaaagagcaactattattaggttgaacaggatgcatggttacacaagacaagataggattaagaatacaatcattagaaagaaagctcacatacctcctatcatataaaaaaatggtagaattttgtcttagattgtttaagcatgcatggagaagacttgaaggagcaccaacgaggaacaatgattgagtggttacataagcttcaaaacaaacactgttgctgtataataacagccacaaggccaaaaaaaagtggctgtctgctacacacccactgcaaagaggggaggggaccaccaacaaacagcaactaaacaatagcaaccaaccagcaatttaatgtgtccaggcaaacaaggggaccagaagcacaatccatgtagaaaaatcactccaccagctcaataataatagcaaccagctcttgttttcaggagacaggaccaccagcaccatcacttgtagttagaagacataggaacagaggaaatatctttgggaggaacagacgaaagtaaaaacgttaatgaagaatggactgatgaatgagaaatgctaaaatgtaaataaaaagtgaaaaccagcttgtgagccatagagggtctaacagtaggtgaaaaaccagcccattcccttcctattctgctattttttggaagactaaataaataaaatgttttcttagtgttttaaaagtcaggtcaagtatgacccaatccatttttggtgttcgacccgcttcgccaactgtggtgcatgtctcgtgcggttcatctggaaattgtgattcaagtgattcatgcccaaaaacgcaatgcaccatgatttgtatcaacagcaacttgaattgtatcatattcatatcacacatttcatatcacaaatcgtacgatactaactaccatgatgggcatatatttcaatttaatataatagttgtgatcaagcttggagcatgaagaataaaaaatactacataattctttaaactgctactgagagaccaatatggtaggattggcaaagagcaccaaggactgagttcttggtgatcaaattgattctatgaaataatagctaggtagggctgctgttcagactatatgctgttgtacaaaatgatatttcctaattgagctttaaagagtagaatattgcttgatttatctttttgacaaaagttattgtacctagatcataacaaactttgatgttgtccaaagtcaattttctggcttgctgaatttctttataccagccagatttctgtataatgtataacctttggaaacatgatatccatcatagaatattccggaagctaatgtacatctacattgtgcacttggcactgagtgggagaatttggacaattagacttaatatctatgactctagttaattatcactggattatgtattctgctaagagtatggctagcaacacactctctactattggtctaaatttattggaaactgcaaaatcgtgtatgaagtttgttgaatgagaagtgagacccataaattattgtcattttcaataaattccaaccaataataaaaagtgtgatcaaaagagtatgttcaaaagtgtattgctagcatgtagctacttatatttgtaattttatctttctctttgatctatttctttcattacatatctcttccactctctcataagtaaacattttactgacactatatttgtcatcttacgtgatggctaacagg

SEQ ID NO: 2713 - DNA, 403 bp, Glycine max
  Intron number 1 from transcript Glyma18g51560.2 (locus Gly ma18g51560) derived from phytozome v7.0 (chr-ID Gm18; pos 60415591 to 60415993 reverse strand)
ttttggttgagagggtttccagcctcgagaaagaggttggttagttaattattgtagttttttttggttttaattttaagcgattcgttgtcgttttgctgttatactgtgacgtaggcgtgtggattaatttaatttttttttgtggtgtttcaagttttgatagcttttggttttgatttgaatttcttgggtttgtagtactacggtggaaattgagctattgctacggaagtgttttttctaaaaggattttgaattatgggatatattctgggttggtcatttgttaaatttgggaaatatcttctttttttttttggtttttgtatatttggtttgggcactgaaaattgaagcttgattctggggtggtatagcttgttatgttttgtttcacagg

SEQ ID NO: 2714 - DNA, 2590 bp, Glycine max
  Intron number 2 from transcript Glyma12g31790.1 (locus Gly ma12g31790) derived from phytozome v7.0 (chr-ID Gm12; pos 35339107 to 35341696 reverse strand)
taaacattaatatcaggaactcctaaattttcgaggtccagtttatatatatttaattataagattattttcagaaatttatttattcttttttatgagatttttttttaatttttagatataataattattgttttcctatatattcttatttaattattccttttctaaagattaatgagaaacaattagatggatagagataagaaaaggataattctgaaatgatagttaaaataattaacagattttatgtgattaactagattaattactttttttaagggacataaattaggtgaatgagttttgtaattaggaacgaagggagtacctgttggacaacttcacccaatattaattgattttaagatgaaattcaaaatgatatctgatcctataattcatcttgttaaatctcgcatattctaggaggcgtggcagggaaaagttgttaattaattacctgtgtcacccttttgcttgggaatgcttggttatgtgcatctttgagatagtcagatagcattgacgatgaaactaacaatgaagcagcatgttgactgcaaaccgacaagccgggctcttcctgcttagcctatttatgttttcaattaaaaccaatactaacctaagcacaatagccttgaaacatttccaaagcctatgcttgcttatcactaataaatttttaaattcttaatctctgtactgtcaaagcaattctagttccaattgaagattgttgcttcattatgatttgttgctgctttctcttgatctgacatcaaatcaaacatatgcttattccagtttctttatctgtatttgtgcaggacttagcaactcttcatttgaaggttggtttctggtttcctgaatgaactccagtgaaatatctctattggtgtactgtacatgagtaaacctttctttattatcataaacttctatatggctgaatttgaaacaaacttgaatgatgatgataggagctcaaataacgtagttaccctcacctaactagtaggctggcttgcttttctccttaggtagggtgaactatcaagatctgaaatcttatcttccttctctgtgtttttccttctataaaaattgattcattattggcctattttctttatgtcaatctatatatgatggattctgtagtatatattatagaatttttttttatgtcaatctagtactttaaagtgctaaaaacaatttagggcttagctagtgttgaaaaaatttgctttgaggcaacatataatctgttgtgttcaattaaaggtatgaacttgcttgcgttagatgttacttcatggtttgagtgcgatgtatcattttcaacattaataagaaatgaatcttttactatataagtgtctgcatggagtgaagcaaaactcatttaatatatgtttaataaatatttaatgtcattaattaattataatatttaatatcattaattaattaactttgtcatcatttattgaatataatatatttactacctatattaaatattcccttagtcccaaaataggtactgcaattgaaaaaaaaaagttatcccaaaataaatgacatcttaatttttcaatgcactagtaataactttttccaccaatattcttaataaatttcactttggtttcttaatgaaatactaatatattaatctcttcatctcattatatttattgtcttaggttgttttatacgaataaagaaaaatcaataaataaatgaaagagaacaacaattttacaaaattaattttatcatcattaattcaatttttattttgtagttcatatcattaatattataagggttataaatggaaaatattaagtaatgttatattgaaaaactaaaataacaattgtgtataaaattattattctttttcatctttttattaattttaattttcttgatttatgtaaaacaccttaagatgtgtgtgtgcacctgtgtgcgtgtgtgatcatatcaagaaatatttaaaaaaaaaattgcaaaatgatgagataagaaaaatatcataagatgactcgtttaaaaataaaataaaataaatattttaattttaagtctcaatgcaatactctcgaagctttaatattttacaaggaacaaaacaaaataacaactcttaaaaaaactaccgaacaaaatatataaaaaaaaaagttttataatttaatttgatttaaatttgatgttatatttaaatttaatcaaattagattgtatttttattttatgtttatttcgaaactttttttttgtctgaaaatcgaccacaccttaagccagaacccctacttttttagcgtataacagtaggcagtaggcactgtactgagttcacagcttcagcatggtttctctcagtctctcctcacaccaactgtcttcaaatcagcgtttcattcccatctccatcttcaattcccaccttaggtgcatttctctagactcctttctctccttttcttatttattttttctcataactggttttgaaggttcaggtacttttgctccgacccccaagaacaaccccaaa

SEQ ID NO: 2715 - DNA, 1703 bp, Glycine max
  Intron number 2 from transcript Glyma17g36880.3 (locus Gly ma17g36880) derived from phytozome v7.0 (chr-ID Gm17; pos 40810956 to 40812658 reverse strand)
gagggattcttcactatcttgagtccattgaagaggtaagttttctactagggtgtgttatgtttggtacctcttaagcatgattcttgacaaacaaaatcgatgcacctatgaaaacaataagaagagggactgctggagttttatttctcaaacatgataaactcagaattaccttaatgacattagagattaacttgttagtaatttgttgatttgatatttttttttcttttttcactatacctaggattctctgttaggagagaacagtgaattaagggaaattaccagttatagtaggtctcttcttttaacactacaaaacacatatggtgagtacttcatgtagttagataatttctagatctagatactggctagttcagtaagctcaattcttattttcagagtgttatgccttgaaaatcattgtttattcttttagcacatcaaccatcggcattttaattttgcataatgaaaatatgtcaattattatgacactctgctgccattgtcactgtctcactgttgctttagttcctaaggtttgatatttctggtaaggtcacaagaccggattgatttctttggggaagccatgagagtaggttgatgtttttcttttctcagtgcatgatttgaagcagaaagggaaaatctataagaaagatgatcaataatgggggatcagctacgatgactagagattatttgaaacatgcgccgaaaaaatgcatgacacgggagataggaacttggagagaaacatgcacaagtgttagggcatggtggagatgtcacaatggtaccaaagaacacgatcaatgaccactgaaaggaggacacagtagctggaaaattgtcaaatgcatagttgaagctaagatggagaaagaaatgatctaaattaaggacccaactggaagaaggctgaacttgcatgaaggaatcacatattggaagggagttaaagcaccaagagaagtcagatggttcacatggcatgagatgcaattaatttgaaattaaagtagaactccaaattttagggaatttggcaatttgatatattcgcaagagttaatgagcatgtaccgttagcgtaaatttttttacgctacaatagttaataaacttatcatacataataatttgtgattggatgagtgtgttagtgcatatattatttattgtattgtattcataaaacttacagtacttactctcatttatactaattataactataagtttaattaattaaggaaacacatcatgatatgatatgaaaatattgtaactaatcgtacaagataatgaagaaatagggaagctaatccttgagggtagtttaagatattataagatgtttttggatattgccatatattctaacagtaacagataccaaaagatgaaaatatagatgaaatttctaggattgtcttgttatggtttgttcaataagttagtgaatatttcttgggttttctttgtcacaactatttttcagcacttggttttgtttgcacatttattcatttctttgtgtattatataatcacattgtgatgtcaatctttgatgtttgtttatattggctaaagtaataactatcaacttaacagaatattttttttccactatctattgctgtcatcttgaaaacattttgaaactcattctgaattttatag

SEQ ID NO: 2716 - DNA, 3484 bp, Glycine max
  Intron number 3 from transcript Glyma17g20110.1 (locus Gly ma17g20110) derived from phytozome v7.0 (chr-ID Gm17; pos 18649554 to 18653037)
gtggtggtattaggggtgggtaagcgggtcggcctgccccgcataaggccctcccgccctacattcttacatgaaccaaataaattggtctgccctcgccccgcggacccgtgggtcaaacagacttgtccgcgggcctagttttaaaagaatttcaatttcaacgaaaatacaatacaatcaaattaagttcaacacaaatgtaaataaaatattaacaattagtcaattacatcaataaaataaataatgtcttaacaaaataaaatccaagcaataaatctaaaatatgaatgttaaacatctccaacaacaaatgattccatatttgaagtagtttgagccttctccatctccacatcttcatcttcttttcctaaaactcaaaataataataaatattagaataaactcaagttaaatgattaaaagacaaaaattattacacattatttaccttgcatatcaaatcccagtaaccaatttttagtacatatcaaggcttgcacgttgtcagcaaaaagcgtagttcgatatttgttaagcaaccgtgagccaatactaaatgttgattcggaagccaccattgtaatttggatgcttaaaatatcacaagccaataatgaaagatctggaaatcgagcttgattgtccttccaatattgcaaaacatcaagattgggatgatatttatttgaaagatttgcctcttccaaatatgtatctagttgagatttacccacttgcgacatatcttcatcttcaaattgtataaactcctacattaattccacaaaaataaaaagtagttagtcaaagtaaataagaataaatgattggcagttaaaaaaattaatagaaaccttgacttacatccataacatcaacttgagcaatactaatagtactagtagtagccatagtctcttgtgatgaaccttgacttaaaccaaaattgctttttgtttctttggaatacatttgaacatactcattatatagagtatacaacttgtgctccacaactttcaactttgcttgacaagatattggatcaagaccaagttttgaataacaatacttcagaagtttgattttaaagcgtggatctagaatgcacccaaaggaaagtacattgctataatcactccaatatttatcaaactttgttttcatatcaatttccattgttctaatcaactcatctttattactcaaattttgaagcaataaacattcaattttccacacttgcatgaaatacaaattagatgttgggtaagtggaaccagatgtcaactatgtgatttgaaaaaaaggacgcaaaaaatcacacattttgtgtactctctcccattcttcattagtaggacaacttgaatagctcctatcatcaaatgcaagactacaaaaaacatgtcgatatacaagggcactcttaagcatcagaaaagtagaattccacctagtaatgacatctaagtgcaaacccatctttaaaaactttcattctaccctctgatcccttaacatacttaatgctttctctaattttgtttatagcaagattggctactttcaaccccttttgaacaataaggtttaaaatgtgaacacaacatcggatatgaaaaaattcaccaccacttactacaccattagtatgcaaaagaattctttccttcaaatagtcttgcattttatcattggaagaagtattatctagagttaatgaaaaaaatttatgctcaatcccccattcttccaaaaaaccatatataactttagtcatctcacgccccaagtgtggaagaggaaaatgagaaaaattaagtattttactattcaacttccaatttgcatcaacataatctgcaattaatgaaatataacctgcagaagtacaagatgtccacacatcagatgtcaagcttattttgctagggactttagacaacatgcattttatttttttcttttcagaatcatacaaattgttcacattcatagtagcaacacgcctagagggtaccttcacatcaggatgcaaatattgtaataactctttaaaccttctatgttcaacaaaagagaatggaagatcatgctcaataatcatcatagatatcatctcatgtaccacactttgatctattttttttatttcttaatttcccagcatgatcgagaataatatttccaacatctctattagaatgcgtcttcaaatatacatcacatttccccatatgatgttgtaaggttgaagtcccattcttattgtcaccgcccacataatctttcaaacaatatttgaatttactcctcacttttccatcactatgcataacaggtttctcaaaaaaattccaaacatttgatgaataatttctagccctcttttttgacattttagactcaatatgttcatcttcatgaataacattttcatgcacatccacatcaatactctcattgtcattctcatcaacattaacttcaaaagaatccatatttaaaatttgaaataataaaattaagtgaactcaattctaaattcaaataaatcacacaaaaactcaattcatcatgtttataacttgtagatcaagagtttcgtggttcattcccttatcccatgattttatcatataataataattaaagaatcactactaatagagatacaaaatacaaattgtttccgcaatactatgtaaaatttccaattatataaatgaaaatatcactagtaatagagatacaaaagacaaagtgtttatccaccctgaattctaagagaacatattaaagaatcaactaagtataattcagttgatctctatgtaatattgtagaaatagaaaggaaataaataattgacaagtgaagtgtgatgggtgtagtaagtttgtgaagacaaaagtatctctgcaacaaaattgacaaagaaggcatagaattgaagaagaaagtacttgaaagaaaggaagtgtaatagtaggggcctacgtttgtattttgtatctctactagtgatattttacatagactgtgaacagctatacatgctcaatgatggaataaaattgaatgttattattctcattttgaagaaaattgattacactataatttattaaaagaagatattttgccatgaatcacaaatattaaaagcaggaaagtgaataggataggataacatcacaaacaacagagaaaggaagagaaaaaaaggaaaaaaggtgagtatgaaagcaatgaaccttgaaacggaaacaatgccaacaaagggaatgaagcaatgaagccaagggttaaaataaaaaaaaaaaaagaggtgtgagcaacggaccaacagttatagatttttcacatttttcttttattttaagagtacaacaacaatgaatcagacccaattttggaaaaaaaagccccaacaaaaataggataaaaacaaattctagagagagaagag

SEQ ID NO: 2717 - DNA, 2354 bp, Glycine max
  Intron number 3 from transcript Glyma17g14220.1 (locus Gly ma17g14220) derived from phytozome v7.0 (chr-ID Gm17; pos 10992815 to 10995168 reverse strand)
gtaaagttcaggtaagagtttacgtgttgattgcgtctctggcgcgtttaccaattcatacaatggcgtttccaaaaggagtatgtctgatgggcatgtttttaaattgtggttgtggtttctgtattgttgtgatccttgatattgtgaaaaatggtagaaaaatgtggttgtaaacttgtaattgcggatgtgatgttgtcatgtagaccctaaaagccttgacgtgttatggccgcaattgtggttgcggactgttttttaaaagctttagtcatggcaattgatttctgtaggaatgcaatcacatgtgatcaccttcaccctagtggagctctatacccattcagcgttatcgatgagggggatcagtagcttttgttgatcctgaagccctaatacattttgaaagctctatgcttgttctctgcaaagacaatgaagaaaaatggcaaaaagaagagagcatgggggtaatgtgtcaagatgacgatgtggtctttcgttttggttggagagaaaaaagaatagaaagtaattaataagaacttgctggagtagatgggaaacaattgagggtagcttcagaagggagtcaattagttgctagacttccttaaggtgacctgagccttcctagaggacagagtgcttcgtgtcatcgtgtgtagactcttagctttaaagtgacgagcaccaaattgtgtagactctagattatacagaacggaatggaaatgattttattagtcattaacgaaggcaatatcatggaaaatattctgatgattttttcatttataatatggttcatctttgaaaaataattagagtaaagatattttgttttggattagttagaataaaaaataaggattttctgtaccatttttttccatattaacaattattttgtttcatttttattgatgatgcctaaaattagaaggttagaaaatttcagtgatatcctttttgttccccttcctttcaatcactttgctaaaatgctttcttggggaacatatcactccatttgctttctttttatgagcagagacacttaaaataccttataaatgttttagctcataggcatatttgggtatatttaatacatttaatgatgttttcatgtttggatatgcaattatgtttatcgaatatcgatataattttttaatatgtttatgccgttctaaaaccttggattatagaccttgtcatgttgtgttgtgtcgtattcgatactgtcttatttcattgtcaatgtgggttctgcttgtgtcgtgaatcatttaaggtgtgtttgaatacacattgaatggccgttcaatgtaaaagcttcaaatttgtttatgccaatccaaaaccttctattatagaccttgtagtgttgtgctgtgttgtattctgtattgtcttgtttcattgtcaatgtgagttgtgcttgtgtcggtgaatcatttaaggtgtgtttgaatacacattgaatggccgttcaatgtaaaagcttcaaatttttacagttaagtttggtgcttgggaatgtgtgaaatcctgttcgacggaggccaaaacatttatacaaacacacactaaatgggttaattaagttttcggttctatcatatattgatatagctcacagacatgtcatgtagaaacttaatttgcttgcttgattgaatcttaaacactggttctgtagtccataaacctttgccctcaagggtgagtaaacgtcaagaacttgttcttgattgagctaaatttgggctgggttaagggcaataggttgggctgcgtatcaggaagaagattggttcatcctatatgcaatttgttgtcttccttcacccagattcagattcatcactgtgcagacaagctggctgattatgcttgttcattggggtgtgattacttgttctttgagcaacaaccttcattcttgaaggatttgctttttagtgatgcgatgggtgttagctttccttgtgttattcctgtttagtcttctttctttgggcttttagcccctttgaatatcaaaaaaaaaaaaaaaattgggctgggtagatgttgattgctcagtttccttttaagttagatatctagtgcatcacttctaccttaaacattttcctcaagaccaacttccccaagaaaaattggtttcaagttgatctctgcttaactgtttcacacgatcaaaatatgtctttttcttccattgcatccctgaaacttgttagttcaatttattctttctctcatgaacctgtatatcatgttactacgccaccaattaacctatgtctgggtctgattattatccatgtagatttggg

SEQ ID NO: 2718 - DNA, 4739 bp, Glycine max
  Intron number 1 from transcript Glyma17g15050.1 (locus Gly ma17g15050) derived from phytozome v7.0 (chr-ID Gm17; pos 11765068 to 11769806)
agggacatcgcatcgcacaccactctcaagcccaggtatgattcttttttcttcgtaatcttttttttcccagtttttttttttcatattttgctttttggctggaagactagctgggtttaggttttcttacgaatggaacatcacgtagttgaaatttacaatggaatttaggttatcgtgatgatattaattagggtctgtttggggctatcttgtacggggcaatcgcaatattaacatatttacatgtagctcttggtgcttgttgcttggtcatttcattctagtttaggttagtggggcctcgatatttattttgtacttatcaagatcgttgacttgtcttggttatgttaagtttacgggtcctaactcgtaaggtgcagtttctggaaactctgttgtactttgagatttttctgtttccaaattgttatattggttataatctatgcctgttgataagtttgttgctggatttttcattctggcaattgaatggaattgcaattttcaatatcaaaccctgttgaagtatgtcattccaatgatgagaaaaagtgttgccttttacctcccccttctgtaatcctgtatagttttacttgagatttgaatttttgtgtgtattctcacacgttcaatctactttccattgctcactattttatatatatatatatatatatatatatatagggtacaaaaaggagggagacagctatttacacagacacaatacagctgtctccataataaagctagctacaaatagctacaatacacaaaactttaacactccccctcaagctggagcatacaaatcatatgcatcaagcttggaacatatagactgaatcctagttcctcttaaggacttagttaaaatatctgttggctggtcattagaattgatgaactcagtgataatctccttggacaatagtttatctcgaatgaaataacaatcaatctctatgtgtttagtcctctcatgaaagactagatttgagacaatgtgaagagttgcctgattgtcacagtataacttcatctgcaccacttcacaaaatctcaactcttgtagaaattgtttaatctacataagttcgcatgtaaccttagccatagatcgatattcagcctctgcactggatcgaacaacaacaatttgtttcttgctcttccaagagataacatttcttccaataaaaacacaatatcttgaagtagatctcttgtctatgggacaaccagtccaatctgcatcacaatatccagagacttgagtgttacccttgtcttcatacaacaatccttgtcctggagccttctttacatatctaagaatacgcatgacagcattccaatgatcaacatgaggattttgcataaataggctaaccactccaacaacaaaagaaatatcaggtcttgtaatggtgagataaatgaattttcccacaagtctcctatatctctcggggttagggtaaactccactttgatctgccatgagcttcagatttggatccgtagggctatcaacaggcctacaattttgcatgcatgtttcctccagtatatcaagagcatactttctctgtgcaatcacaacaccatctcttgattgagccacctcaatacctagaaagtacttcaaatatcccaggtctttggtctggaaatggttgaatgagtgctcttttagctacgagatcttaatagcatcattttctgtaatcactatatcatcaaaatagaccattagataaagacactttccaggagatgtatgacaataaaaaacataatggtctgcttcactttgtttcagcccaaaaagttgcacaatatggctgaatttaccaaaccaagctcgaggagattgcttcaacccatagagagatcggtgtagcttgcacaccaggccatactccccctgagcaacaaatccaggaggttgctctagataaatttcctcctcaagatcaccatgaaggaaggcatttttaatgtcaagttgatggagaggccaatgacgcatggtagccatagcaggaaataggcgaacagtggtgattttagctacaggagagaaagtatcacaataatcaaggccatagatctgagtgtatcctttagctactaaccgtgccttaagccgatcaacctcaccactgggcccagccttaatagtatagacccatctacagccaacaattttcttgtcaggaggaagagagacaagttcccaagtaccattgttttcaagagcctgcatttcatcaatcatggcctatcgtcatccaagatgatcaagtgcctcatgaatattgttaggaactgtaagagaagacaatgagaaaacaaaagaatagtatgaaggagacaaccaatgataactcaagaaattataaataggatgagaattacgagtagattgagtacctttcctgagggcaataggccagtctgaatcagagttatgagaagaagtggaggaggaaggatccatggtttgaggatctgttggaggaggatcgaactaacttgccgtgtcctgcgttgatatgtaataagaggtggaggagcaacttcagctgaacttggtggatgagatgggattccactaacattgtggttggaattacccaatggactaggagatgggactggaagaacttgcagaagggaagaaggatagtctagtctatggagggcgagaagaaaaatgtgtcctaaaaaaaagtaacatcagcagaaatgtagtaccgtcttgtagttggagagtaacacttgtaatcctttttaagacgagaatatcccaaaaagacacatttaatggccttagcagaaagtttgtctaaaccaagagagagatcatggacaaaacaagtacaaccaaacaccctaggagatacgtgaaataatggatcatgaggaaaaataattgagtgaggaatttgattttggtggcagcgcgtggagcttctggtggtcggagggcggcgcgtggacttcacgcgccggatttggcgtgggttggtggcggcgcgtggaggcgtgtggctgatattctggccacgcgacttcttggggtgagtcgtgctcctcaaggcacacccaaccttgggttcatcggaagataaggttgccggagacggcggcggccggctgcggacaacgatcagaacggttacccgctctgataccaacttgagatttgaatttttgtgtgtattctcacacattcaatctactttccattttacactatatatatatatatatatatatatatatatatatatgtatatagggtacaaaaaggagggagataactgtttacactgacacaatacagctacaatacacaaaactttaacagtttttatcatggaaaattctctgtgttaaatctagtttattagttgttttcgagccaatattttttatgggtgaatgatcgtacatcatcaacatggaataggcatctcaattaattcatttagttattgtaatgatacatattcatcatatttatttatttaaatctgtaatctggctggatgcaaaatgttatcatttttctttcctccctccattgaagggataaggattgtgagcgacattatgttgttctcatactcagtaatgtgagcttcttgcactagtaaaagtgtctcaatctcctcaatgctaagagattcaaacttattatcaatgatagtgacaatggtttcatactcttctggttaccctttgaaaatgacatcccaattgctcttgaaccgagataggatcactgacagcgaaaaagaaaatgaacagtagccttgataagcagaaagtgagaaactcaatagtacaatatttaaggttggtattgtgcaactcagttcagagttgtcaagcttttgtgcaaatctgatctgggaagtggttgtggatttattctcacaactcctagggatgaacacaataccttatgacatgagtgaggatggatcttgaaagagaagattgaagccatgactaaaggagttgatcttgctgctccctaacatcatatgcttcattcactttgcctttatcagaataatctttccccgagaattgtgtaggaataatcagatttacatcaaagatatataatctgtgacctttgatccctggtatgatgtgttgctttcataaaaggaagttgtaattgttaaacttttcaaaaacttcatgagagaaaaagatagcagcagaagagttcatcaatggtgggagatcgttggaattgtttggatcaagaacaagatcttgataccatattggaaatttatgtttgagaaacttggaaaatgagagcaaggaataatttcagatcttattgattgattaaattgtgaggaaagatacttgtatatagagagtgaaagtgagggctattacaaggagttgccaactgtactaacagctgagactaattgggtggtggctgatatatgtatatccagtgtttcattgtaccccatgcttaaactttaaattaaattgtgtcctgacatgattgaaatgctttcatttccatattttgctatcattctctagtgaaatgattaagaagctacactgctatatacttcatattggtatgcagttttgcttatacaagtggtgtatttttccttgctaatacttgtagttctaccttgccaggaaggaagggcaggacacacagg

SEQ ID NO: 2719 - DNA, 1088 bp, Glycine max
  Intron number 7 from transcript Glyma17g10360.1 (locus Gly ma17g10360) derived from phytozome v7.0 (chr-ID Gm17; pos 7748374 to 7749461 reverse strand)
tttctgtaagttactaaagctggttgatctacgttcatcttaatgagttacttatcacttaaacacagaacaattaacatgtttgttgtaattgttggatggatggcttgattgaagttgggacattggtgttatagatttgtgatttagataatgaatcacttaataaatttaaaagtaaattacataatagtgttgttatgttggaaaacacaaaacaattctactttaattatgattagaaagcccaatcaatattctaagcaaactatgttaaggtacaaaacattatttttgttggaaatccaaattatgttttatccctgaattgcgaacatgttaggttaacaacttatttatcataatcaaattatatttcaaatgaaaacttgcatgattgaagttacccaagcttcttatttcttacgtattttcttgattttgtgtatttcattatttaatcttacaaagaaaaaagaacattgtgctgttagtaggttatcacaatccactttaggatacacatgcataaataagaaaatgaaaaaaaatatactgttagatatctgaaaattctgcaaggattttctttaatataataaattgctaaacaaatgctgttcttttttttcttttttcttttctgcttggtacttattggatttagcagttcttacacaaaggcaggcaaaatcctcctcaatcatgttgtgggtggttctcaaaattccaagacatctttgtagctttgttatgtaggtttcataatacctgattcaaaatgtttgagctaaacctttattgatctcacaagcaaacattataacttgtttgtagctaaacctttattgaattataattatactcactgcggtcaatgttatttagcagataaaactttatccagatgattggattcacccttatttttctttttcgttttctgtaagaacaaaaaacaaagaatcatgtacccctttccttgctcttattttctttacattaagctgtgtcacatgtgaatttaatcaattctttcatctgctcacacaggagaagcttttctcaagtaaaaacagaacagagac

SEQ ID NO: 2720 - DNA, 2464 bp, Glycine max
  Intron number 3 from transcript Glyma04g32860.1 (locus Gly ma04g32860) derived from phytozome v7.0 (chr-ID Gm04; pos 38033942 to 38036405)
catatcctaccttattcgataccggtaagtttcgggggcgaaactttttttttaggggggtggaattgtaacagccgtaactttaataagtaaataagaaaataataaattaatacataaataaataagaaaaaaaaaattattaggtcataaattcccactatataagccaaatgttaacctagagcagctttttggaaaacacattctgttcctttcttcttttctgacgcacaagaaccctaacagagcaatcagaggaggagctctagagagcaccagagacgccaccattgctaacagagaacatttaagcgactacctcaaggtaagggatgagttactcacgcttggggattagaatgaacatgtgtagggatccctagaggatcaatttttgggttattttggggtgtttatgaatttaattatgttttcatgtttaatcgcggattgagtgtgtttgatgaaccaattggtgttctgttgcgagtttgttgtagaattgatgtgttctgttgcgagtttgttgtaggattgatgtgtttctctgttaggtgtgtaccttaggaattagaattctttataattaacataaaaattgtgtggtggtgattttgtttataccagatatgttggcctttcaatcttgttcctgtgctaatgtatattgtgtccagataattatttttacaccgcagtgtatacgtgtacatatatattgatactgtttttttacaaactgtatattttatttcacgtgggtaatttcttgtcatggaattcataggtgtagggattgttggataattgaattggctaaaatcatttaaagaaattaactaaaattgtattcacattgtaattaggcattttcttgatgttgacaacttagttgaaatatatttaaaatataggtatacatgttgttcatagaaatcaatatgagtatatattttattgttatatataatttgtatttacttaataatatatttgatattattgtgattactttatattaatatatatttaatactttttatatgttatatgtgatatgtacgtttacgtatacgttaatatatatattttgttatatattttgaatataatatacttatatatatattttacgtgtattttatagttacttgtttataagccttgaagttaaatattgtatgttcttattattatgatacattgttatctaattgttgagtatattttgtaattagttagagtgtgaaatgttagactgtagacatgaaacatggttgtgaatgagtgtgtgattgatatttgtagagatattacttgtcatgtgagttatgagttatacagtaacctgaccagtgtgtaccttgagagaacttttatgcgcagtgttaaagaaaattgtaggattcctagttaggatcctgaagggttaaactatagcgcaatttgttaaatatgtttgaaatataagagtaaggtcgtgggtattatataactcataaacagtgtctgcgtgcaaataaaaaaataatattttaggggttggacctgaatcaggaaggtgaggcccaaacggattcttcggagtctaggccttgggggtaaagatactcggtttgagtgctcctttaagcccatgttgatcccatgtggttggggcattctcgcaaaacagagtaaccctgactggtcaccttatgatgttacttagtgagagtgaccgagtatacccattgtgtggtgtgctttgtcatgtactcctaagcgccccagtgttgtttttcactgacatggtaccacattgcatataggcttgagtcttagtgtaattgttgcataacgcttgtgtttgaatttcattgagttaacaattgtggttgatgttattttatggagtgtgtaaacttgaatgggtgtgaataatgtgtgcgattttgtgcagtaatgctatttatataaattcagctttaagtattatatgtttcacatgctctaatgttttattatatacgaatgtgataactcactcccggtgtgtgtttgtgtttgggctgattgccactttgtttcaagtgagccttcatatgatgagtcacatgctagagatggagagacttagtctgtgatagggattatgatttactgaatgatataattaagttatacttttcttctttagtttctttttattatttatttagagtgaacggccttgttttgagccgagataatcttatctcttattaaaaaaaatatatattctattatgttttcactaagtggatgtgaacctttacccttttgaattgatttaaattaaatgtgtttaaaaagaaaaattattaataaattttgcatttttttcttcttttattattatgtgtttataatcttttaaataaattttgtatgatttattttattagttagttacaattgtaagggtagagggtgtcacaag

SEQ ID NO: 2721 - DNA, 2951 bp, Glycine max
  Intron number 12 from transcript Glyma15g10870.1 (locus Gl yma15g10870) derived from phytozome v7.0 (chr-ID Gm15; pos 7908188 to 7911138 reverse strand)
attccgtcgatttcatattgtcacttcaagtgagtattattaaatccatgttaatatgctttcaattgattcattaaataatcaattgtccttctccttaattactattttttttatatcctatatacttttgtactatggatatgaaaaataaaaaattgtccaacacattagttaattgatcacctattgggatattggtaagagtactaaattgttcaagtaacaaagttataagttaagtcatttccacaataacttgtgcaatacttgggtaacaataataaattatgcataccatgaaggtttgagtatcaaagtaaccaaaataaagatagatgtagaaaattaaagagtttaaagtaagtaaagtggtttgagaattttgttgaacacttggcagacacagaaaaatgggttgtcactattggatgatattgtcgggatttaatcgttatacttttctaacatataattattaattacttctattaatttaagactatgttatcattaatccaaaaattattctaaccttaataccttaagcgaaaaaactttaatctcttgattccattatcaatcccttaactagtctaatcaagcaacttgcattaaaaataattttaatgatgaccaataacctttatgttatccctagatgtaatggttatcatttgtcttcttcaattcacaattcaattgaaatttccaaaacaattgaataaataggatcatccaattaggtgattgaattaagaacaagcaaaaagcacaaaaaaagaacaataaaaacctgtactaaataagaaaaataacaattacatagaagtagtagtctaattacattaaaccccaatgggaatgaatgcaactacccatacccatagaaattgcgtaaagaacaatcagagtaaagtctttaagcatagatgcctccacactatctttctctaacctttggaatgctttttgtatctttgagtgtatttgtttcacggattaaaagtgcattcccagaaatgtacacatgagaatgtaatatgctcatgtttgttataagtttttaaaaagtattctcaaattattgattccggtgaatatttataactttctttttaccatgatttcttatatttctatttttatgagtaatgagtaacttatattttcacgagaatatgagaagttattgtctaatatacatgtatccatggttatcaaactctcgagttaactcactaactcttacgagtccacttgtcctctgcgtgttgacttttgagtaaacttttttttagtagactctgggtaaactctataaattctaagtaaattcggtaaactctcgagtttactaccgagtcaacaagttagcaagttaaaaaaattagatcaaaatgtaagttattttttattgttttctgtttagcattcaacataccttcatttaggatgttattctcaaatacaaatttcttacatttaataatatcaaacttttattctctaataacatcaaatccttgatgagaatgatttaccactactctaacctctacaagttattatctagtagtgatgtattattactatacttggttatttaaatattttgaactttatgatttactattttgctttattatattattgaaatgtttaattagtatgttatttatagatattttattattatttttatatgaagtagactcttacgagtctacgagttgaatctatgaaattctcacaagtatgtgtaaactcttgagtttgataacctttcatgtatctttcatttttatttaaataatttgaaaatttaaaaattattccagagaatattgaaatgtaatctcacacacatatttaaaatactcaaaatactcagaaatgatatttctgtgttatatttctgggataacattcctaggaatgaaaaaaaaatccatgaaataaacgccccttaagatttgtaccctctttctaagttataggcctttcatatcatattagttacattagtttggtttgtttgagaagctcacttaaccaagtaaaatagggcttgcttaagcaagcacaacagaaattgaagccttcataaatgtggctcgcttaagctaggttaatgatttttttagggtccaaacgcaaggttcacttaatcgagtgagcatgacttgcttaggcaagttcagtgactcaagggaccttcaacttccatcattcaacgaacacgctcttatagctctccaaaaatgattagtgaaattccttcaaaacaaacaaaaaaaagtaaagataaaatggaaaaggtgtagaaactaaatttctaacttgaaaacaattttattctaaatttaactaaacaagatacgaacataattcaaaagcacaagacatatataataattccactaacaatataaaagaatatttattattgaaagtgagatagtctccacttacaccttttttctttaaaaaaatatgccatatcatcttacttcttttcaagttttattataaaaatcttaaattttttactattgaacttttatggttatgttaggattttccttttttacatttactttttttttactttaaatttattttttgactcctcaaattttagttgcatataatttcatcaaattaatttatttcaaatattcatttttcctacaaatcttatttacttatttcaaattagtaaataatagtataatatcttaagaataatttagtattttagtctattctttctaatgccatttttaagttcttttcatttaaagtttaaagttttaaattaagtatgcatatcattaaatgtaatttaaaatatttttaaatttaacaaaaaaactaccttctatttaatttggttgtatatgattcaattttgacacaacctcaattttgattactatagagtaaaa

SEQ ID NO: 2722 - DNA, 3296 bp, Glycine max
  Intron number 2 from transcript Glyma14g39520.1 (locus Gly ma14g39520) derived from phytozome v7.0 (chr-ID Gm14; pos 48597582 to 48600877)
ctgctagctaggtactttatgttaattgttaatgttttctctttggttggactaataaatatactttttgtctttttaccctctttaactttgtttttcaagttgctaaaataactcagcaaattgaccttctgatatctgttggaatttacatagtattattaatcagtaaactagtatgaaggagtattggagtcttactattctgggtaatcctttcttctatttatttattcttgcaaataacacattgtaattaattatttgatgtatataatcctaactatgcttgtgtagttcactcaatcaatttttttatgaaatctctaagttcttcaatctcttcaagttatcagagtgattttgctttttctgggtctctaggttcagctctttaatccaacaaaatcttggaaatcctttgtcaataagaataatattactagttgtatcaacaaatggtctcaccaaacaactctattgtggaagtactacttgtaattccatagcttgtctctctcattccatgttgattggatcttggattcaggtgctttcaatcacattattggtaattcttctcttttcataaatttgtcacccaccaaatctcctcattttttcacccttccatctttaacaattacgtctgttcttttattcctcaatttccttttaacttgatgttcattagtcaatttatttgtactctttacctgtcccattaccttttgagtttcttcatatacagggccagagtatgggacaaacagttggcatattctttgaatctcatggactctaatatcttcaatctccataacatcccatatttgctatttttgagttccctgatcatttctattgttgattgtttaggccattcaagtgtaaataaatttaaaaagtggtccccatttctaccttatacaatcttttgaatgtcagttttgtcatcttggcaaatgtgtgcaggcgactttccaaagaaaggacaatagttattcaaaatctccctttgatatttattcatttagatgttctagttgtgttagatctattcaaggtgacaagtatcttgtgactttcattgatgatttatgaagatgcggttggacatttacatggaagatttttatttactgtttgatattttacaaaaaaattgttttgaaattcatactcaatttaagtgcattatttgtatttttttcatgcaccaagggtatttattgaccaataattggtcattggtgacagattctttctgaggtttaaagattgttgaagtgggctttgcctgcctattccatacatggctaggacttgaactggttagcatgcttaagggacctaataagttatcaaatgtggtagacttttttggtacatttgtattttgtgcagtgacaatgcaaaatagtattgttctatcccgttcacttctttcatcaaatggtatgattcatcaatctaattgtcctcgttccccacaacaaggtattgtagaaggaaaacattgtggcctgcttaatagaatttgattcaaatagattcatagtcctagtggagagcatgaggataaaaaccataaaaactatcaagcttttgctacatcttttcatgatcatcattgatcaatgtaagcttgagctcatcaataatagattgtacgttgtttagaaagttagacatatcatgatctattatttggagcatagccattctttaaacagattcatgtagctgttgtatatcattggcaatttggcatagatattccaaactttcttctaaacgtcacaagtcttgtatgaataaggggagttataaggttgacttggtggttgaagggggaagggggagaggtcatgggtttgaatccctccactaacaaaatctaacatgttaacaactaacattttccgataaaaaaaggtgttaatggattgacataataaggaaaagagttaataattttcccgtttccattcttcccttagtggtggcaatattctttacatttatgcttagagaggttttgattgagaatctgtctctcaatagtggtgtaccagccaaataatttttgccattcaattttatagtggtggtggcagcgatctggtgggtcctgggtgaccctgaaaaggtgtaggagaaggaaataatttccttaacttttggaatcagccttaaatccaaacagaaagcacacagatctgagaaccacacaacaacagtaggccagaaaaacagagccaaacagtagcatcagcttaaaagtgaattaggctagaaatacccaagagcaaattgagcaaaactgatcatacaggggaagaagaggttgaggagactttggaaaccatgatagtaccactaccagtggcaaagagtgagttgaccctgaaggtggcatgtgaattaatgtgcctgataacaatagaagaagatgcaacatgtggcagcagccttctaatcagacccaacaatcaaactcacagtcaaggactgtgcacaagacagatcagccttaacagtggctaagccaaatctgaaaggatatcaaacttgtgctggactggattagagcatcagagctctgataccaactagagattgaaattgatgaatactaaatattttttactgacatgagcattgctctgtgatgcaaaacttgtgttttattcataggtgtatctatacaaatagaaacactaatctacaataactactaatctttcattctataaaaagtctcaactgagtgcttttgcaatattttgtttgtagtgggtaacaaacccaaaaaattatcatgcacaacggatggaagggacttgtaataactaataagcttgtaaccacatggcacttgaaatctcttcagaaaaaataaatgaaaaaatgatttttttttaaatgaatttatgcaaattagctttgctctttttacatgatatagtttttttttttttgcttaaaatctgcagatgcaataattttgaatagcagtttatgtttgaaaagtttaagagcctgacccctctatctccattcagttttttgcattttcatttcagttcctcttaacaaataaaatttcctgtttggttcaaacattttataactaaacgaccaagtttattaatggaaatttggaatataatatttttgccattgtgaagaaccatattgaaaacattttgtttgaagcttccaggatagaacttctttaacatagttaaaatcatctatttgttattgcaggaagcttccaggattgtcaa

SEQ ID NO: 2723 - DNA, 1072 bp, Glycine max
  Intron number 11 from transcript Glyma03g32420.1 (locus Gl yma03g32420) derived from phytozome v7.0 (chr-ID Gm03; pos 40174608 to 40175679)
gaggccaaacagtgtcggtgcagctcggggaggaagtaatgttttacttctttttatctcttactctttcaaaagttttagcttctcaagttctgtgggttttacctaatggttaataagaaatcttttggaaggtgtttgttgcttgctgcaattgctggtgttggagtgcacctaacaaacaattgtgcaataaaattagggatcagagtgatggctgtacatgctagggcatctgttgttgtggcagaacttggtattttgtactgaaatgcccatgtatatctattaggtattaggttaaaccctaaagtattaagttctaaatgacatggcaatatgatgaaagagggatccaataggtcattggaggagtgatggggccaacatggaaatgaattgaagataatatggttataatcacaaggcataaattctgcaactctcccataagcctcacttctatgtgagttttatttaactacgttttagattagcacaatcatcatatatgtaagtgccactatccaaataaggatatgcaatccttttaatagtacattttttattggtactacagttttaactcagggtggatgaccaaaataatactttagtagtattcaaaatttaatgttaagagttactcaagtgcattaaaaatgaaatggtctgatcggttttgttatgggatgggattcttttggcctttcttgtattctgtggctctatgccttttctttttatttaagggagcttacaaggtagattacaaagagactttattgtgggctagttcgttttgtagtttgtacatgttccactcttgcttttgtataagaaaatagtatagttatcatcctctctgtacttgttctgcttgttcccttttaataaaacatattctgtgtagtatataaataaatttatttggaattggtgatacttttagtattttttctttttgttttctgttaaaaatagaaaatgatttttgtaatattgacatccatttccttttatttttgggtgatcaggaaggggaagaggcagaggcagttatcaagcagat

SEQ ID NO: 2724 - DNA, 3380 bp, Glycine max
  Intron number 2 from transcript Glyma05g34730.1 (locus Gly ma05g34730) derived from phytozome v7.0 (chr-ID Gm05; pos 38960043 to 38963422 reverse strand)
gcgaaggaagaggagcaggtaaaagtttatttaatagctcttaccttgtatcccacttggactcatgcaatgagataaatatcatgtgatgatatttcctctctaaaagatagaattattattattgcttaacagaaattcataaagacgaagagaatataattacaaagagtttggagagtaaagaatccttcatattgcaaaaaacaattgctaatattaactattggaagtgccagagaggctattatacgttgcaaccgtataactataaaaactatattaattttttatgtttactaattgatttatcattcatgctttgcttacttgatgggttaagtattcttgtggagtacttttaatgcaaccatatgggctttgtctagtgattcaactagagaagtaatcattagtatgtcctagaatgaccaattaagtcgattagggttttttatgctagaagttattgttttatctaaattggtaaattattattgaagcatgcaacgtggtatttaatgttttcctatattatcaatacttgctatattgaacttttgaagccattgctttttgccatttccccccatccatcaaagtctaaagaaggaatcttgatagttaaattgttcaggatcataagattgcatcagttgttgaggatataatgaatggatagttagatgttgcgaaatgtttgttgaacattattggattatacaagtaaccctaattaataaaacaaaagctttttgtttaatttatcatagaagaaactttattataaacatgaatggaagagtatataaaatgatctggcattctaagaaccagtgcctcaggcatactttttgtggatgatactgtcctggttgatgagtttcatttacatagaaaggctttggaactgaagagtttttcctggcacaagataggagtaaggtagagttatggttaacaagttcaacaagactggggttagcagtgtgctggaggttaaaacttggatcacatcttaccatgaatttgtgctggttaggtattttggattcttcctacaaagtgatggggatattgaaaataaatgtatggtaaatctttgtgaaatttatataaatttcaattttagcaaaaagagagtagaaaaaaatatgaaactttgatttatataaaaactgattactatgaaattaagttttagtgggacttcttttgaactagttttgacttgaaaagccctcgaataagaactagtttgttacaattgagtgccaaacaaacacataatatatctgaactggtcttattgtatctagttatcttatctgttttttggtagttggcaaacacctcctttattgagctcgaaaaacaaatcaaaatgcagccttccaatttgtcctgattatcatagtggtcattctaacgagagtacaagactctttgctgatctttataaagatgcctagaaggcaagtcaatcttttatatggattggtggaaatttatctttatgatagctaaagaaggaagaaaaggggcctgtttgtataagcttttttatttttatttaaaaaaacacttttttttagtaaaataagcagttttctgtttttttgatgtatttgtcaagactatttttcttaaaaaaagttttttgctttttttaagaagtaaatcctatctgcttcttaaataaacattttttttataatcatttttttaaatttaaagtaattggcccaaaagctgcctactttttttttcaggatggggtgaggggggaggaaattgagatattatttgaaagaacaaaaataattacaagtaggggtagcatatgacacctctataagtcactaaaaataaaaaaataaaaaaattcttcccacttaacaatgcacatccagatccttttatgatccctgttagacaatattgtacatcagatccagaattccagatcactgaattaattatgattcttgtaagaagattatcatagatgatcttaatcgacatgtcaattttgggttatatactttgatctggttttgtgtccactttaacttcttatgtcctttggatcttatctgtaacacttgacttacagatcttatcatgagatttaataatttctaggacatttatggcttacgaaggatttcttttctccttttctgctcttatgaaaaattatccaaaacattcaactatttctgttcccagccaaacaagataacttctttggacttaccttgctttttgacatggccttgggaggtgggggtgggggttgtcttattaaatagtctgccaaatgaaaatgatagctgcatgcaatttttgtgctcagggtgccattgccccacttgcattaaacatattcaaatcagcgttttaaatcctggattgcggcatgtagtggcctgccctaaacacaatgttgtgggatagcagatagcagctagtagatagccgctattggattttttttatatagtttacatcatgtatactatatacctataagttctcaaaaatgataaaaattaatgacattcataattatcaataaaaagtcatagatgtctttaaaaaaacataaaagtttcctagatagaaatcatcagtcaccatctaaatccaagtctactttttatcattttcacttttttactactatcattaatgtgatattagtaaatatattattattgctacacttatcacctttggaagtttcttttgaaattgagtatttcaaatatcacgttaatcaatcacacattgtttcttgaaaagttattattattattattgttattatcaacttattaattgttttatgggtactgaatattaccttattactttatctataattttgtttactgttaaaatttcagccttgtaaggaaatgagtactttgtataaaaattcctgctaaaaaattgaactcaagaaagcattacaaatccgattgcatttagaatttatgacatggagtaaattgtttattattgtgacgggttaatggtttaacatgtacatggaagcttttcttttatgatgtaatttcctgtgattaattaatggggttcatatgtactgaggagcttttttattaatgggttggtatactagctaggtaacatataatcaagttccactgctagttctctttaaggaagtttgtacaatactgaaatctgtttataagctggtgtcccaaaggaggattcttggggtatcattttgttatggccaatttaaatggatacataatcttatttgctcagggatgtttctgactttttttgtttgtcgagtgatatcaggtatttcctctgcttattgagaagttttctcttga

SEQ ID NO: 2725 - DNA, 2480 bp, Glycine max
  Intron number 23 from transcript Glyma10g42960.1 (locus Gl yma10g42960) derived from phytozome v7.0 (chr-ID Gm10; pos 49811571 to 49814050)
ctgggcaattggagaattagcagttaaggtatgcaatttttaatgctgctttctgataaaatgatagaaatgtatggaaactagaaactaattgacattgatggatattgtcataattaagaattaggataacttcagtttaaaaagttgtgttagacagtagtgaatactgtgattgttaaacggccatccatatgctaaaaatgatgtatatgtggtagagagaccgcgtaaaattcagctagtctttctgctcacaatgaaggtagtcatcactgattttgccattgtctcggtcatctttagtggttttgaatctctggattgaccacaaagtgatgaagatagcatcccttgatatcagcttcaacttgctgtttcagatgagaattttctcatccaatcaaacggaaactgagtgccattctggaaactgggaatgatgtttgaacagatgaagttggaaggtgaggatcacctgcaatggggaaaggactgaatggtgaggcaatagttcgggtcaaattccagctctagataccatattataatctttgattggaagagaaaatgagagtaggaagatatcagagtggatctgttaatctatatattttcattactgaatgaactctgttaatagcttttactatttacagactcgagctgaggcaactgtcccaattgaaccccgttacagagttaggctgaattgattctgttattagtaatggaaactaacttctactaactatgccttgctgagacttggcttcgtaacttagagaaggattttgagacaagttttaaccactggtcgaccaatctccgattaggttttatgcgttagagtaggagtatcatgttacagtttttgttcaaattatgtaattctgatttcaggcttgggttcctatcaagactgcagcaagtctgatctggaacctagtgcttgacatcattaattgtaagcttagtacctctggtactcatctaatactaattctacttttgctgagcaaaaataaaaaataaaaaaaatgccttgctgagacaaatgaaatcaggctataactaacaagtaacaaccttggttatcaaatccagatttgaattgtgatgaatcagaaggcgtattttctgaattgtgaattgaacaattctgtgaatagctctgtatggctatagaattgaaacataaaattcaaatagatcaatattctgctcatatcaatcacaataacaaaaagtgactgctcaaattcagctgtatagctacttaaaaaataaaaataaaatgtctagaaattaatttattgttttaaaaatattaactgtctaaatattttttttatgaaatattataataatcataagtattaaatcctttttttaattaaaaacctttaactaccatactcaatgtctgacccaagtgcatctggctggtccaatcaattgaagtgcatgtttggaaaagattttataatgcacgtatgattctctctcaccacgtctgacgcagaagcaacattcaagagcttctatgtttctttataattgatgtaaaaatgagcaagatgtggatcatagacatgtgtccaaacactgcaaatcatggcccattatagtgtactctcatcttcattcaagcatgcttaccactaccagtgcttgttttgtttgcgtggtgactgatgtattgtatagttcaggttttgggccttattgatcttttgttttaagctagacgctgttatattgggtctttggatggtatgatgttgttgacaaccatgcccttcatcttaaagcttcagcattgtaactctagcttgctgtgccgtgttctgttcggtttctattgtcattgtgtcacttgccctcctatcttataaaaaaaatgctaaaaagatgtaaaatactaaaattatgttttacagtaggggcagataaaaccgtcccacaaacactcctaattgagatacttagggtaggttcttgacagataattttgtagatatgctaataatatattattacagctttatatattgattcattgatgcttttgtttgatgtcttccacattaaattttgaacacatgtttttaaatcttaatttcacaaactccagagttgaaatcgagcagtctaattgaaggctttggatgttgcacaattcattttcttctccacctctgactgagtattggagtagattctgttgacaccgtctttgcagttttgctaaataatatccaacataacacctagtctgatatgtttgggtttgaagtttctttttcccacatgagtttgcttttcttgttgctgatattctgttattagtgtgaatatcttctgacattaactattccacgtcacattttattcatttttatataaaatcagtcattgtgaattatgaattttgaatttcaggttcatcaagaaatttctcctgttgttttaactgt

SEQ ID NO: 2726 - DNA, 4344 bp, Glycine max
  Intron number 1 from transcript Glyma15g28370.2 (locus Gly ma15g28370) derived from phytozome v7.0 (chr-ID Gm15; pos 31030680 to 31035023 reverse strand)
aacaactgctgttggggtttggtcaaagcttgaaggtttgtacatgaccaaatctttagttaatcgtctttacctaaagcagtctttgtattcgtttaaaatgcatgaagatagatcagtcggagaacaattggatttgtttaataaactgattctagatcttgaaaatatcgatgtcactattgatgatgaggatcaaactttgttattgttgtgctctttgcctaagagttactctcatttcaaagagactttattgtttggaagagactctgtttctcttgatgaagtgcaggctgctctgaattcaaaggaattgaatgaaagaaaggaaaagaagtcctctacaagtggtgaagggctgacagcaagaggcaagaccttcaagaaagatagtaaatttgataagaagaagcaaaagccagaaaaccagaagaatgttgaaggaaacatattcaaaatcagatgttatcactgtaaaaaagagggtcatacaaggaaagtttgtcctgaaaggtagaaaaatagtggcagtaacaataggaagaaggactcaggaaatgctgcaattgttcaagatgatggctatgaatctgcagaggcactgatggtgtctgaaaagaatccaaaaactaaatggataatggattcagggtgttcatgacatatgacaccaaacatatcatggtttgaacaattttctgatcaagtagatgggttagtactccttggagataacaagccttgcaaaattgaaggaattggatctataaggttcaagtttcatgatagggctgaaagaattctcacagaggttagatatgtacctgagttgaagaaaaaattaatctctcttggtgaatttgataaaagagggtatgtgttcaagggtgaaaaaggaatactgaatatagttaaagactccatggttgtcatgaggggaattatggaaaatggcctctattctgtagatggtgaagttgtaattggctttgcagccactgcaactggaagagttttatcaaaaactaagttatggcacatgaggttgggccatgtaagtgagaaggggttgattgaattggcaaaacaggaggtgctatgtggagacagaatggaaagattaaagttttgtgaacattgtgtctgtggcaaagcctgtagagccaaatttaatgctggacaacagagaacaaaaggtacccttgattatgttcatgctgatctttggggtcaaaccaagactccctctcattctggagcaaggtatttcttgagcattgtggatgactacaaaaggaagttgtggatctacatttagaaaacaaaagatgaggcttttgataacttcaaaagctggaaaacacttgtggaaaaccaaacaggcagaaagatcaagaggcttcatactgataatggtcttgagttctgttctgaacctttcaatgatttctgtaaagagaatggcattgcaaggcacaggacagttgcgggcacccctcaacaaaatggtttagctgaaagattcaacaggaccattttgaagagagtgagatgtatgccgctgagtgtaggattacccaagattttttgggctgaagcagcaatgacgactgtatatctcatcaacaagtgtccttcaacagctctaaactttaaaacccctgaggagatttggtctggccatccaccgagtctaaaacaactaaaggtatttggatgtgttgcctatgctcacatcaagcaagacaaattggaacctagagctgtcaagtgcatttttctaggatatcctgagggagtgaaagggtataagctgtggtgtttggaggctggttttaagaggtgtttagtgagtcgtgatgttgtctttaatgaagctgagatggcctacaagaccaagcccagcatggttcagtccagcactgatcaaagtaagaaaattgattctgaaaaattaaattttgaggtggagactgagaataaacatgctaaaacacaagctgttaattgacctcttgatgaagaaaaatctgaagaagaggaaaagctgactatgtgctggctcgagatagaatcagaagggaaatcaaacaacctaagaggtatggatatgctgatctaatagcatttgctttggtagctgccagtgaagttttggaggaagatccaaaaactgttaaagttgtcttagctagtaaggagaaagaaaaatgacttagtgccatgaatgaagagattaagtctctccatgacaaccatacatgggaattgattaaaaaaaaccacctggttctagagtggttctagagtggtcagctgcaaatggatcttcaagaagaaagaaggcatccaaggagttgaactaaacagatttaaagttagacttgttgctcgaggattccctcaaaaggagggaattgacttcaatgaagttttctctcctgtagtgaaacacaggtcaatcataattcttatgactatggtggcagaatttgatcttgtgttagaacaaatggatgtgatgacaacatttttgtatggaaagcttgatgaggtgatattgatgaaacaacccgaggggtttgaagtcaaaggtaaagaggattatgtttgcaaattaaacaaatccttgtatggtctaaagcagtcgcctagacaatggaataggagatttaatgaatttatggctcacatacagtttcatagaagtcactatgatgactgtgtttacttcaaatttccttctaaagctgagtttgtgatattgctattatatgttgatgatattttgatagcaagtaacagcaagagtgaggttgaaaaattgaaatctgagttaagcagggaatttgaaatgaaggatttgggagcatccaagagaatattaggaataaaaatcaaacgggacagaaaaaggaaattgttgtatctgtcctaggagttatatctcagaaaagttcttgaaaggtttggaatgtcaaattccaaacctgtaactactcttatgtcacagcaatttaagctcagtacaagtcaagcacctaagacatatgatgatataatttacatgaaagatattccatatgctaatgttgtagggtcactgatgtatgctatggtatggtatgtacttgccctgacatagctcatgcagtgagcttagtaagtaggttcatggcaaatccaggcaaagcacattggcaagccctgaaatggatactcagatatatcagaggatcacttggaagagttctggtttatggtggagctaggaatagcagacgaacaattgctattgaaggttttgtagattcggattatgttggctgtttagattcaaggaaatccctcacaggatttgtgttcacttctcttggcactgcaattagttggaaagctagccttcaaaaggtagtggttttatcaatcactgaagctgaatatactgctcttacagaagctgtaaaagaatctctgtggcttgaaggcattgcaaaggagctgaagatacaaaatgaagtgatcacaatacactgtgatagccaaagtgccattgatttatccaaaaattctgtgcatcatgagaggacaaagcacattgatattaaactgcattttgtcagagaagttattggtcaaggatcagttatagtcaagaagatttcaactgatcacaatccttctgatatgatcacaaaagttcttccaaacagcaagtttttccattgtttgaacttaattcagctgaagggtaattgaatcctgtttctgcagccactgtttttgttaatatttttgttaatgttttgttattgaaccaaggtggagaattgttgtatgttgattcattaacaacctttagttaggtctcttagactttaccaatttggtatttttctgttttctgttattctgttatagcatgtaacggttaagtagttttaagttggctagcttagttaggcttgaaatagtgcttctatttcttcttgcatagcctactataacagagttttttctgtaaccagaggaaaaaaaaaactgcagttttttgagtaaaagtggctgctgtgagttctgtgcagttttggttcatctgttttctgcatttttcttattcttgttcatacaagaaactcatttttttgtgaagtaaaatctgattttggcacaacaatagatttgttacatttcagatgagtgctttctccaagacatgtttctcaggtttagaacatgatgcaaccttattctgattatactaattcagtaatacaaaggaaatggtgataagttgtattctttgcagttctggacatcgattctgttggcacattcaca

SEQ ID NO: 2727 - DNA, 7770 bp, Glycine max
  Intron number 3 from transcript Glyma06g47920.1 (locus Gly ma06g47920) derived from phytozome v7.0 (chr-ID Gm06; pos 50302131 to 50309900)
tcgcttggagaattaagtatgacagatttttattaatggtttgttttcttatttgtttttttttttttttgcacagcaaaaatcgatatagaattttatatataatgaagtactaggtgtactgcatacaggataaagagtacaaggcaaaattgcctaacccatctgaaaattacaagataacattagctgaagccaaaaagaatcaacccctaagacaactcctccctcaaactagtggaccattgattaaaatgaatatggaaatctttgtccatacattttaaccaggcccatgaatggaataaagcttcatccatgacttatttgttaagtgtacctgtgattcatgttagttgatatttgatgctgcagttacgagtaattgggtaggttactgcactaatactttagttgacttttgaggtggttgagatactagctatctattaatctgttctataaaatacaggcatagctgttctcttgaactatagaatttacatagccttttccctattattaataacaccaagacacacatatactgctagacacttctgtatatgggatctctcaaagatcctttcatctttctacattttatttggatatgggaatcaggtgatcaaccctaacagttagggtttggatgtgttctccaaccacccatgtttggttgtgtcctatagctcacacattttgagaccttttatcctttgaagtttgattgattccaacattcagattgtctttcctcgatcaattggcctactcaacctttctgtcatctaccttttcatatacttctaccacatagctgtcctgtcatcgatgttggtgtgtgacacaatcttttgtgacaatctgttcagagctcctcagcttcttttttggttctgtctataaagctgccacatggttgtattgcagctctcagattaaccatttgcacttgtttttgcggctgatttggttatgtgacttctgttcacctcacctgcatattttgctgcctggtttatacttcgtatcctgcctataaattgttacttcatctttacttttacttaaatgtaactaaagatgattgaatggaaatcctcaagtgtgttctccacactcaggctctattatattagaaaacttagcttactcagtaagctgaagaaaggtaagtacaaaatacagagctctgaacagagcaggtatacaaaagactaaaataaaatgtaagctactactctaggtacatcatgacctattttccaacattccccctcaagctggagcatataaatcatatgcaccaagcttggaaataaaattgaatcctaggcccccttaatgacttagtcaaaatatctgcgagttgatcattagagccaattttttctgtactaatttccttagccattagctcctctcgaacaaagtagtagtccacttctatgtgcttggttctttcatggaatataggattagaggcaatatgaagtgcttcctgattatcacaatagagctgcatctgcagaacttcacaaaacttaagttcttgaagaagttgcttgatccacataagttcacaagtagttgaggccatttctctatactcagcttctgcactagatcgagcgacaacattatgttttttgctcttccaagaaatcagatttcctcttatgaacacacaatatctagtagtagagcgcctgtctataggagaacctgcccagtcagcatcacaatagccagtgacatgggtgtttcccttatcttcatacaacaacccttgtcctggagcctttttaatgtacctgagaatttgagtgacaacattccaatgatcagtgtaaggattctgcataaattgactcattactccaactgcaaagagatgtcaggtctggtgattgtgagataaatgagtttcccaactagtctcctatacctctcaggatttgagaggggttcaccctgttctgccatccacttttgatttggatccatgggactgtcaatggggcctacatccactcatgtcagtctcattcagaatatccaaagcgtacttcatttgagaaataacaatgccttcgtttgattgagctacctctataccaaggaagtattttagacatccaaggtctttggtttgataatggttgaatagatgttttttcagatgagaaattgcagcagcatcatttcttgtgataactatgtcatcaacatagacgatcaaataaatacactttcctagtgaggtgtgaccatagaagactgaatgatctgcttcactacgttttaatccaaatgcctatataatttgactaaatttcccaaaccaagcacgtgacgattgtttgaggccataaagagatcttcgcagtttacaaactaacccgcattctccttgagcaacaaatccaagaggttgctccatgtatatatctcttcttctaggtcactatgtagaaaaacatttttgatgtccaattgatggagagaccaatgacgaatgacaaccatagcaagaaataaacggatagtagtgagtttgttgactagagaaaaggtatcaccgtaatcaagaccatatatctaagtgtatccttttgccaccaatcgagccttaaggcgatcaacttcaccattaggcctaaccttaatagcatacacccatctacaattgactgtctgcttcccaggaggtaggggaactaactcccatgtaccactgctttcaagagcctgcatctcaacaaccgtggcttgtcgccacccagggtgatcaagtgcttcatgaatatatttaggaatggtgagaggtgatatggatgaaataaaggaaaaataaggagataaccggtgataactcaaaaaattaaaaataggatgagaatttttggtagatctaatacctttcctaagggcaattggccacccagagtcatctttaactggaaccgtggtatgagtcgttcaaggtgacagacatgaagcagaggactctccttgtgacataggactagatagctatctgtgactcatgctggtcaacactgggaggagatcgagtagggctgattggataggtggcttgacttgtgtccatgctagggatttcatggactggtgacactaatggagtaagagatggaacatgcaagacttgttggacagaattgaaatcctgcattgaagaagagaaaaagggagtttcttcaaacacttttgattgaagctgcatagtacaatcaaaatgacgacttctgctgcctccttttccagcaggacaagaggacttattttttccctatctaagagaagcaaatgcttggtacttgatagaacattatggcggaagttgatccatgtagccgaccccacctagtgggataaggcgttgttgttgttgtaagagaagcaaatgcttagggtaaatctatcctagatttttctgttgattatgattttatactagacaacacctgttttaggaagagggaggaccatcttatctcccacaaaagtggggtggtatgctcgcaaattgatttcttatttatgaggaaatcaggcagaaaactttgcatggatttcaaagtgatacatggggagagattgactacccaacacagagttaggtcatggatgtaagagttgagaagagagtaaggaaaagccaagataggatttcaaggatcaagtggtcacaaggcaaaaaattaggaagtttcaatgaaaagttcttgaggaagggtgtgggaagtgaaaatatgttggacaaatggatgaagggattaggaaggtagcaaaacagattgttgatgacttaagaggttggggacctaagggtaaataatcttgttggagaaatggaagtttgcaaaagaaagttaaggttcaaaaagaatgttataaagtgtgggtttgtgtaagaatattgaaaaatgggaaaaatatgtggtcactatgaaagatgtcaagaaggtggtggatgaggagagagctacaacttttgatgggcactaaagatggagaaagaactatttacgagcttgctataagtagggaaatatagtcatgatactttgataaagtaaaatgcattgagaatgaaggtaaagtcttggttacaaaatgatatatataattgaaggatggaaaattactttcacaagctagttaatgaagaaagaatcttttgcattcaaataggctaaacacaagggatgaggaccaaatttataacttttttcttagaatttgagagcttgaggttaaagaagcattgtagaggatgacaaataacaaagcagttggagcggatcattgaggtatagaagggtctaggagcgaaaagtattagttggcttgcaaaattgtttaacaagattacgaggtcttagaaaattctgtacaaggggataaagccgatgaatcatactatgaagttataggtaagggaaattgagcaaagattaagatgtctcttctgttactaaaattcaatttgattttttgccaaggagagaggttggggtttgattcccgagaaaacctagttgggagggtctaaccttttgccttttgtaccccggaagagattaggccttacaccagtagagaacattccttgtgaaagcaacaacaacaaaaaaagctttataagttcttattaggaactatcttttgtaatgtgggaattgagttttttccaatacatcctcctcacacccaacactattgggcttggtgcatgaataataataatataatatggtaggtggtccaataatagatctaggataaactttaataccatcttagactttgggtctaactcattcctacgaaaccgttttgtaaggtgaggggtacctaagctttataaactcttatcaggtattatctctagtcaaagtgggacttggtttggcttttcccaatattgggattatagtattttttatatttatcaatgattattcttgttgcacaaggttatcatatatgaaaatatatcactgctttctatatttgaatccttttgtactttcacaattaattttgtacctctagatatcttctattttttttatatggcccaggagtaattttctggtttgcttacaactttatggcctcatagggcatacttcatcaatcttcatgcaattcatgcaatcacaaccctcggaaaaatggcatcgtaacgcgtaaagaccattagttaaaagaatgcttatattttggttcttcacaataatgtccttttgaggttttatggtgatgcagttctcatattttacttaattgcttaccccctttggttttactaaaccagattaccccttcttttcccctttgtgggcttagcttcaccttgcatgtgctttgttcttgatcttgatctaggacaagacaaactttgtgccaattctcacaaaggatattgatgtttttctccaggaacaaactgttaccttaccatatcaaattttaccttctttgagagttctactgagcattcctttgtgtatgaggttcttcatgttcctttgactggttcttctgcagagtttaggtttattgttgttgctcgcatcctaatcctcttgccagacctctggaagcacctgctgactctctttctccaattcccttaccttgcacaatcccatctataataaccagtctttctgtttccttttgaaaagttatttgctccaatcccagtctgcattgcatgtatgaatttgagtcactgattctattttaacccaattatacttttggcacatcttttcatcctgcctatattccaaagattactgataaggtttcatgccattgtgggttgcaaaaacaatggtgcatttgatgaaatgattaccttacattctagtggcacttggtggctggttcttttatcttttacatttggttgtttctgtgcatacacagttaaagttggtcaagtggccagattgattggctcaatgcaaagtttgttgttaattgctagacaaagatgcatgagctgggttatagtgataccttttgacctatggagttataaatgtctttcttcgcagagagcttgctagagaggtttatatggagaaaacactataaggtgtttggattagtgtgctgcctgcataatgctccttgtattttgaggcaacctttgctgtcatggtttgggagatttaacatagttatttaacagtttgagatgattcatggtgacgaagatccctctattttctattatcattcctcactattccacgtgcatacagttggttgtctatgcgggtgatgttgtcataatgtcataactgattgtgataaggaaaatatctgccaactgcaaagcacattttttacccatgattctgggtattgaagtgtttcaatattactggtgttgcaatctcgtctcatgtagaaaatatggactaggtgtactggaggatactgaaatgacaaactgctgacctgtttttgcacttgtggatccaaatgtcaagttgaactagctcactatcatgtgatcagatatttcctttgttgtgagcttggtcagtttttttcaacagactccatgtgacagcaattggaaagatgtgattctcattaaagctaccaagagaagaatttatacatgacaatatttggacatgcctgagaatgggtttcacatatgcagatattgccagatctccttcaaatagatatttgactttagggtactttggaggcaatcttgtatcttgaaaaagtatgaatcggggtattattgccttgtcaaatgcagaagcaatggcaacatgtcaactcttttgtctaaaactattgatatttgacaaactgataatcaagtagccttacatgcttgttccaatttaaactattttctgtgaggaccaaccaaacaaaaaggaggtaggttttccttttcatgaaagaaattttgtcactgtatttttacttttttgtcacttaaatgactaataagatatcttatcagtcttttcgtgatccttggattatctacatttataacaagttttttgcatatgatttttatgctcctacttgagggaaatgttgagatgataatcaatctaaaaaatcatcgtttccctaaagatttatatatatattaactgagtcgtttgtgtggcaaagctatgatggccatgtattgaagctttgcctgtttagttgttggcacttcgttatgatctcgaaagggagagaaacaaaaggaggaaaagggggaggatgtatggtcaatgaagcctgcattttttaagggttactttctttcatgtatgtatatttgtaacaaagctttagtttactgaggattcttttttttttctttccctatcttagccctatcctataacttcaacatttatattgggaaggatgttttagactgaatttagcaagtggatcatataaacatctctgctgcatgttctttgtgagggaggtagggcgtagtatggatacattaaaagttaaaacatagcttgcgttgacccatgcctgaatatatgattcacggtttgttgcttaaagcatgataagaatccagaattgaaatataattgattattgcaacttttatgagatgtaaatattaatttgtagattttataaaacaatgataaaatatttgtgtgcagatttcacatttcctatgtatctaaactgattgctctgtgtaggctttttgcggcc

SEQ ID NO: 2728 - DNA, 790 bp, Glycine max
  Intron number 3 from transcript Glyma09g30770.1 (locus Gly ma09g30770) derived from phytozome v7.0 (chr-ID Gm09; pos 37548597 to 37549386)
tgtccaaagtgagttattttcgctcatggaatcatattctctgtgtgtgtagtaagtagtaacttctgcatgtgaattcgtgaaatctcagtttttgcattttcacataaaatttgaaagggattgttaaagcagaagtaaaatttctccatccacctggcattttacttccaaaatcaagcaagtgatctgtcaatgtcatctattgattctctgcaacttttactaggttaatagcaaccagatattatagatttaaagtatcttaaaacatgcagtaagaattatactttattcctgcataataaaatttatattcggtttgtttgtttttaatgttagtattctttcagaagtatttttggctagtagatgagtagatttgttttataattgtatcccttttgtcagtcatacaagtttgtttttatcttttcttttgccggtgagatagtttttagtgatagtactcatttagaagaattgttgaccagtgggatgggagtatttgttttatttatacccattttgtgaatgattcaagtttattttctgagtaatagtttttagtgatggtattcaattcaaagtatttttggctggtggatgattggattgattttacatcccttttgttagtagtacacttcttcctcatcatgaatattgatgatttagcttttcacaattgttcgtgttagtggaaatgttccatgtcatttgaatcttaaattagatcttggctatttaataattcactggcaagagttttacccaaaatttcttgcag

SEQ ID NO: 2729 - DNA, 1102 bp, Glycine max
  Intron number 3 from transcript Glyma02g09030.2 (locus Gly ma02g09030) derived from phytozome v7.0 (chr-ID Gm02; pos 6988714 to 6989815 reverse strand)
tctgacataccacctattcctttgtcttagtcctggtaagcacagtttttttgacacccacatgagttgttgcctttttcgtgattgatttgaatttattttttatgtaatttaatagctgatggcatgtaatgtatgatctgatttacttatttccataattacctaatctgatttgtcattcaatgtggaagattttgtgctcccttgatttgttattttacttaatagcacatgacccttcatgtacttttggggaaatggagagctcaatggtattatcttatgcttgaaaactttattctcattcaagatttgtgaaccaaccaaatctgtttttcaatctaaggttagctcatcctgcaaactttggtggcatcattctagattacaagatcacgagattattagtttattaatgtaaatgttgatgaatgcaaatctactaaaaatatatgattttgtgcccccacaaactagatcttgccaagactttccttgtcatactgataattttttattctatttcatctaaactgaattattgtttgtacaattgagctacctagagattgttttctacactttacaatggccaagttctttgctatggcctacttctctatttactttgttcatttattaaaattagcaagctatgggattgcaagtttaagccccttcttacttcctacttacaagctgttttatcttcctttttaactacattaagacagtaataagtgttaacatgctgattaagatgcttactcctttgtgcatgcttgagtcagctttgttgagttgaggttaactggaaaccaagaatcatgagcaaatagtttgtgatccttttttctatcctacttcaacaataaatagattaccttcttttttcttctaatttttagtgaattgatttaattatttactatattgactactaaaacaacacagttctattttttgaacctacaaattgcattgttgttaccttctatagcctataaatgtacattgagaatttttttggacttagttgtcattgtctctgggacatgttctgaattcatgactgttcatgcagcattgctagttgaaa

SEQ ID NO: 2730 - DNA, 1114 bp, Glycine max
  Intron number 4 from transcript Glyma09g31660.1 (locus Gly ma09g31660) derived from phytozome v7.0 (chr-ID Gm09; pos 38327828 to 38328941)
ggctccaaagttgctcctcgtaccagaatatcgaggtattataatataattactactttctactttttcttactttttttgttatttttctaattttttattactaaattattttcaagataaataaaaatttacgtttatgattcatgtttagataggtttactcatattttatcttgcagaatatatgatataatttttatattaactgcaatttttatttaacatgatttttcataattattttgttaatttattaaataattcattatataatattaaaatatttaattatttattatgatttgattttatttgtcttaatttaactattataattttatgttcaaatgagtaagctgtgaactaattcttttaccaattaatgtgtaaagctttattttggtttttgtgcaagtcttatctactttaatttttaacttaacaaaaactttaattataattggcatttaaaaataaatgaaactttataacattttactatcgggaattaatgataaagattaaattgaataatgcttacaatttcaaagactaattcacgtttactcatttgattaattacttttaatcatctcatttatatttagatttatatttagattgcatgtaaaaaaatatgtaccaaaaaaagattgcatgtaaaaaattacatggttgagatcacagcacaagcaagtaagaaaccgatctttaactcagattcacaacacgtgatattaaattaagagaaatgttattaacaccctctaacacattttttggacacattttttattattaattcaaatttattttaaaatacaaaattttcatttccagtttaataaattcctgttacaattttttgtagtttttaatatagatggaatttttcgttatgcaattttatccatgttcctagttgcagttggaaatgtattttcaagtatataactataattgtaacgttatcgaaaattttataataaatataggatctagtgtaaagtaaaactatactagtattttatttatcactaagtgtatagcattgtcatgtgtatgattaactaattaagacttcttttttgtgtgtgctatatagaatcag

SEQ ID NO: 2731 - DNA, 2533 bp, Glycine max
  Intron number 1 from transcript Glyma04g14470.1 (locus Gly ma04g14470) derived from phytozome v7.0 (chr-ID Gm04; pos 14552315 to 14554847)
ctcgcagtggcaaacctcaaacgacatagctagaggttagttaggtcttgtttgataacattgctcaatacgcattcatcaatcatcacttgcacaagaacactacacactacactacccgcttctgttcatctaatctgaatcatgatctctctgttgcttcgtttcatctcctcatatctacaaactctccctcattgtctggtcctcttcctgctccaaactgaaccgcaaaatttttgtttttttcactgagtaagtatctttcctacgcacttcgtttcatttttaatctcatttcgttccatttactaagcccacttgtgtttcgttgcttattaactctctgattagcattgtccctctgttgcgttcactgcgcaccgcgtgtttgattatttgcccaagtaaatgatagagaacatacggtatggtggaatatgtgcctgccttttggtttgttttgcgcatgcacctcgttgtcagggtttcgagatattggtctccaatagaagttttggatatgtttgcgaggtcaggatttgtcttgcgaggctgaagctgagtagtgagttcccattttatgttttgaattctggtattggtatttcttccaataagccctatgttgcacgggtatggggattgagtggtatgtcctaatattgaaattgcttttgattccttttgaaagcagattttgaatggtgttaatgtgttattccctatttggaaattggaagcatgtgacaagttagtgaacttctaaattagtttgaatagtatgaaagagtagctacagtgaatgttgaggctgagcttgaatagctctggactggagctccagttcccagtttagccttcattggtagcagattgaaggttgttgcctcaaggcttccgaacagcacgatttttcctctggaagtttcaaaattgttgcttgagagatggaggggtttgcttatcattgtcatgagttgaaaagtgaagtcccttttgatcatgaactcatgatgatggtatttcaggtacatactggaaataccacttaccacctccatccccagttaacactcaaccacttattggttgcttcagtctccactgttggagctgtcaatagagctccgtatgatgtttttatacattttagattttacactttatcattcttgtccttaggttctcatctaattcttaggtaaattttgtcatataaacgcttaagtcattatttgatacgtgtaaggttatagaattatgctagaaacatacatatctctacatgtcaaataatggctgaaaaatacatatacgacacgtcatacctttatccaagttaagaattattcgttctcattcaatatatatgtccgctgcaactttctttttctgagccagtaagggttgctatgagtttggtatgcttctaataaaacagagtaaaataaatttcaagaataatatatataaaaaacttcgtaccccattgcccagaggctcttcgctatgcgaagttatgggggagggatgttgtacgcagccttacccttgcatatgcaaagaggctgtttccggattcgaacccatgaccaacaagtcaccaaggcacaactttatatatatatatatatatatatatatatatatatatatatatatatatattattgtgacttttcgctcttcatttatattgatagtttgatactaaccatcagttaggtggatcatgtatgaatctcagcagatgttcaccttgttgatttgattctgggatctgtttgtttttccattttcttgtataaattcctaaagttgtagatctttccctgcaaagttctcttttggggattaaaaaccatttatgggttaaaaaaactagttctgaacttaaaaccagttgggagtttaaaaagtggttctgcattaaaaatcagttctggactgttttgaaactcgttttaaaaccagttctaaaactgcttcctgaaccaaacttgttctaaaatagtttattgaaatccaaaccaatttgtgaaccataaaagacagtttggttctgaaatccgaaccacattagagatttggttctccagtccgaactgaatcgtgcccactccaccccaagttgcctaatgcaacactactgcagaacttatgtggctttcttttcccttgtatggggtagttgattcttgattgttttatctgtgcactctggtattgctttgttttgtacatctaaacagaaaaaacaatttagccaagccacttctcttttggaaattagttaaggttatgtttttgcactagcaagggcttacataaaattgtgatagtggtacaagggtgctgaatttgaacttattgaggccccatcagaagatggaatggtgatttgtttaatgaacttagcaagggcttacataaaattgtgaaaattgttattatgattattatttggatcctaatttaaaataagcttcttacagatacagggtgcgatttgtttccattttccagtcaa

SEQ ID NO: 2732 - DNA, 3718 bp, Glycine max
  Intron number 1 from transcript Glyma06g37250.1 (locus Gly ma06g37250) derived from phytozome v7.0 (chr-ID Gm06; pos 39702580 to 39706297)
acttgcacgcagaggcaagactcgcagccaggattgtaagctctcttctatctcccactatttttttttacactgcaacaaaaccctattttatgcctcttttttctgttaattttcccgttccccaataccgatgaacatcgatttgtttattctaaagttaaatttgtaattgattgatgctttgattttcttcatcaaacgttacattcttagggttagtgtggctatttatatatatgaagcaattgggtattatttgatatatgatggtcaatctttatatacaaaatttattttatttttaattttcattcagcctctttttcaaacgccttgcgtcaaggttcccctttctgtggcactctgtttctgtttcttgcttttggttttaggtgttggcgagtggtggtttgcttatttatgcttcttattcacaaaatagtgggaaaaaaaaagtgttcaaccatttaacgacgtgggcataacatggtaccattacctccagtgtccgctagattcccctctcagcatttgagatagatttcttttccaaaatgaatcgaaaatgtgctatggttgtgtttgaaaaaaattctcaatgaacacttgtatgagaaaaaaagaaagaaggtacccataagttaaaattagcttatgtataagctaatttatagaagctctcctatttaaattcttctgaagctgatttttaacttatgcgtaggttgtgattacatggttctgatgaaataatattggcttccttcagtttttttttttgttagtttggtgtttaaatcatcaacgtcaaataagttccttgcgtcctgagcttccatgtgcagtgtaggtggtgttgtatgtgttgggtttggttgtgggaaatcctatagaagctgtatttgggagaataaaggtgctgtgacataatttttagttggaccaatatatacattgactaatgatttatttaagtgtgggaaagttttgagtattgtaatggggaaaatataagttagagactaatctagaacttgagttgtttaagtctgaattcataggttagaaataatggggcttagaggttacaaaagaaataggattaatgggttttagttgaagtgaagtctttgagttgtaacttggagcattccttggtagtttgacaaagaagtcaaatgtcaaagaaactgagatgattctagttgctgtgagatgccactaatttggaagcaaaccctggcttcaaaaactagtagctcttctaaacaaaaagaaaatggcagcatgacaatacctgcctctatcacaatttacaaagttataatgtctttcacaatccatgaacatattaatgctccagtcaacttttgcctttattttgtctctttttgtggaaaagcttaactgatccctggaagtaaaacaatcaacttcattaaaccgtagctgctaaacagatttttaattggaatacataccttttatgataatagttcagaagcatctacaaacacttatttttcttgctttttcttggaagccaaacactttcatccctaatttcttgatcactctagtcaatttgccccactatgatccaatttctcattttccttcctctattcgcacactaagacttttcccgatcactttgcttgattttcttggtctctggtttgtgactcaggttctgctgcataaaatcttggttctagttcatgtattcaggtttgttgatgccccagttgttgaagcctgtaaaaatgcatttggcgtgtggttaatgtagttcatacatgttttcagatatttttaattaagaacagtgtgttcagttaaaaatcagactaagtttcaaacattatataaatactatttcataatatttcaaaacttggcatgaaaatggaggactaatgacttgttagctcttgaagttcattttgtgctctgttacaacaatcttctagttcattttatggacatggattaataacttacgggctaataatttaaagtaagattggaatttttttctaaatgatgaataattgttagtagtctaatttttgtagaatattttttgaagtggatgtcacccgagttcttttagactttttttttggctatttctattgcccacttatttcataattcataatttcatgatactcacctatctctgcttagtgtaatttcatcagttagctaatgggaaatatttgactaaaatatgcaacatgaaactgtagagatagttgtaaccactttttagttaactttactaaagttggtctctctcaaagttccaaaagtattattttgagaaggcctaaagtgaagtgtgtgttctacttttcttgagtaaggccacagtgtgcaaagagattaatccagaagtcagaatattattattatcattaaaattaagcgaagcatattgtgtggttaggaaaatggttcgtatggagaatgaccccctcatgtaaaacatccattccatttcacatcagatttccctttctctctcctctatcctttttacatcaccccttttcgtgctaactcacatcctgtacattagccttagctgacttggttctttgggaatatacttgtagttgtatggccttagttttgggcttaaacaactgttggttaacattcctatcaggttgttccttaatattaaaataattattctgaacaacgatcctcagcattcttctaatctttagttacggttttgaaattgactccaaacacttgttgcaaaaaataaatagtaaacatttcagtagcagaaacagagagtagcttcagtaaaataaatccaactacccaaggaagcatgcaaatgtactttgattgttgtcgtgtccttcagcgaaagtcttctaatatctggttttgtcatttagtgattctttctcaccaattaagaatagattaaatttcttgctaatatctggtatttgataatgtctatcttaaaaatgctgatgattttaccctctagtatttttggttgtaaaatgtgtatgttaagtcattgttgcttggtttagtgacacagttcgattgaagtttgcaacattgtttatacttacaaggatatttaatgttgattcatcttacattttagttattctgtatcattaataagcatgttgaatatatgtttcactgctcagtgtggtgacatagtttgattgaagtttttcaacattgtttatatttgcatggctatttaatgttgatttgtgttagttcatttatcattgattagcctattgaatacttaattgcgacaatcagtgattggcctgtcacaaatgtgtataggaggagaggcaaagttaggcccagtagcagtagcatggaggtgtatttcagttatgggagagaggagagcaaatatttatattagctgttataaatacaagagtaattaggaataattaaaagaatatatacttaccctaattaacataattatagagtctaatcttctctatatccaaaattactataattacatctctctaagttctaacattaagtttattacgtttgcttgtgtcccattgacattttttttcctaaataaatttcattttattgtattctcaatctccccacgcttgcacgagatctatctgagttacacttgttattcattattagttttttctttggtagatataagaca

SEQ ID NO: 2733 - DNA, 3361 bp, Glycine max
  Intron number 1 from transcript Glyma08g25600.1 (locus Gly ma08g25600) derived from phytozome v7.0 (chr-ID Gm08; pos 19956304 to 19959664 reverse strand)
tcaatctgcaaacgccaccactgatccttccgaaggtgactgctttttggttttctttttctatgttgacaaagaattttaaatctgaaattgatgattaattttatagttggtctaaaaggctaaaactttaaggaattcatgaaggttttttggaaatcaaaagtaattatacaggtgaaatcaaaagactactagttttcttgttaatttgaggcatgttgggaaaggtttgaacttttgggaattttctcagtttcagttttccagtggattcagagaaatagctaactcttcatcatcaacataggagtattgaactattcatatttgatagctgagtacttaagcatgttaagtaaattcgattcctaattttatatatatgtagaatttttttatttttttaagttaaatgataaaatacaataatatacttgaattatattttgaaaaataaaagattcaataatttttttgttcaaattttttttattgaatgctaaatatacaccaattaagatagatattagtattcctggaatatatatatatatatatatatatatatatatatatatatatatatatatatatatatatatatatatattatgcgaagaaactgttttcattaatctctcaattttaacggagattactctttagcagttagaaagtataaccttggtgtgctgcaaaaaggttttatcaaagacaaacttttataaaagtgtaaagattagcatattgtgaataaactaacagagaaaaaggaaattattggtacagtacagatcagtgtgtttgtcctgatttccaacaatttgttccgttagtcaatttgcaggtttgctctatatgatatggtatcttatcaatagtattataaaatttgtgggtggtcatctcatatgcttggctacagagtttttctaaaaaaaaaataattactcacttttttacttttttttttgttttttgtttttgttttaatcgtacaatgcataggttccacatgtactaatatatttatatgattttactaattttaattttattcttaaattttaattggtagctaccttccaaagactaggcagagtcctttgttggcatatcgcattattgatgataatgtaaatatttttttagagaggacacttcccgtctatgtttcacttccaaaccaaattatataatatttatttataaagaaattattaaatagttaaaaataaatttatatcaaaatataaattatttattataaatttaaaatataatttatatatatatatatatatatatataaatatttattgctataaaattttattataatataatttatatattcgaaactatttattttatataaattttagttatataaaacatacttattgtgtacgtcgcttagaataaatactatttttttattaatctcgtatattgttatttaatttttatcaatctatataaattaatttttaagattttaaatttttgcataatatatgaaattcaaagatgtagagatataaaacaacatattttattaaacaagttgtttctatgaacataatttctttcttaatttaaaaacatgttatctttaatttaattttattttatttaataaaaaaatcacatttatttcaatatgtaattttatcattatttaataataatatgtttacatttatatttaaaaattcttatataatatatgtttacttattttacaggtcctgatacttttctcaaaattttaattaggttcccgatttttttttctttttaatttgtttcctaaacttttattttttatatttttcaattggatcctgttgtctaattgttattataaaaaattattcataaacacctacttagaggtgtagacaacatgcactagtgtttttggaggatcataagtacaactaagtcaaatgtaaggtatttttataaagtttcaactttcacatgttaattcaatctaaatattctcctttacaattatttaactttgcataaacttaaaaaactcatataattgactcatataacatattccgaaagcagtagtccactcatctctggtgagtttaacctataaatataatatatgcaatatagaggaaagaagttttgttgtaatatatatatatatatatatatatatatatatatatatatatatatatatatatatatatatatatatatataaatataataactcctattcttttttttaaaaaatcttactgatatgtctgtctatgtctgtctgtgtggttttttattctttagaattttatatgctgtatatgtaattagtgtggttgaaatagaatagtgaaaggttaaaataaaattgtgaaataatttacaatagtataaaaaaaattaacattttgaagaagaaaaattaacgaaatgtaaacataaacacaaacattacgttggtttgaatggaactatacttaaatatgatctcaattatttaataaaattagtacatattttatacttataacttagtaaaaaaattaaacaaatagaaatggtaaggaaaaaaataaaactcaattatcaatgtattttccttaatttgaaacaacctatatagaaatagaccattcgtgtggtgtcatatccttattttatatttctcattcttaataaaatgtatttgagtaaaaaatataaatttattattattttctttttttattttatatttcttttgtattaaacaactaaaatatattactttcttagtattaacattttttctttttatccttttactttttccccaaaccacatgtgtccttaaatataagattcagttgacaccctttaagaaagttgatttatttatttagtagcgttaaatttgcaagcaatttatattattttttttaaattgctcttaaaattattgggcttgtcatctttatttttctacttaattactttcggcataattaattaatgtgtgttagttttcttctccaatcattataaaagagagtgtatttatctttttagttcatcacatttattgtaaaataattaagaatattttagtaaaaaaataattaacgcaaaaagacaacttgaaaagagtcttgcaagaatacaaataaatttgaaaaaaggtcttatatttaagagcaaaagtagtatatataaaagttaattttttcaaagaataaagtctttctttctcgtttttctctattatttttcaaattgaatcttatttttttctttttatcctgagtacatatttctcaaaaggtgaacttatgaatgcagcaagagctttaaattcaatcttcagcaa

SEQ ID NO: 2734 - DNA, 2421 bp, Glycine max
  Intron number 1 from transcript Glyma04g03630.1 (locus Gly ma04g03630) derived from phytozome v7.0 (chr-ID Gm04; pos 2657144 to 2659564)
gcattggctggtaattttcattttatttctctacccttctaaacgacactgcggattatcaatttcttcgttccaatttttggttgctaatgtcgtctatttccattttttgttgtgattcttcaaaccaatgtgtttttgtgtcggtcagtttttctattttctgtttcattattattattattatttcctcacatgtctatttctgatcaaatttaattgctctgaagcccctgcttgttgtaggtgtcttatattttgaactattctgaacctaagtgcgtgaattgttatccgaatcattcactcacatattttaatttggaatttcaaatgcgggtttcttcgcggtgtgggttgaatagattttttcgtttgcatgtttagggggaacaattctgaattattgattgtgggtattcattgcatgtctttcttcattgctggatctggtgtttcatgacctgctctgtgtggatcagttgttgattgggtcttctgtttgctcttatttattgatggaagttaattaaacgatcgttgctctggattttggttttggtattgataatttgaggtctgagctctgaattatgcttcgataaagcttgtgctattaatattgtaattgaatcagaattagggcaagaagttaatatttatttcacaacgatcagaatctgggctatactttgaaggtttaactttaccatatttgtttcttttttccccaatttcccttctctgatttttttttttttttttttttgcttctttatgcaaaactgactgactatacatcttacatgaaaattttgcattcaaatccaactagtcctgtggcttccttctgggagttttgaatttgaatattatttataagctttatttgcaactaggttggcattagtgatagcaataagtagggtattggtaaagtactacaaacttgtctccatagttgcgtttgataaaatatctttaatctttatcctgcacctgcagttacctgtatattcatacctgcattttcattatgtgtaaaatcaatacattaataaaaaattattacaactgaattaaaaattcgttcttaattcttctaaacatatcctttaattatttaaacataatcttagataatctaaacgcaagtcataatacaatttttttttgacaaaagtcataatacaatattagaaacataaccttaaatcatccaaacataaatctaacatcaaacttctggaagaactattttttaaacttatactctccaaaaccaaccaaaaaatgatacattaacactaattagtttatatttatatattataaagtcaaaagaacacaaataaataggttattttaccttaatatattcagaatcaatttctccatttctttttctgtggtagatatatacaatgtgtcaaacattgttggagaaacttttttttatcttactgtcaaaaatggttttaacgtttcttgattgtacgataaaaaactaaatacattccatataatagatcttacgtaaaattattgatatatgtgtgtatttttaatgtcaatattttaaaattttgcctttatattaagtttaagattttttatgtaaaattttatttgatataatttattttatatattaattattttgttttaaattttaattacatttaatgtaaaattctttttttttcaattttatttgtaggcttgattaaactactcatattttttagtataattaaaagaatattcatataaaatattatatacctgctttgtttatatataaaagtttaagcatatattgaaatgttttgattgtaataatcaatgtttaaagatattataacaataaaaatatttaagatggctaatattaacattgttaatacaataatcatatttttcttatatattgattacttatcttattaatgatatcatatgtgtttcaaatttatttatgaacatttatctgtattgtgaaaaatatattactgacaataacttaatatatttctaaaagctatatcagaactagattatttaattcagttcaaactatttttaattagattgaatcaaattaaatttagtattgtaattaaaaaattaatgtgtgtgttaataaaatcactatttatatacatgtggtatgggacctgttgggtactataatgcccatacctgcacctattcccatttttattttgcggctaaatccttggctccagactcatctctgttgagcggttgtttactctacctgtggtggattttttcttttttaattttgtgggtacgcataggatcctggtagaattgccctccctagttggcatttgttgtcagactattattttacattgttcttaattgtttataaacaaatgcaggttcttacaa

SEQ ID NO: 2735 - DNA, 2455 bp, Glycine max
  Intron number 7 from transcript Glyma19g04970.1 (locus Gly ma19g04970) derived from phytozome v7.0 (chr-ID Gm19; pos 5211901 to 5214355)
tcaagcacttttgacatcatcacggaccacaataggtaattgcttctattatatgctagctggattgaaggtgtttaagtataagcatgacagtgaaaaggctgaatcaaacctcaaattgaattgtggaaagcatatttctttacttatgagttatgggatttttaataattttttttgctttaatcatattttatgtattcaagtctgcttcaaaattttctttttattttatgatgtacaaatacttttctttgtgcttttgtaaaatatataaaaggagcaaggtagaggcattaagaattgaagatagtggagacagggaacgagaaaactggggatagaaatggtgaatgtaattatccaaaatatatgatcaattaagcatatttaatatttaataaaattatattattatacttttctattgacaagaacgttacaatatttatttgattagcattcaagtgttatattcttgacaaaaaacagattcaatagctgaaacttttaggagagcttatttcttgatatggtatataaagtgtattgtgtatataatcaaattgttaggagttaaatccttactactccgttttttcctccctattcttcacaattaaatttaaattagcacaaggtaaagtggccctatgcattgtccacacttcaagcctgagtttatttttgggagttgagttttggaggaaaagggaagagggtaaagttttcatttctaataagtattctctactttgataacttttcaaaataaaagaaattcaatgataactttccataattcattatcccaattttttgtttattttataaacactatataactctatttaaaactataaaaattgcctccattctctttacctctaaaatgtcatcctgtacataccctaaagggatcttctgtgaaggggaagtgctagagataaaacccattaacatgcctgctcataatggctgaagctttatcgttgatttagttcttgacaataataataattgcatattgcacaactttggttttctcttttaattttgatacaaatcatgaacctaagggcagtatccttgttataatattagcatatttagcacatatattttgttggctgtattcattggatcatttttaattagcaagtaattagctccctggctgattgtatccacactaaaaacaacagatccgtgtgcaaacctagattcaatttcatttagaactccttgaataagaatccctaagtactactttttcgcacgataatttgtcttatctacagtttataaaatttgaactactcatgataaaagaaaaagaaaattcaaagcaattatattttttcctcctcaaagaagaggacaacatctctacttttatgtttgattgatttctaaaattttaaagtgaaatgaaaagttgtaacttaattctagatttatatatatgttgccttggtagtctcgtggtcttgtgttttaagaatattttttctttctttttgcaatgctttggcaaacaatgcataaaaagatgagtacttttgattctgaaaacagacttctttacaagcgtatatttgaaaggaccgccttggctattttactattcacaactaatgtgtttaggctaggaactcatcttcaatagatcttcttcagagagattggggaatataagtgtctattttttttttcactttgttttcttgatttcaagggctgttttttattatctgcttctccatttgtcttctgtctgctgacaagtttcttttctaatttaaaaataaataattgatgtttatatatattagagtaactacttttatggtagttagttgcgtctgttatcggactttatgcagagtcagctaggctattacagctgatgagtagttaagcatttagatagttagcatttcctaattataaatatatttatggccttccttgcatagttaatcaattaacagttactttctcagtaatagaacacttaattctttgaattttctctgaatattttctcacacttctctcactttctgtctctttcttgcacagtactgatttctatgaatgttagttaacttcacaattactttggaacactactgaacttgataaagtacaagcagaatttgaagaataaatattttttagattttgaggacttgaagtcaattatgagaattgaagatattttcagactggtctgtctttcagagtttcagtacatttcttaattatgcctatcagtattctaaaaaatggtaggattgaattgatgcaaactggaaatctactcatttgcatagtatgggagtttctttgtagtttttttttttttttaatatagaatgttgtattatctggttaactggttgactattgaatttctgcccgtcatgacaccacaataactatgttgtag

SEQ ID NO: 2736 - DNA, 4103 bp, Glycine max
  Intron number 1 from transcript Glyma14g38420.1 (locus Gly ma14g38420) derived from phytozome v7.0 (chr-ID Gm14; pos 47528091 to 47532193 reverse strand)
tccagagactcattcggtacggcgcgcgctgcgaggtgatgcctctctctctctctctcttctattctcgtcaatgttcaatttgtcgtcgttttggtttcgtttctgtatatttgttttttaattgaatagaattgattatgattgattgtggcgtgcttgttcggtgtttaggtttttgttttgttatggttttgatgactgtgaaggtattggacacgaatttggagttgtttgtgttgttttgattgtgttgttttttggaattagggctacattggtgataagtctgataaatgatagcttctccgttaggaatgtgtgtggtagttgcaatggtgaattggtaatggaatgaacttgtttctctccgcctatggttacgaggtagaggaaaaatgtgctagttgacagattcgcgaccaagttcatttttggctctggggattagggcagctaaatgtgaaggaaaatgtagtgtgattggttgtctttttttttttttttattggcaaatgttaattgttagtttcctttgttagcaggggtttgaacaagcgacctttcccttatttccttttttcttaaccatccaaccaaccttatatctcctagtgtggttggttgtgtccttgattcttttgctctgatgatgtcaaggtggaaccatgggacaaagtaagcatgaacaattcaaaatagtagttatgtttgtttgttcgattcttttgggtgatgtaattgtattaatgtcagtcattggactctttgctggcactttgaatatttttagctgcattacaatttgttttttcaattatgtacttattattaaactgttatatgaatgggaatgttgcaacggttagataaattgaagtgttttattatgtcttaaatgtcttgtgatcacttttgaaatatccatttctctcttttgatttaagacacatgttttatgccttttcaattttgatccctgtaagatactttgttcatatttagtccatgtaactttgtatttttcatattttggtccctataagtgcaaacttatggggactataaaatgaaaaaattagaatcttacaaggaacaaaattggaaaacacaaacttataggggctaaaactgagcaaaatatcttacagggaccaaaattagaaaaataccaacttacaggtactaaaattagataaatgtacttacagggaccaaaaatatatttaatcctaatgagaaaatcagtgatttgacgagggagttagttgttgaagggtgttactctattactcttccttttttgggtgaattgtcaagcattttattagccattaattgtattatatttaatatatttttagatgtttattttgatatcaacaatcgataagtgcttgacaacttagcctggggaccgtatccataagggtaccatagcaaatctggttcttaaatgaacatgtaaacatttgacattacatgtgcttttctaccactgtttcaaaatatctgttgtttaaggattttgcacaaggattaagataaacattacatagctcaattatttgaaaaataactatatttgtgtaaattgcactttattatgatactcaaaatattatctatcactaaccaattattccaaaagcttaagctgttgggtgaaggtatatgaatgttttttatattacatatctacacgggtactcacacgaaccctttgagtttgaagtgtggataatacactagctgaccaacttgtgttcaaattgaactttttattagaaaatatggcggcaattaatgcactctagacatagaggctttgataccatgtcctattatcccagaattatatgctgttaagtaaagacccaagaatgattttactgcatcttttacgcccccctcacaggagcatgttgatcttgaagtgtggataatgcataggtccacttctgctaaaatttaacttttgctagaaaaatagaggcagaaagaattgaactctagatcactaagtactaaaagtttaggtaccatgtcacaaactagttatcccatgtgaatggttttatattacatctctgaagtaatctttccattaacgcttcttcatttcatttattgtagatatcaagagacaagaattggaacaaataattaatgccttcttggtcttcaaaatctatagataaaataaagccgatgtattctctaaaccaataaatatttgaaacgaaggaggtttttgcatatatttgtttgatgtttttgtatcagtgacaaaatgcagttttctgacattcccttttatgcattattgtttgcaatgtgtaaacttataataagtgccaaaaagcacacacctctttgaagaaaggcgttacattagtaaaagaagtaaacagtatgatgtgactattttgcattaattttcaatataaataagaaaaattacattgacctccttttaggttgacaatcattaacaccttccttgttttgaaaatagcaccaacatcctttattttatgcactgctcttacaccccagtacccttatttgcttaagaaattatgcatctctctctcttagtttatgtatgaaacttatacaaggaaacccttaactataaccaagaaaaggaggtgagcataattaaccgtggttgttgattgctgccttagtgattgttatgtgcttcagtgttgttgcatggagtgttactatagttttctgttgcaggacttttaggtccattgagacccacgaactaatttagggatcagaaataacttctaaaaagcattgcaccctgcaactatttttgttcttgtctgtatctttctttttgttttcttctattcccattattgtttgagagcctctggtatgtttgtgtttgtaatagctacttttagagtatatttgaaatcaaatatttcaagaatcaagagttgatttgatctattaatgaaaatcctttatttagaattttttgggataaaatttgttatgaagttataccatagcaattgaatttcatttaaaaaatctgtttcatttttattgtgtaaaaattgaaatccacctaaatgggatggatttgagtagatttgttctgatttgagtttaatttttttaatttccatttttgcccttattagttatttaacttattctaaatagtaaaggtgataaagtaaattaattatgcaaaatcaattaaattaatctttaataatgtgttctaaaatggaatttgatttgcaaatcaattcaaatctcttattttatgctgatttcctaacataagattttttttccaaatccaataagattatctctttttttttaatgattccgagcccatcattagacatatatttttatacttccatgctgacaataatttaattaaatttgattggttgttttttcttctaatttctatagttcccttgattttgtttcttctattgcctgtatagtttttcaggggtaacaactacatgccatgttcttccattgacatttctgaaattaactacttaagcataatgttcacagtaataataaaagaaaaaaagtccaattaacaaaggaagatttttctaccctcatcagcacatggttaactactcaaatgacttgggtttttcagttattttataatcagtaaggtgctaaagacatgccttatttgaactagaaaaagtgtgcctaacgtaccattgactccttcctcattgaaggcactgagttgacaaccctagtacctagtggcacctttcagtgcactggctgtatcgggtgtatacaatgatttcttgtttttgttttaattcttttgaattaaacaaagatatttcttttcttccatgtactaaaaaaattaagatatttctgtcatacaaatcgaggctggtggttcatgcctttattatttctttgaaagggtattcaattaagtgcagctgattggtgtgcagatttgatgaacaaattttcttgacttcaggcagtgatgtttggactctttctaatgtggtataaaattactgatgttaaattttctctgttacaggtttttccat

SEQ ID NO: 2737 - DNA, 1142 bp, Glycine max
  Intron number 6 from transcript Glyma02g07110.1 (locus Gly ma02g07110) derived from phytozome v7.0 (chr-ID Gm02; pos 5671115 to 5672256)
tgaaaccaagactatcgaatatcaattttataacggtaagacttcataatttcttgcctgagttaaatcaattttgtgttactcatttgttagctaggtgccagataaagccaatgatatcgtattttctatgccaagatttcaaccatatatatatatatatatatatatatatatatatatatatatatatatatatattaattggcttgatatacgtgatagcatggaggttgactttcttacaggtttgatatgacttttaggtggaacactgagtcatgcgtttgttttggatgagaaacaaaaacactatttttaattatagtacattattcgttagcaggtcaattttacagaataatttggattttttatttatttagtggaacttaattacttaaaagttaaaatacaccaaacaataaatttaatataaattaaaattaaaagtgtgttataaatatttttataataatactttcattttttataatgtgtaatttttatgttgataatttttaaaatatcataatacttgatacaatgacttatagtgatgaaaatgtagtagcaagataagtataaattactgctatcaatttctaaaaaaaaaaaaaatgctgctatcaatagtcaagatattaaaggtaccgataataacgtgtggaaaaatctgcatatattaattcgataacgaaactaaatttgtgtttttgacatgaaactacatttttgttaaatgtaaatcatgacttacactgtttttttttggaattttttatgataattattataaaaattatcgtagataataatttctttacaccactactacatgtactatttactctaataattttatattaaagactaaaagtttaaaatttaagattttactgcaagatatataatggaactcactatctatagagagaagtagtaagaaaatagtagccattgttggttggttccatagaatcggtctctttttttgctttttcggccattttatatggtccatctctcttttattctttatttttttatatatagttatatggtccgtttctgattgtgccgtttataaatgtatacatattgcagatcctgagaggttcaggtttgcaagggacacaacg

SEQ ID NO: 2738 - DNA, 1262 bp, Glycine max
  Intron number 1 from transcript Glyma11g20940.1 (locus Gly ma11g20940) derived from phytozome v7.0 (chr-ID Gm11; pos 17802326 to 17803587 reverse strand)
gcaaatcaacaacgtctctctctgttactctgaaagtaggtgaccatggatcatcattatcatcgtcatgttttcttcatatatgtgcccatcatcatttgttgggtgcaatttttttgttcagttttgatcctgtggcctatctttaatattattattattttaaatgctagtaagttgatcttattcttggcagttagatcgtggtttttgtacggatattgatataaagttggattttttatatatttattttggggtctttgatttagttagtgcaaccaccttattttttttatatgattgaagctgtaacccatttttttttaatgttttttaatgctaatatagtgatccaattgtgagtagtagatttttttttgtctgtgtggatagtactttaagattgtattttttttcttcttactgggtctgactttgatttagttagtgacatagtgcaacaactttaaatttctgatttgtttaattgttttatttctttttaatgatcttgttagtgatgtagttttggttgttttgatttctgggtttaattggataaagggtttgttttcattgtgatggttgtatacttgtatgttagaatcatgaaggtggtgctgttgctatttgctaaaccatgagtggatcatgtatttgttagcttaattgaatgaatctcttagttcactgggttgatttgattctgagatctgttttttaattttttattttttattttttgaaatgctctgggatctgtctgttactctgttctcttgtataaattaaaattcctaaaactatagatctttactacaaagtgcaaattataggtttttaggaatctaaaaaaaggtgaagcctcgaagggctatttctttgtttttttttgggggtttgaggctaatgctttttgatgtatttaagtttataaatcaaaaagcatgtctaaaaattttcataattgaaaaaaggaaaaaacttcgatgttttagtgttttatttttttaatttgaaaatggtaatttatgaaaataattctaaaagaatgttaaaatgctattgttattgaaatggtgtcattttttttatcagcattgatatgatatgggtagtgttaaatggtgtcattgatatggtgggtagtgttctatgttaaattaaaattttctaatacatgacatcatgtaaattgatattttgttttgttgtattgtgtagactgacttcaagttagtgtaactagctgccaagtt

SEQ ID NO: 2739 - DNA, 566 bp, Glycine max
  Intron number 4 from transcript Glyma08g13300.2 (locus Gly ma08g13300) derived from phytozome v7.0 (chr-ID Gm08; pos 9728777 to 9729342 reverse strand)
gacttgacaagagtgactactaaagagttgatagcgtatgtgtacacttgttttcttgccgtgttcattatttatgcagattttaacgtctcaggctcagcatttgcattgctttcatactctgcataaatattttgaaattggtttaggagtaattactgtggccttttccatgtccttatcgataaggtcatgaaattttgatttatttatatttttatggatttgcctgaactgctacatgaatcagtcatgtaaagttggcagtaaaggtaagtatatggtttatggtctgttttgtagttcttatattatattatcatatagagtcaatatgtgcttattcgtccaaattcttagcatgtgatgatttgctcttatttggcatcttttttgtgtgaatatgtaatctaattacacaccaaatttattttgcatgccaggatggtcatatgtttctctatattaacgtatagatctcttcatccctgtaatgataagaaacaggagtattttaaagattctttttctttttttattgatctgtgacagaaaatacggtcttg

SEQ ID NO: 2740 - DNA, 5753 bp, Glycine max
  Intron number 4 from transcript Glyma17g00620.1 (locus Gly ma17g00620) derived from phytozome v7.0 (chr-ID Gm17; pos 288727 to 294479 reverse strand)
attcattctttggtggacggagttgtgagtacaattcttacttagatttaataagatttttatctgttattcatcttaattttggccttaatatgttattctccttaaatcacacagaataacttcagtgttacttagtgcaatgcccttacccattcaaaaattaaggatgactgattagttcatgtactcatctgtatcaaaaaggatattggttaacatgaaccaatatcattatattgctatttgatactgttatatcatgtttgtatgtgaaacatcagttgtttgctatgatggtgggatactggattttgtgcctaagcccgatcattgggctgaacaggacaaggatcaattgctggatccactcccataagaaatgcagggtttggaaggtttatactaaaaggcaggatacaggtatatatggaggagaataattagaattcctgagcaggcaacattgttacatgagccagtttagatagtggggaggggggctgtagaagggagataaccattttgggttgctttctttggcaaataaatatcttttctttgaggaactgagctctggaccttcttctattgtaagagctgagggcctcttctttttgttattcaataatatttctcttttttttataaactgaggaaagtagagagataacagagaaaaaggagaagaataaagctgattttattgatttgaaaaactagttaaagatagttacaatctaggtatttataaacctctatacagcagaactaactataactaatgagtagtgaagaaacttgtaactctatcaacagggtataaatccaagtcaattcaatgaaagtttgagcaatgctgcgatattcaacttcagtactagaccttgtagtaaccttttgtttgcgataccaccaagagactaagttaggaccaagaaaaatggcagtccctgaggtggagcgcttgtcatccacatcagatgcccaatcagcatcacagaatgctcgaatggccaagggattctttatagaagcaggctgcaggagcagaccatgaaatagagtaccttaatccttttcaccactgtccagtgagaatccaaaggagcaaccataaattggcaaaccttattgacagcaaaactaatttcaagtttagtgagagtaacatattgtaatgcaccaactacaaacctatagagagaaggatcatgaaaaacatcagcaccatgtttagacaacttgcagttagaaaccatgggagaagagattgaatgagcttcagccatgtgagttttgtgaagtaaatcacgaatatatttactctgggtcattaaaacagcactgttggacaaatatttgatttccagacccaagaaataatccagatgaccaagctgtttgagagaaaaagcagtattcagtctgtttgtgagctgctgaatcagagtggctgagctacctgtgagaattatatcatccacatatatcagcagataaacaacatccacttgatgcagatagataaataaggaagaatcacttttgttgccaacaaacccaaactgtaacagagtggacttgagtctgtcaaaccattgccttagagcctgatttaacccatagatagcgttatttagcctgcagaccagtgactagtctacaacttcaaaaccaggaggttgtatcataaaaacagtttcttcaagagtaccatttaaaaaggcattattcacatcaagttggaacagtttccacccttaggacagggcaagagtaagaataattcaaatagagacaggcttgatcacaggagagaaagtttcatggaaatcaaaaccatgaacttgatgaaaccccttagctaccaatcttgctttgaaccctattaattgatccatcagcattttccttcaccctgtaaacccatttacaaccaatggcctgtctgttaggagataaagatactaaatcccaagtatgatttttcagcaaggcatcatactcctgttgcatagcaatgagccaatctttgtttgctagagcttgtttcatagttttaggctcagaatgagtgagaaaaagtgaagggtgaagtctagggttgtgaataccagatttagaccttgtttgcatagggtgggtattgactgggatagaattaggtatagacagactctgaagcagatgaagtagggttagtagactcagaattttgtggctgaatagggatgggtgcagaagaagtggagggacaaggtatagaaacagttgtgatggggaataagcaggtaagggtgaaaaacttggaggaataagaggaacagagcttgaattaacaggtgatgcttgagatgtttaaggaataggggcaacaaaaggtggagaaaggttaggactttggctaaaataagaatcaagattttttgtgggattagaggaagaaggaaaaagatcaatatagggaaatctcaattcattaaataaaacatccttagatatgtaaattctaccaaaggatgacaaacacttgtaacccttgtgagacaaggaataacccagaaacaaacactcttaagttcgaaaattgagcttgtgtgtatgatatggccttagtaaaggaaaacatgcacacccaaaagttcgaagaaaatgataatcagactctttattaaacaaagtaacaaaatgaataacaaacttgagagaagcagtgggaagcctgttaataagataaacagttgtagtaaaggcataatcctaaaattgcaagggtagagaagcatgatgcagcaaggttaaacccaaatgaactatgtgtctatgttttctctcaaccacaccattttggtgataagtatggggacaaataagtctatgagaaataccaaaagaggctagaagtctggagaaaggtctgtattcacctccccaatccgactgaatactcttgattttggtgttaagttgtaactcaaccatggacttaaagttttgaaaaacagaaatggtttcagccttggactttataggaaatatccatgtataactagagaaagtatcaatgaaggaaacataatatgtatagccagcataagaggtaacatgggaaggtccccataggtcagtgaaaatgagttctaaagttgaataaacagaagttgagttgtgagagggtaacctaatagctttacccatacaacaagaggaacaaaactctgtgatgtttttattcagttgagaaatattacactgtttgagaacaattttcattacatgctcattaggatgacctaacctagcatgccaaaaattaggaccattggaagaggtaacatcagaatttgaaacaatattagaagtattattgacagtagcagctaaagtaggaaactcaacatttggaacagatgcagaagtggacatcagcagagaaggattgccttgaagcttgaggttgtgaaaagaatataggccatcagcaccaaccactccttgtaggaaaattttattggtctcctgagatttcacaagagacaaatgagggtgaaactcaaagaaaacagagttgtctttagcaaattgactcgcacttaacaaatttttcgaaattgaaggaacatgtaacaacttatgaagcttaaaggttatggcagtatcattaggagaaacaaaaactgaggaaccagtgttggagatacttaaaccttcaccattgcctatgaaaatctgctcaggtacatcaaaatgagtaaattgtttaatattttgagaatcaccagtaacatgaaaactggctccagaatctggtatccaagtggagccagatgctccattaccatgagaggaggagtttgtgagcatggcactgggctgactgggaccaagaacagtggacttagtaatgggattaacccaagtattggaggatctggttgaaccagtaaaataggggataggttgcagcgtggtgggatcaaaaaaggttagggactcatgtggctgaaaaccaatatcagttctgaaatgacagacattggcagtgtgcccatactttagacaaatttggcactgaaaattggcaaactggccacctccatggcctctgctggaaccaccgctaccacgtccagaatttcgatcagaaaaggtgccgcgaccatcaccacggccaaacgagcctcgagagccaccaaaatcactgtttttataagtgtttggctgtgcataaccttgggtgtagttcaacaaggcagaactgaccaattgagcatctcgactgtatcgtgtgagcctagtttcatgaccagagaagagcttcgatttctgcaatagatggagcgcgcttcttactctcaatgacagaaattaccggtgcataatcaaacggtaatccttcaaggagctcatcaacatactcctcatgccgaacaggaacacctacaccagccagttcatctacatatcctttgatcttgggcaaatattcatcaattgattttccatcaagagtgactgcacgcatcgcagtgcggagttgacgcgcacaggatttagtgtggagattgaaatattcatggattttgtcccaaacctgataggaatggttggaacctagaactcttgacaacacagacttcgaaagcgtagactgcagccaaacaagaagcatttggtcttgaacttcccagatttcatactctggattgacgcgatcaacaatacgatcatcctcaatgagataacgaggaggaacgactggattaacgacaaatcgctgcagcttgtgcgatttgatcactggtttgacgtgttgtcgccagtggagataattcgaatcatcaagcttctttgcaatagagttagagaacgaccgactgagaaatgagatttgatggagcggaagccatgaaagcacataacaggaccttgaagaaacacagaattatgaaaaaatggctctagataccagttttgataaactgagaggaaagcagagagataacagagaaaaaggagaagaacaaagctgattttattgatctgaaaaactagttagagatagttacaatccaggtatttataaacctctatacagcagaactacctataactaactctaacagaaagccaactaactttaacagaaaacacaacagaactgactataactatctcgaacaaaaagccaactaactctaacagaaagctaaccaactaactgatcctattgaggtgcaattagcaaaagctaacaaccctttcggacaaaatacaaaactgttttcacagttatatattgacatagattgatactctttattcatattttggtggtctatcatatgatgtgactaaatgctatgatgggttacttatactactgacttaccgacttaccgtctagattaaattctctatgaaaaactagttgaaggatgcatattattttatatataatgcacaacttctcatttctatattttgagatgttctttttccttgtacttactggagcatcaaatttgtcaactggaaaaactgtcaaatcatttaaaaaataaaaagtcctctggtttaatgaatttcagcaattgccatctgagcctgcttcctagatcccattttttggttgtgaccttgggctttgatacatattatcaattgttataatgtcatgttttataataatgaaaattctaccatcatctgatgattattgaaatgcacttggatttcgtgctcagtga

SEQ ID NO: 2741 - DNA, 2133 bp, Glycine max
  Intron number 1 from transcript Glyma18g33560.1 (locus Gly ma18g33560) derived from phytozome v7.0 (chr-ID Gm18; pos 39688624 to 39690756)
aaagctttcattggtaacccatctttcctttatgtttttgtataaattatagagatatcagacaagtttttttccccttaatttctctgatctctattcatctatgactcccacatggcctccgcgtgggaatggaatttaaatttaggtgaatctgagttgaacaccactgtcagtattgtgaatataaatttaatttataacgtgatggtagttgtgcattaagtgtttgataaaatgctgattttaggtgattgtttgcaatgtgaacatatttatttgcctgtaaggaacaagagttagtagttatgactttgttactcgttgagttgtattacttggtataagtactttggtttaagcatttttcaggtagaagatcaaagttattattcacaaactgagttttcgctctctttacttactttgtatacctttcgtccttctctcttggttttggatattgcttcgttgtggactccattggtttgaacctgtgctgattacttaacagtagggtagattaaattattttagttttagttaatgttagccttgtctttagtgctattaagttgattttagaacattgtagtactatctttttgtcttgtgttctgatttggttttagatgcatcatgcctgctggttggcgtaaggtttatgtgaatatgtttgaagcaagtcacactgacctaggatagcatcttggcagtttagacaacattttttggtaactggtgggttaagaggtatatgatatgttgtgaattggtgatgactttaaaaggaagtgttttttccccacaattatgcatgttattttcacagatcctttacataagttcatttgtctatgttattattggtgtgttctctattttgcgctgtataaacaggattttggtagtatttttcataagctatttgagtttgagtttggttagtttggtgattaattaccaatagtaaatgtgggtttgttttttttaatcaaaactttgactatcattcttgtataatgtttcctcccataatctttatgttcggttttgtaattgactggatttgtttcagtgcattttgcaatatgactctggtgattaatgtttgctcttttgttcaatctcatcttgtcatggcttgctgattcatagaagtcaatttgtgtatctagaataggaatggctgttgaaactttcatttttgtgaaattttcatatggttattgacataagcattatagttttattccccttctttctccaactttaacttagaataactacagtactgtgttgtgtgttggccgaagttacataacaaagagaatatagtgcatgaataaggaagggaataaagcaagtgagaaaacatttgaacggctaattatggtgggatccatgttatgctgcaggtcagcattatggtctagtttgagctgatttatttgagttaatgttcattaaacaaagtctctataaattcattccaagagatatatttcaaggcttctatcacttattcagcattgttttgttatttccttcagatgagcgcttagcagtttaagttcatttccttgcatgcgcatgctcagacaatggatatagatgttttatcttcattgttcacttgtgtgtttagaggtatctctagactcaacagtcattaatattaacagtgctgcttgattatttttacagtttccacgtccagtatataatttgcatcacaattaattcataggtgcttttataatacacataatggaactaaaatctagaacctatatgaactgtgggtttcttagtatgtctgttctgaacttcagaaataattatggtcagatgcaaatccagttaatgtgttctacctgaaagaagattgctcttgtgaaaattgttatatgactctacatgctaattgcatttttaattgtcagcgagttttggacatcaaattctttcattaatttgctttccgattcttttaatttatttatcctccaactataatcttatgtgactattagacaattattagttcttaggaagataagtttttctccatactcttttgcctgtaaatttgcagtgcattgatcacaacatcatttgattattcaatac

SEQ ID NO: 2742 - DNA, 3356 bp, Glycine max
  Intron number 3 from transcript Glyma05g08200.1 (locus Gly ma05g08200) derived from phytozome v7.0 (chr-ID Gm05; pos 8168245 to 8171600 reverse strand)
tgctttttctgaggtagttttggcaatgttaattttatactgattgattactatgatttctgttgatatccatttctggagaatgaaaatcaacatataaaataaaagcataaaataaataaaccatcgtagactggtagttagaatctcatgaattgtgattcaattcatgtgatttggttcaaatattaacactatccatacagaagacatggagatttgttttgttgccagaaatgcatgctgaatcaccagaatcatgctggaagtttaggaattttgattctgttgcagttccaagttccaactatacagatcttgtaaacttgtaagagtttaccaaacactaaaacaatattaaaatgcctaaatacagtatccaaacaaaatatagaataatagatatccaacattccaacttcataataaagcaaaccttaataacaaagtatgacattgcaatttaaaataacacataaatgaccaaatcaaaagttcataagatgaaaacatagagttcagatagaacacatttgtaaacaatttaagcttaatcaagttgttaatcaagcttttaagtggtcaatcaaacattcagtgttaatcaaattttgctaagctagtgaggggaggcacaacacagcacaatcgggggtgaagggtagtaggaataggaacactacactaataccacacaacactagtttcagtttttcaaaatgtggtaggcttagtacacccacagcaggaaggcacagcacaacacaaggggatgaagtgtgccttgttgaaaatttggcaaaagattgttgctggtggcttgcagtctttgaatgtttgttgttgcagattgccactggttttggttgtcaaaggtcacccattaggtcgttgaatgttgtcacacaaaatgaacatgacctgatgccattgtccctctaaaatgtgcaggaaacgcatgtggttgcaacacaaaaagtagagaaaccctcccaatgaaatgctgttgattctggcttctatgtggaatatttaaaacttttgttgaactcgttaactcttccacaactttgcaagttgatctaagtctatgtgagtctaatacaaaacgaggattcaggttgatttccaggtagagagatgttaactccttggcatgtgtatcaatttgttaaagtaatattaaaatggtaagatcgagtgtttagtctatagggactttgattgtgcatagagattgtatataccgaattttaagcaacgaaatgattaattgtggaaaagtggatatatttcagaattaaagtgcagaaatttaaacttcaacaatgataaaggatagagaagtagagcaagatgcaagagacaagaaaacaaacacttggaggtggaaattgatgtttggtgcagatttttgtagatgtgttaggtgtttggcctaccaaaattactcttgatacaatgttaaggattttttcaccatttaaaattattccaactattacttttatcaactaaactactcataccctgatttctcgtgtgaaagaacctaaacaacctaatttcactcataatcccttaagagttaaaccaggtaatttgctttaagactatcgatgcataaatgaggctaattaacatcattctatccctagacattggttacctagaagttccatcaagttcttagggtaaaaacatttcccaatgattaaaaccctataacatacatgtgaatagatgatcaaatcataaacaaggcaataaacttagaaaagaagcaataatattgaaataacattaaatgaatagtaaagatcattacgtgaaagagtgtttggtattcaagtccccaaacaaaagatgaaacaaaggaaatggaagaaaatggaagaagagctcttttgtgtccttgctcactaactccctccaaaagcacagtaccacccttttatattcttcaaaacaaaatgctgcacagtcatgtttgtcgagaatgactgtgtgctaagcctccatgtgcgtgcagagtgcacatgcaaagtacaattgtcttaaatgaccacgtgttaagcctccaaacgtatgcttagcgcccatgctcgatacagttggcttccagcttggcttcatgcgttgagcgtacactagtgtgctaagcgcattgctctaatttttcaacatctttcagatctctgctgttgtgtcaaaactctaaaaaaaatagaaccaaaacgttgtacattcactaactttagcattctcgggataaaaacttagaagaagctaaattcctatctttttaagtcaaaagaaacattaaaagagaagaaattagataattgctatataatttaaatgtagaaattaagtatgcaaagcaattatcaagaaacaccacgagttaatttgtgagttttaacaaccatgcttagagggacaggtagccgaaaagtcactgtaggggaatgatcaggcagggatgggtgagcgtggcaggattcttgttggcacaggtctatatgaaaaagtgctccgatatcatacagtggatagtgtcgtggacaaatagcagaagtcacttagctttcgaaatatatgatatttattaaagtgggtaggtgaataggagttatagatatatctaatttttttagtgaagtttttatatgtctctttattttagaatttagcattgactccaaattttcttcttccactgacttatatttggatggggaattgatagaggaattcaatttttaagtgaatataaattatcatacatcaaaatgacttgtttggatatcaaatccaaagaatttataaaatgatgggaattttatttaaattttttttttccaaacaaaatgaagcaatgccaaataacacctaaaatgaaggaatttcaaataacacaaaatgaagtttacataaattacttccatcttaattaaaaatttgaactacaagaaatttcaattgctttattcaaacaaagtatttttgaaaatgaaaagaatttaattgaagtaatcaaattctcatgcactttaaatttcttgaaatttgaaatccgttatctaaacactgtatcttttatctcatttctttgtttaaatgtaatttttactatagcataccatgccattgctatataaattgtttatgcatgtcttgcaagtattgtttttcaaccttatctctattatagataatgatgaaatttggggagtaatcgatgtttcttctttatctggatttttcctgcaaatgcttgcattttcaaattcactgatattttatacctgggagcaggatactcaccttttgctcactgggggagttgagaa

SEQ ID NO: 2743 - DNA, 1903 bp, Glycine max
  Intron number 4 from transcript Glyma14g36570.1 (locus Gly ma14g36570) derived from phytozome v7.0 (chr-ID Gm14; pos 45925047 to 45926949)
tgtgtcatctgcagttagttcgggtgctaccccatgtgagtttctctctcttcctttagggggttgtggaatgcccttttcaagagtgaagatcaattaattggataatacatgtataattaggggtaaaaatagatctggttaatcttttacctcaaataagcttgacctatttcctaaacctaagaccttaatttacatggcattagcctttttcaaggcttgacctggccttttaaaagtctattctggataaaaagcctatttagtagtgaggccttttaggtaagccacatttaaataagctaacaaaaatttcaaaatattatagaagaatttaatgcaattataacaagaataatgtcaacattattatagcatttatatatacttaaataggttgatttcttaatattaaaagactttttagatagcctaaagcctagccttttagctaaataggcttataaaaaatctttggcctatcttagtaaatggacctggttaagcaataggcccttgacataattgaagtataaagttattacatgtatatcatataaaatgtcaagtgccttgtggtagatgaaaagagattcatgttttatgtttaaacaaattacatggttacaacttgcattctgcttatggtacttgaagcacattttataactttaagcatacatcaagttttttcacccaattggtgtaactttgatattttttttaacaaatttgatgtaacttgaagtttattttccagagtggtgtaatttgatgtagaaggtttttttttttaaaaaaagttcgttgtgaatgccagataggaaaatacaacttatacttaattttttattattacttatatgtgattgaatgcatgaggcacggctcagtgactttattacatgaagaagacatcggtgtggaccttgacttgtactaaagttttgaattgtggattcatccaataataattcatggaatggagctagagctcttgcaatttattgaatggagccatgacatagactttttctattcacaaagattttgtggctataggtcatgactttagtgcaaagtgttgctcctcatctatgacctctatcatatttcacacatatgatatgacttcatatgtttggtgtccacaactttgctaaaaaatatctaaagataaaagggtcatggataataccatcaactttatatgcttattaatcaaattcaaatctgtatccttaagagtgcgtttggataaagaattttaactgaggaaagtaatttatcagagaatttgaatttctgtaatttagaattcattgtttggatgctttttatgaagaatttaaaattttggaattttgaaacagaattttaaacaactaaaaatctggaatttcaatttccttctaaaagttgagaaattgaaattctcttcttaccgtcttcttcaagaaacaccgaccgtctgaactcctaaaatatcgatcgggtgtgagcatagaggaacacgtataactaacacagcaataaatcttctctttttttttcattctcataattttaatttttttatccaaacacaaaattttgaaaataaaagaatttcaattgaaatatttgaaattcttagaatttaaaatttctcagaattttcaatttctccatccaaacacactaattttactttaatttataactgcctactgtcttttggttttatgagaaagttcgctgaattgctaggattagtatctatacttttgaggggttatttcaaatttgcaattttttattttatatcttagaagatgaaaatttggttgatgacaaattaattttctgatcttgtgttattctagtgaatattatagcattgggatttgcaaatatcatc

SEQ ID NO: 2744 - DNA, 4303 bp, Glycine max
  Intron number 1 from transcript Glyma07g00850.1 (locus Gly ma07g00850) derived from phytozome v7.0 (chr-ID Gm07; pos 465746 to 470048)
gacattcataaggatccaggtaatgtctcaaatttaggtatatgaatcattggttatttcctttagctaataagttgcttctttccgctgtaaagcaaacactccccatatttctgcgtgccaatttttttggaataggtaccaataccataccctcctaattttattttatttttgtatagaaaaaaatttaaaaagttgagtagcacttgttttagttccttagcgcagattggagtattcaactatttctccaagctaactgtgaatcctgttctcacattaatacaccaagaacccataaagtttgtgaagcaaggtagatattttgacttgggtggaactctagctagattctgtttcttttgttcactcaattcaaaaattgaagagaaaagagacagagttgtatacgcggcgagagggagttggttttgattgcttcctagaaaatgattgtacaagataaggaaaaattgttatggaagatttataaggtatccacaattgatggatcagataagttgccaattcaaaaggaacaaaatggtgaaccagatgcacttacctttctatttcgacccattttgaaaggttctccgcttactaagaaaaaaaaaaggtttgattggaatacatagcttgcaatcaatgacagctgaacttatagatagctatttgttattataggtcagcgttgaggtcttaattcttacacatagcctcttgattatatttagctaaaaggaatttggttcttcctttccaaataacatttttttccaaagccactctttctatagcactgaaataaaaatttaattaaaggatcacttggggatgggagcaggaacaaaactcctgctatgcacaccaacaaagtccagtacaggttgtagatagttgagttctttaggcatgttgacaggattttgattcccttagtcatgtatatggagaaaactttattgagagagacaaaacccacttcgatgatttctacgcctcaagggttagtttcgatgatttctacgcctcaagggttagtctcataattttcggctatgggataaattgcttccggcaaaaataaaacctcctgctgtacactgagtattcttaataatgtaacatggatttattaacacagtcccatcaaaagaaagtagcaagacaagaaaataaatgtgcatggagcttttgccattgtgttttgctacttgctagcacttctctttttctcaattatctgtatactttaagcaagcattaaaaaaacattatgctaaacaaaaagaatggtcaattgactcaattcagatacagattagcataaaccacaaaactcaatggcaatatggattcatttttcttaatatttccaaaaagttggagagcgttcaattgaatcttaaagaggagagtccgtaagtagagacatttatagtgggattattaaatggattaatccttaataaaatgttttagctgttaaatatcttggtggtctatatgaatcccttagcagcagcatcaattcaaaactattttttgttgctgaaatttccttttagacatggaccttggttggtgtaagaaaagacaagaggacaaagaagggttcaagttcagtagtaacaatatgaagcctaatcaattcatagtttcttttgacctaagctatacactaggcaggcattaagaagaagtcaagctagccctaagctttgatattatttacaaacacagaggaagctttgataaaattggaaggtggagaagtttattcgtggaatataccttatggttataatacatctgcacttctactttatcaggttcctagttacaatgattgattcaattttggtttacctcaaatcagatgccactcctctctatactattattattattattatttttaataaatggggtatatgacatagttcagggaaggaatgataagctaacagagctagtaaattagcttggttgaaccacaaaatctgggtcaatataattgacagaccgaagtctatgtgggcgtacactgtctgtagatcaagggttcaaaacctactgaaaacatattattattatggagatagtttatgatcttatcctaaaaatggttaaaattcaatcatgagattaaacaatcccaaaaaggactgtgctactagaactaaagcttttggacagcttgccaacttaccaaaacatgtaattcattaacttgaacactccatgaaaacaatgtaacttattataaattaactgctgttggcaaaaaaaatatactatattatcttattatgctagtcttcaacttttaaattcttgtctaagcctaatcaacccagaatgtgatttattattgataaaacaataatatagtcgggtcttgacagttgtaatcatattgtcacagaaaattaatacgcttgtcttattgataaaacaaagttcaattatgacaaagaaagtggtatagcatataagtcttgattctacgtgatatggagcattcatatattgagtgtggtacattcagctgttggtaccattactgtcttacggtctataaataatgattccatgaattatttttcactgtacaactatatggcgttgaccgttaaataagcattgtgctataattaaatacctggcttttagttaagcttttagatatgagtgagaatatataacaattgacataagtgataatagatgatgttatttaactaagaaatccaagattttaaatcttaattaattcttgaataggaaataaatcatgttaaaaaaaatatttatctttcttttatatgttgacggtcccgactaagatacaagtgataatataaagatattgcgatccttgtggatacaaatatcaagacttacgaaggcaccgacagaagccagaaacattttctaaatgtttgacaggaagtaacaatggttgacatgctgttattggactcacatgtgggttaacattcgaataaaaaagcacagcacttgaacatgtgaatgaaagaaatcatccttgtcagaatattgcaaatttgcaaaatgaaaaccggtgggaggtgtttgttgagtttagctaactagtttttgtcttctccctctaatcattttatcattggctttacgcctttttaatggaaggaaggggatcaaattttataaacagaaagaacaatgtaagatatggaaagtgcagtgtatatataattcactctaacatttgtcaagtaatggcactcagggttagaggtgtttttttggaccaaataagatgagttcatttgtgttcttatttgatctgcaattaattagaggatttatttaagctcatgactaatttaattaagactgataatatatgagataagattcaacacattcaatttgttgatataatatgtcaatcttaacatattataaagtatgcaactataattaatattttatagcatatccattaaacacaatgttaaaaaaattgtcattcaaattatgccaccatataaatacttttattctatgaaataataaaaaatgaaatatacttttgaattcttttaaaaccatatattttttttcaacattattactcggaatatgtaaatcaagtaaaattaaataattttagtttttgtttgaaaatatagataatgagataaaatttttaaaaataagtgtgaataatcatattgaattatcaataactttacccatatattgacctatgtttacaacaaaaaattaaataatgctagattgggccaatccttgatcaagactttcgttgggcttaggctcaatgtttgggtcaaaatattctccagcccaatggagacaaatagggtttttgtttatttgtgaaaacagatatgcagagaggagagggagacggtagcagataagcctaaacacgaaactcgcaaattccctcaacactggagtcgctggaaaattcattctgggactcaggttacgtttctcccttcctcaatattccatttttctcattctaagaaggcactgcataatctcagtcattatctcacaatgcgattcggatccttaaatcgttgcttggtttgaaccaaacgataagcagtgatatgattatgatgttgtgtatttttaattatttatttgttatctgtttccgtcatatctttcaactgttaaccgttaatttaaattcccgtggtttttcttcttgttcttattgttactgctatttactgtgttgttcaatcagctgagctgaccaagc

SEQ ID NO: 2745 - DNA, 2513 bp, Glycine max
  Intron number 9 from transcript Glyma15g42300.2 (locus Gly ma15g42300) derived from phytozome v7.0 (chr-ID Gm15; pos 49696527 to 49699039)
gcccttcaggttgagtaacagattctttcatgaacttttaatttaagtaattgaagggtatcataaaattattgggttgtggcgtatatcttcaaaatagaataatcaaatcttttttttttgttgttgattttatgcatctagtttctgtgcatattattatcttatatatgaaagactgatttggcaactcctgcttgttctctaacataaaagcacaaacccagtcaataaagaaagagaattaacttggtaatgggttgcagttgcacaagaagcaaaattgaaatatgcttgttctctattagaaaagcatgactcaagcttaaagaaaattttactgcacaaatataagacctagaatgttgtattagagagaaatttggggtagcatctaatgtgaatatggtagaatctggccttcaatagtttgggcatgtgtgcagacgacttgtagaagtcctagtaaaatgaattgatcaaatggggagtaatccaacagttagtgaggaaggccaagaaaaattataagtcaaaccatcaagaaggatttagatttaaatggtatgtcattgcacatgatatattataggacattatggcatcatttgatccatgcaattggtgtgttctacaaggagtactttgtgatggttatctatgaagtaattgtagaaaaggagactaaactttttttatcagtgtgatgcaagggcttatgcagtcattcggtgcgtttgattggattgaaatgctcacatttttatggatgtctctgtacctctgaaacttgttctgttcatggatgtttctagggagctgctattttagatatgcataatgggcacacattgcttcatttttttgtattttatcgtgttctcttaagtatcatgcttttttggtttaggagtcttttctttctaataaaattgtttttcctgtcaagaaagaagacataaaatacagaccaaagcataagtgacctgtgaccatctggtacaaggaagcacaaagacaaaatattaccatcatatccctctaataattgcatcattcagagccactttcaagaaatgaactgtacactctgagaagacaattgaactgtcctatttcaaactaattatgttgatagttgagttaaagactatagcaaatatgcccttgccttgatattttcttccttttctacacaatgcactctctctactttgcttcatcctacatgtcttttgttataccaagctagtgtggagtaattttcatatcataagcacatcttaacttccaagtgaaccaaagaacaaaaacaatttccataaagggtaacatgtcatttatggttaggttagcttttgtagttaaaactttcagataatctcttattgtttttctgattcagaccttcactttaatcctttaatctctaagatatagttagttttatagtttttttcctcttgctatttcctttctatactgtttcttgctacacttagagtgtgtttggattagttgtgaaaaatagattatttcaataatcagttataggtataatataattgactattggcattatcgattacatgaaacaagttttatgtttgggtatgttaggtgaagagtggttttaagataatctattttgttttgattgtcttaaataatcattttgtatagtaaaattaaaaagtggctatgaagttatttgtagtagttggctttgtatttaattaatcgattgttgtgaatacaaagggaaaacaaaagttactaaaaaactgctgacttagggtatggtcaatgtgctgggatattttaatcaataagcagcttgacagactttggagcaggggataatcttgaggtatctcaagatttgagattggaaacatgataactgtatacggggtgcaaattccatgttgtgcccggatactgcaacagaaaatgttcttatccacttattctactccataaatgacttgcactgaagaacctatattcctttgctatgaactctgattcttttagtaccatccagaaatggctaaagtggtctgccacctttaacatctcagaatctatgacttcactgctcaataaaagatgctaagtcaagaatcagacaaccaatgccttgtttcataaatccagattgcagggatctgttaagcaaggggaacacacaaatcctgtatccaggacactatgttttcctaacttcattcctctttggacactgtgagaactctatctgttcattgctaagccggatagatcagagcattttccacctaatactcgcacactttactagtttacaaagcccctaatcctatttcctcaatacttgtttatcatcatcttttcttgaatctggcctgaaactcatagtaaactgttttgattgcctaacatttatatttcttatgtttttgtaaatagcaacaaatgattcacaatcaatttgttacattttcaggtgcagagtgagtttcagaaggcat

SEQ ID NO: 2746 - DNA, 1935 bp, Glycine max
  Intron number 2 from transcript Glyma05g28420.1 (locus Gly ma05g28420) derived from phytozome v7.0 (chr-ID Gm05; pos 34244099 to 34246033 reverse strand)
cttgtcaacgaggatactactgattggaataacccgtaagttcaatttctcctatgttctatatctttcaagaatagtggtagattgtttgttctattctttggtattagttttttgttgttatatcctttgaaaaaaaaattggcatatctgttcacatctacttatgaagttcatctgctgtggcactggtccaaaatggtcttgggcattacttttacgttcatggaatgaaattgagatgctcatgtcaaaagtgaaatgttcatttatgatttctttttctcttgtgatctaaaaaaatttgctgctatttgtcatcagaagagtgagataagtatttttatgaagaatggttttgtgatggaggccccaaggcccaagatcactaaggtgtatgtaaggataggcaaaaggttcacatgatcaattttaggagagagatataaccaactgccaaccctgtagcagagcatgggaggggtgcatgtgggcttgttctaaggagagagagagagaatattagcctgagaagggtgtgtagaaggtaggctggaattaggcttgggctgggagagaccacacactctcgaaactgtctaggaatcttttttctttttgtaccattgtacacagaagataccaggatctgaactcccttgattaagacctgttactggaatacaaatgtttttatgcttaatttctttgttttagtctttctagcttgctggtacctatcattttgctttttaagggatttgattgtgggtgagattgagattcaagagggagagttgattggaaggaatacagttaaaagacttatttcatttagagtaagcataattatgccatctcaaatcctattttattttttttgtcattcattttgtagaaatatgtacttggcttgaagtttattgtttacaactttcttagtttctcaacttcaccttgacaccctcaacttctatgtgaatttagctgggtagtaagaagggatcatattgcatgtcacaatttaaacgagttgtatattagcagcccttgatatggtttgagatcttgacacaagtgcatgctaatgagttatgcttatctgttttcatagtacttttgggtttcacttttgtcatttgcttgcttgtaatttgtgaagttgagaggataacataacatatagaagttatgattctattttaatttatagattaaggtatattctctgttctgagaacatctgaaatgctacttttatgattgattctgtttatgtgttggatgttgatgtaacttgttaaattgattcggccattcttctgattttattacaacaaaaggagtctacacaattttttatcacacctggattttatcatgcattgtggattgataggcttgcagtcatttttttttgcacagcaaaaatctgatagtattaaaatataatcagtactaggtgtactgaagaataacagaatatacacaggcagtactctgccagccccacctacaaagataaaaccacaaaagtggatacccatacaacaaaagaaaagcccctaagacatttcctcctttaagctagaagaccattgattgttatcacatattgataatcatctttggaataatggggtttattatgtttaggtagcattctctgcattatcaaagaaatttttgcattggctttcggcatcttacttttcttgttcggatctatctatctcccttgccgagaatttggagttggttaatgcattgatgagaggaaaattcatttttcttaatgtgcaaccaacccttcccctgaaaaaagggtttctttagtactactgcaatgagccttttatgcttatatattgactgctgcaatattatgctttgatgttcttgttattgttgaattgtaatgcaggtggacttaca

SEQ ID NO: 2747 - DNA, 868 bp, Glycine max
  Intron number 1 from transcript Glyma04g02250.1 (locus Gly ma04g02250) derived from phytozome v7.0 (chr-ID Gm04; pos 1560353 to 1561220 reverse strand)
ataagacttcgcacagcaagtttttcattaacacggtattttttcagtaatcgttttaaagtgaaaatgtaattcattggttgcatggttaggttcaatcgagtttctgtaggtttttttaagtattttacctagttgtgtggatataatgggagtaactccgttgagaaccctttctttctttaacgtgagaaatgataactataaacataaacgattagattgtctttgaatggtcaagattttaatagaaatgttctatgacttttttaagtggtcacatatccaccaactaataatgtaaaattattgtttttatttttcacaataaccatgtgtttctcacatacgcaaatacagttttttcttgtttttgagcttactaagtttaaggagtaacttgttaatgtgatttttgttccttcgttagaatgacttgtccatgaaacatacttgtgacttgttagtatgattgctaccttcaaggagtggcttgatgatgttccttccgctattaatatccggttttggtattcaaattggaccttattgtgttcctgctcttcaattttgattcaagtaaaccatgacagattccaatttaaaatcacatgttatataggcacatgattttgtgctcatatttctgagataaaagcttctattctaaggtttaactaatcagcattctgtttttgctgcctttattttacttttagtgagttttgtgcttacaagttgcttgaacatcgacactgacttgggcagatttactttgtttgccattctgcccagttgaatatggtgtttcttgagtttttctttttacatccttacaagttagcaattttaattgcagagtggagta

SEQ ID NO: 2748 - DNA, 4692 bp, Glycine max
  Intron number 1 from transcript Glyma03g12240.1 (locus Gly ma03g12240) derived from phytozome v7.0 (chr-ID Gm03; pos 15350262 to 15354953 reverse strand)
tttttgtcaccaaagtgaagcgtatcattgtaaaggtactgcttttaatttatcattgttttatattatttattttattcatagaaatcaaactcaaactctaagacaagtttatatcaatttatatatcagtactatttctcctttttttaatcgaggaaattatacaaaatgagggtaagaagagtttgtttacttggattttcatttttaatatctttgtttttaatgtgctttttatttttaaatggtatagttttttttctcttttttacaggtcaaagaaaatatagatgcatcacaataagtgtccaattaattatgagaactttctctcttcattttatgtataaatatttgaaagtagaaaacaaattgaaaataaaatgaaaattttgtcaattaaaaataaaaacagaaataaataggccttaattttcaaaagaaaaatatatgattttttttctttaatttaattctcaatcttttctaaatttctcgttttgttttctctgcatcaaaatgaagtaagggagaagaggccctttctagtttccttttacacacttttttttttttttttcatatcaatgtcgcagtttcctcaacaatcaaaacgtcatcagtttttgatagcactgcattggcataaagtaaatgtgtgtagtaattttgttttaattactggatttttcagtgaatttccctatttatttgtgaatttctttttttttacgaacatgacaaattttagaaaggcgaaaatttaatgttagtacctgccacttaaatgttaattatttggttgtgtaaggtgtgatatgattgtttaatgtttatattttcttaaaaaacaaggtattattaagaaatgacgtgcgtaattataaattttttcaaagaagaatttgaagttttagtttatatttatttactattataaattatttttttaatttgtttactgccccaaaagcaaaagtttcggtacgttgcacatgtctctgacagacgggctatattttttaatgttttatttgaatatgagttgaaattgagaggaaaaaaaaaaagaaacaaagaaaaaaacaagaaagaaataaaagtaaaatttagttgaaaatttatgttgtttggatcgacaaaattaatagaggagagttccttttcaattatttggttatattgaaaataaaggaagagaatgaaaaaacttgtaaaatcataattgtatcacggatgagataacttgacggaaatacataaataaataaagatggaatagaaacattaatatctattgtaaaaaacgaaacattttttttctgaataaaaagagacattaatatatgaaaaaaggattatgtattgaaagtgtataaatatttctttttgcaaatcttttctctttttgcctggattaaaaacaaaaaaaaggagtgctataaaatatgcaatggatatatttcttctctttcatctctttcttctctttcaatttcattcttttccatttctctacaaagaaacaaaggctaagagtgctaaaaatattcacacgcttactcatgcattgcttcataattatgttatatttacattgattgtaattagttttatattatttttcctcacttataatatagttttatcgtacatactttaaatattaagtaatatactaactcatagtcattgttaagatataaataattcattcgaagttatacgtttttaaagtatattaaaattgaatttgacagaattaattttaaaccgtaaagttaattaaaatgtatatttaaacaaatatatactataaatttacattaatatatttttattaaaagacgaaaattaatattctaaaatttcttttcaaaagtaaaatataatcaagcaagcacacatctaaattttttaattcttattttgtagaataatttttaaaaataacaaacaaataagttccgagcttagcaatttaaaaaaccaaaaaaagagtcttaatgtgattaatatcaaacaattcaaaaataaaagatgagtatagaagatgtatttgttgcgaatgatggttaaggattgaataataaaaaaaacttatcttctaatatgaatgcgattttgaatattccgaagtcttctaaatttttttggtagacagtactctccgcataaaccatttgataaaattatttgtggtttaggtttgtgttggacttttgtcaatctttccatcgtccttttagcactcctccccggaatgatgagatttagatagattccctcacccttacattatttagactaacaggaaaaaaaaaaagagagcaaggaaatgtattgataaagataattaattaatttaaaagtgaggagagcacttgattctcgtttaaaatttgaaaaacaagtttctaatttggtcaaaaaaaccaattttaatctataaataagcataatatttctcatttgcataaaaaatggatgttgaaattagtttgaagatattttgaattaagaaaaacttagcttaggtcatgtttaagaaagatatctttttagttatgattggaaactgaaaaatatctttttagttaataaaaagaaattttattaaaataaataatttaattttagatagaaatgataaatgataaattttattaatttattaaaaataaatataaaaatgataatcgtatatttaaattatgtttaaaaataaatcttacaagttaataagaaaaaatcattttttacacactttaatttgatcaaataaatttttaaatttatcaaaaaattaaaatttaattaaaataacttgattaatatatatgtaatttacttttatataaatttaaaaaaatttatcttatttattattttaaagataatttctcattcaagataattaagttaataatattttttttattgataagaaaaaaaatactatttaaaatttataataatttacctctcaatctattatatttaatgaaccgaactatattaataataataagataatataataagtaagataaaattattatatttttacataataataaacaatgaattataactgttatagaataattattttattttattttatcttatccaagtcacaagagacccttgttttgatcatattcatgaaacgcttgatttaaatctaaaagatacttttctttcaaaacaaaaaagaaaatctttttaatttgtaacgaaaaaaaaatctaaaagatctttgaaaaatgaattagaaaagagaaaaaaaaaattataactgttaaagaataattatcttattttattttatcttatccaagttacaagagaccttgttttgatcatattcttgaaatgcttggtttaaatctaaaagatatttttctttcaaaacagaaaagaaaatctttttaatttgtaacgaaaaaaatctaaaagatcaatgaaaaaagaaatagaaaagagaaaaaagattcaagataatgagaattcagtcgaatagaaagtggtgtgagtgggtgaagtagcagcaacaagaacagtaccctcgattcgtggggcccacaaagccaagtattacccagtctctgaagccacctataactatttatatttcttctacgcattttcacgcactcagtcttcttctatttatttcacacccgtttcgaccaggtcctattgcattggacttcatggatcccagtcgagatttcatcaattctgtcaagcgtgttgttgtcaaggtcccacaacattttcattattttgtaattattaagtactattatgattacgattgaaccaacaagtaaacaatggatcaaacaattgcaagccatttatatcccttaattaagtagtttaagatttgaattctgattcatcttaatataaaataaattatattggaaggaaaatacatattttgtagtttccgacgaagattaatccacggagactacttcgtacaaataccttatttacaatttttattatgattatgattgttatttacaacatgcattctcttgtatattggacatagattattttttatttgtgattattgttatggaaaagatgtcacctatttttctagttaaaaaatttgccttttatttttgtttcttataatttgatgactttcttaatattaatatgtgtgatgtatgatgtatccacaaacataaatatgtctgtgtatattaagagagtctaattcaattgattggataaaatgtgagttgttataattgtctagtacctatatttgattcctactaataacaaaaataaaatacgaatgtatcatgtatgtatctattgttggaatatattgtattattttctgatgtaatgtaaagatacaaaaaaggaaagaaagtttttaatttagagggttataaatggtatattaagttctaattaattcacctgagtatttaattcgttttgctctaacatgtaccattctgctggtttctttttatttttgtgcatagtttacttgttttgtgttatgtcgcattgattatatgttagtagtatttttctttggctgagtgatacatgctttgtttataattctaattctataactagtacatttgtttattggatcatctttaatgaaggttggaacagctgttgttactcgaagtg

SEQ ID NO: 2749 - DNA, 3655 bp, Glycine max
  Intron number 1 from transcript Glyma19g19260.2 (locus Gly ma19g19260) derived from phytozome v7.0 (chr-ID Gm19; pos 23257974 to 23261628 reverse strand)
ggcgatcaggtttgaatcttgcaatttctgagatcatttttttttcttctttgaaggtaaatttgatgaactggggttgttaatttgtgttgagagatggtcgcaaataaaacaaatggtttttctaatcccactatttattgaacaatttctacgagattttttgtggtataattggttttgttaatatatttcttttggaaaaatatatttacacagacccttgtacactcaagttttttgttcgcaggaaaaaaaggatgtctggataaatatctttattcgatatatataaactgacataattataatcattagacaagtgaataatgtaccagtgacagtatgtatgatataaattacttgctcccatggtcattgtcatcgtcatcatcatttgttgcttttgttgtacttctcagattaggatcaaaaccattttaactttaatgaaaggattaattgttgccacgactatgctaatgctaaagtgaaaattacttttataagattcaccaaaaataaatgttttaagagtgaaatgccttgtgaattctgtttttgaaaaatcatatttttatttcctattgtgtaacaattattaaaagtgtgcatcaaaattcattaacaattcaaattaagatccctgtattatgtgatatacatgtgtacttactggctcaatcaaaattttaggtgaattctgcagaattgtaagaataactcagaagcggggatgtaaattagacaatagtcaaaacatcaacatcctaatgaagaaacaaaagtaagaaagaacttgtcctcagaagtcaggactgaatgtagggaattggcttctaatagcaaaatcatcctcctgcaaaggttgtagttaactgggtctcttaacttgttgtctggggttgagagagacaatacccattttggtgatctctatgcctcaaaggaatgggtctttgactatcggttgagagatacttttagtgtaaacaaaaaaagaataaaaatcctcccaagtggtttcttccactgatttcccttactgaatgattcactcttgttccacctttcacatagccaagatttgttcctgtataactgaatcctcaaactctacatctgtacccataggcagtgtaggtgttagcgttattggtttatttctaacttctaatggctctcttgagtcagacacatgaaaaatagaatgaattcaagaattctcagaagttgcaacttgtaagaaactgctctggccttggcaatgacttgaaagggaccaaaatatctaggagctaacttctatttatacttctagtcatagtttgttgcttatgaggtctgagttttaagtaagtccattccccaacctcaaaattaagacacatcccttctatgtttatttgtagttttctttcatttgttcttggcctttgtcaaatggaattgcaactgccttagagtttcatctttatccattaagactctagagatcctacctccaatctggactagaataagcactgttactattactatgccttttgattctattttcccaaagctcctgtctcatccatacgtaagttagggtatgtatggagcagacactgattggaccttgtcccaacagaaaatagcattatcaaaagcatcttttgggaggtaatccttcaggtttttcgaacacttcttgaactttattaaaaataacttgcaactcctctacttgagcttgtgacaattcatgttggtcatccctcatcccggttttatctcgcttgcaacactgcaccatatattttgaaaggctatcttggccaattatactctgtaaagatgtatcgacttttgccaaccctgtagttccactccattcccctttagttgcaacttgcaatatcatagttatttagcattgtttccaaaggttgtttagagtttagacagttggtagagggtagtgtaaggcacagaaaatggaattgagagagaggttgaatcaaatcaaacaaaagaagatgagaaaacatctctcagttgtttgtgtttatttttctaaacacttattttgaaaacaatgctaaaaacttatagattttgattggaaaattgatttctgaacagtgaaattgttttagaaaacagttattaaaactaaatgagaagggaataaaacaagtccttgttgtctcccaatttgttgtcacttcccctagtgttcttagccatgcaatgccaagaattgaatccagtcaacaccaaagcatcaatgacacaagaatacatgcccattgccacgtcaaggcggaacactctcatgtagtaaccatcacccaacaccttattcttaaccctcattctatgtcctgcatatgcaaccctaatacagtgatgatgaactttggtgaaattaaattatgggttgcaacaccctccattcaacacaacaatctcctctcacattctcatgtccactctttccttctagaataaactctccatatatttggtccatggcataattaatccagcaccttgccatttcctttttgggcttatcttttccaactctatcaatatcactctgcatctaagctttagttcttcataaggaaaaacacaatatcaattgatacatatgggccaactctatagctgtgaaaaatttgagaaaattgagtgtaacactaaaattattgttgaaaacaaattgttttctttcatcttgaattgaagatgaggagtgtgatttgcatagggaattgtattaataaagcccatctagttaaattcagaatcttgcttctcattgaaaagtctcacgtacatgcttttcaatcaattggtctgaagattaatctcgtattgatgcagaagctgaagactcgtgtcataaaaaaaaactgcaatcctgactggaatgaagaattgaccctctctgtaaaggacattaaaaccccaatacatctggtgagtactgatgcaagctacatcaattttttttttcacatactaacaaaaaaaatgatagtcatcaaggcttaactgtattgatataggcttgaattgaataaatttcttcataaatagttgtaagatgagaaaataaggaggttagatgaattgagcttttctcataaattaaaattaatttaagcactttatcttttatagaagttcttccatgtataaatcctccaaaagctgaggtgataagttgattttagcttatggaagacggaactcaattgattttaccttttttattttctttacctataagtgcctataaaaaaagaaaaaaatatatccaaataggttcacagtctttgtctaatggagattaactcattaattagtatatacattatgcatctacactatgaggcactggtggcatatcaatttctaatactgaattgtctattagtatatataatctatcgtactattagattaaacctccaatgtctatactaatagttcaattattttatagataaaagactataataatagagacaacccttcatctagatcgctgcaaataatttactcttgtccttctaggtgtgtcactatagcaccaaaataataccccaatgattgttgatggcttttgcattttgtttttctgtgcagacggttt

SEQ ID NO: 2750 - DNA, 6146 bp, Glycine max
  Intron number 3 from transcript Glyma15g27790.1 (locus Gly ma15g27790) derived from phytozome v7.0 (chr-ID Gm15; pos 30441470 to 30447615 reverse strand)
caacagtgaagaagctaagtcgagacttcgccaaggtgactatttatttcatttctgtattatgacttgctttttatttatttgttgagtgtatatccggtctgtttatgactccatgctcttcagaaattttcggctgctgccattgtttgtgctagaactatgctcagtttcctatcccttcctatgttttacatttttgcaagacagtgaaatgttattgatcatttgtttcaagttatcaattatgaagatagtcaagcaatattaacttcttgggggtgattttttctgcccaaacatttgtttccaattctatcattgtgcggtgtatgcttgaaaataattcgttactactcttgggttgtattgaagtttgttttgttttgtgtaaaaatgtttctttacattggaaaatctcatgacccctgctaagccatgatttcaggcgaagaattcatatccctaagttcctgactgcttcagattatactgatatagccaaagtaaattataccaaattaccaatgtcagaagacatggctatgcaattgtctgtttctagcaggaaattgtaatttacaaactaacactataacatataaccatgaaaaaggtgcaaagccaagcaaataattacatttgtcgagaagttctgaatgtggccataaccagcagcctccttatgttggcaactgcactagttatggcttgtaaaacaactagttttcctagaaatggctttgtttgttatatttttaaggaaagatatctgcaagtgaatgggagatccctagatttcctttaggatttggtgaaagctattcatgtagttaaaaaaatatttgatattaatatcaataaatcatgttgtattcaacaaaaccaaactagggatgatagaagtatcataatcataatagtgagaacgaatggtttttttattgaatgaaactagggagaagcccctaattgcagatattgcttctatatccagatatttcgagaggtctgggatccactccttgcactgctttctcaatcataaaagtccctaattgcagatctgagggtctgcacttctcaatgcccaaagcccccaattctgtcaaatttggacaagaaatctctctctccacctcccttcccctcttatttataggcaaacatgccttatttcttcagtcaattgtcctaatcaatagaaagttttcttacggttttggtccctataaaattttgttttacgactttagttgttataaaattgtaaagttttttgttagatattaagttacttttatctttgacagaacatagtagtcaatgctgccatcgcggcatggagcggccaacccctaaagtgggatagcggatagtgggatggccattattctaatttttttttatagatgttcaatattatatataagcattcaaaaacagaaacataactcataattcatgtactaatcatcattaataataaaaactcattgtacttaaaaattaaaaattaaatatttttgctgaaaaaaaaacaaaaaaaaaaccttaaaaattaaaaccaaacatagtacttaaacataaagtagacagatgcaagtttctaaataataataagaattcggaaattcagaatcttcaatcttcatcctcttcaagatcttcatcctcttcaagatcttcatcatttttttgtaattctccttcattctcactagcattagaaatgtactcttcctccccttcatcttcattctcttcttccacttgtgccaccttttttcctttttcatttgcatcatttaccttcttcatttgtgtttgtctcctggtgtatttcaaaggttcaccaaccccatttgcaatatcaacatctaaccaactcaaacttcctcttcaaaaacaaagtcattttcttcttcttccaactctcccaataaccactcattgctttcatcaatgtcatttaaagcaatgagatcaatcgcatcatgagaattaaaaccaagtcttagcttttggtgctcaagcctacttctcttctttgagtgaatctataataatttgaaaaaatgaatgttagtttcaattttagctcccaatgtttcataatcaaataaatcaatcattaacttacatgctcaaaggtactccaattatgctcacatctcgatgagctacaagtcaaacttaggattttaatggcaatgatttgcatgtgtggtgtttttcctccatggtttcctcccctcaactgtaaattatgcattagtatttacatgaatcagaaattaaataatgattcaaatttataagtgaactttcccacttaccaggagacaaagtccttgcttttattgctgtagtcataccaaacctgtatccacccctcttatagattaacaactctttgtgaactgcaacttcaaactcatcatcttcactaagcttgacaatacatttgttgaggccatcttccatttcaacatctttgtcaatgtttgaattggtgtaatagaacctaggatttagataataacccgtcatatgcaaagggtggtaaagttggcaatcccatctgtgatgaatgatggcaaagatattcttatacttctctttattatcattgaaagctctttgaattgtctccttggccctatccattgcctcataaatgaaactcattgtaagttttttttttttcgttatccaccaacctcaatacacttacaagaggccccatagtcttcaaagtgaaggcaacatcaaactggaacgatgccatgagaacaacatttgttgctttctttcccttaggttccttagctgcctttgacttcatccattcttctgaagtaaacatccttcttagattgaccctttgcttatgatctttgcaaagttaagaaggtggtagtaaatcttgtaactccagtcctcaccaattcgatcttgttagtgagtttcctcatggtgttcaaagccaatgtatggttgtaaatgtagcttacagcttgatgcctctttgtataactcttttaacctttgggatctttccaatattctctaacatcaagtcaagacaatgtgcaacacatggagtctaaaataattttggtcttgtcacttctaaaattttacctatatagaccagaatcaagaaactttatgagcaaagtaacaatcaaaagttataactataaaattaaaagcttcattgacaatgattgaattcttacctaccaatttatagttacctccattgtcggtcaccgcttgaatcgcattcttttctccaatcttcttaccaaagccattcaaaagatcaaaagatcttgtcattggtcttcataaattcagaagcacactcttcacaaattttgttcccaaggaacaatttatcaaaaagttaatcaaagtcctattcttcctatcagtccaaccatctgacataattgagcatccatattttattcgctcctccgcatgaacttgcaataagcccttcctgtaatccaactcctttttaaggagtgtaactctcaactcatgatagtttggaggctttaaatgagcaccataggatccagtagcatcaatcatcaacttgaaactttttgatctagcaacattgaatgatattccattcctaaaaaagaaacaggaaatgtattgaattgccgtatctcttgacatcttgtcataaggatctttcaaacttgtcataaggatctttcaaacttgtttgtctcatggcttttcctaatttgacattttcttcaggttttttggagaaaaataatcaagagctcctctgttatttgtggtcctcttcttggcagcaactgaagagccttcactttatgatattggaggcttttttccactttttctaagtcttgcaatctcgtggatgctaacttcctcttcttcattttcttcttgtgtggactccatggcctcaatatcagcttttttcttgtcaaaagctgtctgcatttctaatttaacatcctctggtacttttctacaagaattagcatctcttataatgttgagttgatgttttttggctctagtaattcctccggtagatgttttatgaccaaaatcataggtaacacttcctattatttttatccttcaagctgttccacttccaaaaaatatcaaccttatcacccgtaggcttgaacattccagttgaagaccccattgtgtaggtatctttttttttgttgatcattagaagccatggcagtggcactatgcacagtaaaacacccaaatgagaagaaaaaaagaataagagaataatgagagcaaggaggcaagcaataaaaggaaagaatgagagaagaaaaaaaataaaaaaagaaaagaaaagaaagaaacataggatcaaagagaacggagaatctacaagcaaagaacataaaggtgcgtctgagattgaatgaaagaaacgaacaaaggagggaggatgacggtcgccggttgccagagaaggaacagagaggtgtgcttgacgctgtagaaggaatagagtgtgccgtttctcctagggttctcacttctctgagttgttctcttgagtctggtttcgattttagaagggacccaaacaaaacaaaacgattttacccaaaataactctcactaatgatgtaataatgagggcatttttgaattttcgttcaaaactaggattgtggtgggacaatcacaacaaaacccatgattgcgctgtcccgctttgccgcaattgtaagcacgatgacctctccttcattccacccagtgacaggggtcttcgccgtaggggctgctccgctccggcgtgatagcgggcgctatagcgggcatttttttgtattctgaaaagcctaagtatatatatatatataaatcctagttagaacctagacaatatgcaactgagtatagaacttagacacttaaacaatgtaatatatattccaacatggtatcatagtgggtttgatcctgctcccgctctgttgtctctagtcaagtctgccaaatgtctgttgcaggctaccgttcacagctgtttgccgctggccacctttttctggcgagcaaactgttcttctctggtgagccatattctgctatgcagcagctgtcatttccagcaccactggactcgtcttgtcattgccgattgtccacctttctttggcaccatcaagctgcacgacaccggctcttttttcggtcacctctttcttttttttttttcagatctatgtctctccagtgtgattaagtagcacccactgcaaccattgtgctcatctctctcttgcaagtccgaccatctagttagtcaccacaaagaacaataaaactcttgtgcaatttgagagacctaaagttccaaccaatttccccctaccgccttcttccactcttgaccccttgcatatattctctctccctacccacaatcccatgcctactactcccactactgctcctattaagttacttttgactctcactcttaggatctggtgcatcattcccattaaaactctcatcaactgcggttcctttcttgggccatctcacataaacattagtgattttgggccctgggttttgcatcataaagtcccaaagttgataataggggttcaaaacataccaattgacgttattgagattcaaagaaagagaaaacattgtgtttaaatgagactcgttaacatgaaattggataaatgtgtagcatatatcaatctctaaggtaaggagtgtgattttcataacaaaaggaagaaaagtgtaatataagtagcgtttagtagtggagattttaatttatctttatttttattcactaataggtttaatatatctttttctttacttcatgatttcaaactcccacaacaattggtgtgtgcaagtgtgtttctatgtattaaatttgccttttttcttaaattcctttttactgcatgcatatttttcaatgtaagagtacatataatactgacttgatgattaaaatgctatttgttttttattttttcccacacggtttttatgtagacctgacatctttccttttttctattttctagttggagacatttaaaaaacaattg

SEQ ID NO: 2751 - DNA, 6321 bp, Glycine max
  Intron number 11 from transcript Glyma19g08920.1 (locus Gl yma19g08920) derived from phytozome v7.0 (chr-ID Gm19; pos 10370798 to 10377118)
ggcacctgttgctgttcgctgtgcggtaagattgctttcctatttctctacccacttattgtatgcaagctcaacacaagtacaatagcatgacttaaaataaatttttttgccaccaacacctccttaccttccctctccccaatattgacagtatagcttgctactttagcttcactggtctaaatggatcagaacaatttgacattgaacatttctgcttaaactcaaatattgtattaattgattattcttgttgccatccttcctgtttcaatttctttccatattgttgatgaatctgtttgatgtgcataactgcatatagaattttagactcttgcacatattacacatacacacatagacacacaaggattgataatttttggcaacatagttgttacttgttagtattgtaagataaaccgaaattaaactttcttaacagaatatcatatggcttgtgtatacctcacatgtgcttggtgtcatatcatatcattcttacctgtttgatggatgtcaagcaaacacaccattgtattttgtttttgttaaagttgttgtttgataatgttttatatttctagcttgttgtagaagctcttggaagctgtcctgtaatctgtcaccataggctaggttgtagccttcataatgaactattttttgtactatctgtaaattctcatatatatatatatatatatatatatatatatatatatatatatatatatatatatacatctctcagcaaactaaggctgaggatcctttttgtgtgcatattttcatactcaaacatttcaagttggtatcaaagcgggacgatcccattctgcacttctgtctctgtctatcgccggcgccactgcacctatctccaacaatacccagatctaggtcgtctctttcagcgcatccctaccccagaggtttcaaagtcaaaaaccttgacacgcgccacttctccacacatcattctcaagcgtgtgcatcccatgcacccgtctctggtcaccggaacttcgatgcgacacctgggttttggtcaccggcctctccccactctatttcagccctcagatcgtcattttggtgttgtttggatagtggatctgtacacctccatccttttgcctatatttgtttcctcaggttttgtgctacgcgtctattagtggatacttgcccttgatttctcaaaatgacatctacgaattccactctcacttctactccttctcctctctttggaactcccactattactactgagaaactcaactggaaaaattatctatcttggtctgcttcggttgagttatggttttttggtcaagggcactatgatcatttggagaaagaagctagtgaaattccagcagagagaagaaatcagtggaagacacttgacttccaactgtgcgctgttttatggcaatcaatagaacttgatgtgttggaaatacttagatccttcaagacttgttgttccttttggaaaaatgctcaagatatttttgctaatgacatctagagtttatttgattaaacaaaccgtgcattttctctcaaatagactaaccacgatatggcctcacacatagccaaagccaaagctgctgttgaagaattaaagaagttcctaatacatgactttgtggatgaaatgaaaagaagacttgataagctgttcatggtggtgattttgcaaactctacatccagattttgatcatgtgcatgaccaaattctggtgggtgagcaagttccttcaatggacagcctagtaactaggtttcttcgtgttcctactttggtgagaggtgaaaactcagttgtagcctaaacttcagcagcacctgctaaaacatcagccatgatagcatctcatggaaaaggaggtcttggaaatagaggaggacgtggtagtagatgttctcaatgtacatattgcaaaaaagcctggtcatactcaagaaaggtgagaggtaaactttcttcttttttatccttaaagggtattctgcaccagtccacatgtctacacacaccacaacaaaatggaatagcagaaagaaagaatcgacatttagtcgagactgcgcactccctgatgcttaataccaatgttccagtacatcattggggagatgcagttttgactgcctgcttttttaataaactagatgccttcttcttctcttaacaacaaaattccttattacattgtttttccactgaaccgttgtatcatgtcacccttaaagtttttagttgtacatgttttgttcataatgtctcatcaggattagacaaactttctgcaaaggctattaagtgtgtctttttaggatattctctcctgcagaaaggttacaaatgttactctctacaaactaaaaagtgttacatgtctactaatgttactttctttgaagaaactccttttttctcatcctccatgcagaatcctggttccatacagcaaattctacctgttccatcttttggtcctatgatacttcctacccaagacctttctaaccaagaaggacatcagccttagtctcctattcctagttcagttgatagtgcctctctttcttctccacacaggacacagagagctagttgttcaatgcttccagtttctcctgattcatgtccttcgccatcagctccccatacgacggatccttcctccacatcacatcctagtgaaccaagttctgattggccaattgctattaggaaaggtatccttcctccacatcacatcacatcacatcactcgaaattctcaccctatttacaattttttgagttatcatcgcatatctccatatttctccttcgtctcttccctgtcttctattactattcctaaaaatgttcaagaggcacttgatcatcctggttggcgacaagccatgattgttgaaatgtaggctcttgagaatagtggcacatgagaattagtttctcttcctcctaggaagaagacagttggctgcagatgggtttatgctgttaaagtcgggcctaatggtgaggttggtcgacttaaggcttggttggttgccaaaggctacactaagatttatggccttgattattgtgacaccttctctcctgtggccaagatcacaactgttcgactcttcctagctatggcagctattcgtcattggcctctttatcaattagacataaaaaatgtctttcttcatggtgatttagaggaggaaatctatatggagcaacctcctagttctgttgcttagggggagtctggtttggtgtgtaaattgaatcgatctctctatgggctcaaacagtcaccacgtgcttggtttgggaaatttagccatattgtttagaattttggaatgaagtgaagtgaagcagatcactgttttttattgtcatacttctcccgggaagtatgtttatctaattgtctatgttgatgacattgttattacaaggaatgatggtgccaaaatttcccaactaaaacaacacttattcagtcattttcagaccaaagaccttagctgcctaaagtacttccttggtattgaagtggttcaatcataggaaggtgttgtcatttcacagagaaaatatgctctggacattttggaagagacaggtatgactaattgtaggcctattgatagtcctatggatccaaatcagaagttaatgtcaaatgaaggtgaaccttttccagatccatagaggtatagaaggctggttgggaaacttatttatctcacaattacaaagcctgatctgtcatttgtagtcggagttgtcagtcaatttttgcaggatcctcacattgaccactggaatgttgtgattcgcattcttagatacatcaaaaagattccaggacaggaattattgtataaagataatggaaatacccaaatttgtgggtattgtgatgctgattgggcaagttgtcccatagacaggcgatccaccactggatgctgtgtatcctttggaggaaatattgtttcttggaaaagcatgaaacagagtgtgttgttgcctgatcaagtgtagaagcagaatatagagctatggctcttgttacttgtgaattggtgtggattaaacaacttcaagaattaaaattttgtgatattcagcagatgaagttgtattgtgataatcaggcagctcttcacatcgcttctaattctgtatttcatgagagaactaaacctatagagattgattgccattttgttctggaaaagctgcagtccaaagaaatcagtactgaatttattaagtccaacaaccagcttgcagacatcctgaccaagtccttgagaggtcctcagatccactttatatgttccaaacttggagcacacaatttatatgctccagcttgagggggaagtgttaaagttgttgtttgataacgttttatatttctagcttgttgtagaagcttgttgtgttttataggtccattttgtgtgaatattttcatactcaaacattgcaagtgttttatttttttcattttgtggacaaatcatgaaaaataaaagggaacctagtacaacatgagacatacatatgatacaacatggatatggggataaaacacattttaaaatcatagggcacaacttggccataatacaacataaaataaatctaacaacaacaaaagccttatcccattagatgaataaaatagatctaaaattaatgtaaaaaatcttacatcatgatagaattcatgttttaaaattaaccatgagttattctagatataataaaatgctaagatttatctagtttttttggtatttaaatttgtattagtataaaagttaaaaaaagtaaaattaaaataattataagaatagaactaagtatttttttttttgttactatgttatgggtatggagtttttaccaactttgctgatgactaatctccatcgaaaaatctgactggctacctttagtggagtccttccatcccaatcatgtttttttcatccacaaggctcgatttgatgactaagtatttttgttgttgttgttaataaaaagatcataaaggtctggtgttttctttggtacactatttgacattgaattttgtgtagccgtgaagatgtgagaccccataacatgatcatttgatcaaaggaggtccgtatttaagttttatgtgtaacacattaaatgttaatttgtattcttttcttaacttgtggagaatgaaagacttgttaagtaatatcttttccattcttatgttaacgtatcataataatggatatgcatctattttcatcttatgcatattttttatatgtccaattaatgatacttgttcatatatttttaccatgcttggttttattttcattgtttagcagagaggttatgttgcattttttacccttcatgtcccatttcttcaaaattgtcaccaattatagtgcattgatttatttgcctgtacaccatcaaaagccttttctgactaggtggagtcaattacattacatagatcaaatgatgccataatgccctatcacatatatttatagacagaccatttacatctaaatctttctaatggttttacctacagtttttcatagttcttttctacctctaattggactaccctgcatctgatcttaacctgtttattggtctactgatctctgcaaatgttcaaaccacctcacatgagattctaccatctttatcacagtaggtgcttgaccccaactatcactctattgcattcattcctaatcctgtctcatgtgtctactaatctgtcgcaacgttgtcatctctgtagcattttgaacttttttccttgttgaatttttaaaaagtcagcacatatttttaattttcctttttttaggtgaatttttaattttcctttatttttattctgtacagtgtacactaagtctgacatctagatgtggttatatatcactacccagatgttatcataagtaaattgaaagcacaatccttgcttttggatgacattagtttctcttacagaactttgtgtaacattgtcccggaattttttttcttcctgaccataaattagttaaatttgggagcgtaatagatttgtgaaattatcaactgtgcaatacattacaacccctttaagcctgtaagacccttttctattcatcaagtatgaagatgtgctttagttatgctgctaaacttaatgctttgttaggcattgaggtgtattggcgacctgattgctggaga

SEQ ID NO: 2752 - DNA, 1979 bp, Glycine max
  Intron number 2 from transcript Glyma10g30430.1 (locus Gly ma10g30430) derived from phytozome v7.0 (chr-ID Gm10; pos 39093503 to 39095481)
cacaactccacctccaccatcataataaccaacaggtactattatttatcgttttaacatccatctttgaatgacaaattatcactactatattaaccttaaagttggatcactttacaatgcataaagaagagatgcctttgggtgtttattgagtgcttcatccatggccgttcattcatttcttattctatattaaatactaatttacactactaatattttatcatatgatcgtatattatatatgcctttcctttctttttcttttttctaaagcgaaaactcagtattgggtttggaggctttactttacagtttgacccttctgcctgtggatgcgctcattctgttgatttataatttcactccctcaaggccaatattcgcattcgcagaatcattggctttttttcttcattcctattttaaaaattcatagattttgttttatactctctttttttttttatgttattatattttttaagtaccaagtttgttggatgtgttttgcaaatttaggagcatatcgttgcacttttttttccctctttacgagctactctcttctttattttttcctctactgttttggagttttgcaatcagcgatggagactacttattagttattggtactactttccgccaacgcgttttctgtgcttgttttcattaattggtagattgtatacttttcaccacgcgttttctttgctcgttttcattggtagattatatacttttaaaaagaaatatataattaaaaaatttactttaaatgaaaatatataattaaattgaatgatggtgtaaaaactacatttcaatcacaccactgatctccaatgtttctctttattgtttataaaaaaaaagtcatgcacatttctattatgcaaatacaacttgtcaaatctcaagtaagtatcgctctcgccccatggcagacgcaataggcgcgcaacactgcaacagctgacttcgtttcaatttcaacgacgcccttaaccaggtgtgggtgggacccgtatttacatatttctattttgttattcaatgtaaaagaatcattttgtatctttgaatcattttttttcttggtgtcatgatatcatataaaatataataatttttgttatttttactataattgtagaattaatatgaatttttagattttatttgaacagaaaaaagaaacaaaatctctctttttttctcaaataatattaaaaataattttttcttataaaaatgaaatttttaagagttttttcccctaaaattcaatcttcacatatgaaaaactcttaccaagaataatattagatttggtggagattttgcaatggtagcaaatgacttcattaatcaacgttgcatattggatccttcatcttgactttaacggtggaaccctaacctaaattcaacatttaaacattttattttttgagaaactgaaataaaaaagaaaaaaatatattttgaaaattgatattatttaaataaaagtagaataactcaattttttttagtgaagtccacacaagtcatgaaacacggacactccaatgaaggctgatgtttcctactcttgtggattcgcacgaatcaaatactcgttgtgtacctgtgctgtgtttatgcccgtgtcaagtattatttacgtgtgcatgcagcatgcctacaaaacctcttgggagagagtcgaccccatgaccagagtctagctctcatctacattaaaaaggattagtgtatacaaatcattgaaaacaattttttatttaatcagtatcagtccctcatatggtaatgtttgcacataaattgcttactatttaaaaataataataatgctcaaagtaataatttggatatggatgaattatatttgtgatgttgtttagttaatgatgaatcccgttgcaacagtttcagggccaaccagctgcagctccagcatcaat

SEQ ID NO: 2753 - DNA, 445 bp, Glycine max
  Intron number 1 from transcript Glyma09g34000.3 (locus Gly ma09g34000) derived from phytozome v7.0 (chr-ID Gm09; pos 40441705 to 40442149)
gttaattctgttgttttgcgtgtttctggactcaggtaatttctaaagcttatctcggttttccatgcgctattcgattcagaattttaatatctgccagggtttaggacttttttatttttatgtccgtttgactttgcgatttggggcttggatttagtagatcaggattgagtttggttgttcttgctgtttggaatgattttctgtttatttgtaatttttggagctgatttggttttagaagtgatatttatagagtttgttttttattttttatttttggagtggggggttgttttgatttgttgattttttatacggtgtctttggttgtgatcgttgactgccacgactttgttataattttgcagttttttttttgtaagaatttttattctgttaaattctatcatcaggagctgcgctgttcccggggaaaagc

SEQ ID NO: 2754 - DNA, 3113 bp, Glycine max
  Intron number 6 from transcript Glyma08g34280.2 (locus Gly ma08g34280) derived from phytozome v7.0 (chr-ID Gm08; pos 31222855 to 31225967)
agaactcccagaatgtaagttttctgcctcttatcaatatttatctaatcaataagtgacaaaatccttacatccatgtttgttcttgcttgtttatttagcaaaatgatgtcttaatgagtggtctacctctttccagattaccaaaatattttctgcaatattttgctattgtagcagcattaattggacatgatataattctgaaaagtgaccatattttacctaatataaattataaattgtgtcctagggggtgtaaactcatgacttctgaaaaagttttgtatgtaagaaaatattaattaaaagcatttctattgcaagtttacaaatgagaaaatgaagggttatgtggtttagtacagttttgatacaaaatagctaaagtcaaattctaagagagatcgtgataatcatttttaactttctaatgtgtttggacattggtgaggaaaatggcatggttctagggtttatagctcttgtagcctgattttcagtttgcttaggaattacaggtttatcacagttgataagtcgaatcttaaaaccaaatatcatttagaaaatgtaacatgcctttatttccccattgtcaatagagcttctgattgagctttcaaataaaaatcaagtgatatatctttattgtactagttgttaccataactgttggggctaataatttcatttaatttgttaaactaacttatcaatgtctaaacaacaacaaaagtcttatctcattcggtgaggttggttacatagatcgcatgatgccatttggctcagttaaataccaaatctttatatattttatttaccatcagatccctcctcctcaatgtccttctaggtcttcctctctccttgttcataggattaaaaaccatgcaatctactctcttcattggtacctccagtggccttctttatgtgtccactgtccaaaccaccttaaccaattttctgtcatcttttcctcaattggtgctagaccaatatctccttgtgtatacaatcgtttcgtatcctgttctttcttgtgtggccacacatttgttttaacattctcgttgctactcccacctttttctcttgtacctttgctcaacattcaatactatagagtatagtcggacaaatagcagtacaatagaatttgcatctgagtataataggtactttgtgataaaaaatgacccccaattgcctctttgcattttagcctgcttgcatctcgtgtgaaacttcctcattcattttcccataattttgcattattgatcccaaatatttaaatttagagacttgtggtataacattctccatcttccaatttatattcctcttgtttcttgctaaaattgcaatacatatactctgtcttactcctacttatgtgaaaactctgtttccaaagtttgtctccatgtctcatgtttaaagttaattgtttcctgtgattcttcaataaaaaatatatcatctggaaaaagcatgcaactagagataatcttttctatgtcactagtaagcacattcaggactagattaaacaagtaaagacttaagggtgagccttaacgactgatgtaatcatatgcatttaggaatatccttattctcgcctcatggagaataagatacatgaacacctttctcatatagcttggatgttagaaacatgaacacctttctttttcataaaatctttcacaacatttctcttggcactcaatcgtaagttttttctaagtcaatgaaaactatatgtaagtctcttgttttgctattgtaccttcccatagactctcataaatgataaatggctttagtagtagaccttcctggcaaaaaaccaaaatgattttctgcaatcctcatcccttccagtaatatacgcttactcacattttcccttaatttgatagtatggctcataaggtttatatttttgtagttaacacaattatggatatctccattgttcttaagacttaaatggaggaaccaaattgctcttcctcaacttatctgacatcttcgatctcaaatctcattaaatagctcaatagccaaatgccttgttctcctatacacttccatacttcaatagggataccatctggaccaatagttttaccattatccatccacttaagggtttcgtttacctctccaatctgaattctacggtagtaagtctaattctgttcctcctcttagatttctaatccttttatattactgactgatccttttccatcattgaaaaacttataaaaataattccctcatttttctttgatatctttgtcccttaccaaaacttcgccttcatcccatacatctcatttgatctaaatatcttgttttcctttctctatttttgtcaaggttattatcctttgttattcattctttgtctcaaaaattttgtaagactcttcaaaagctttaaatcatgcttcacaacttttcttgtctcatttctagcattctgataccttgcccaatttccaacattattgcacccatgcaaggctttaaaacactcttgttttttaccatgtttttgaacactttcattccaccaccaagattctaatttatctcatttcccaaaacctcttgattcccccaagactaaacatggtgtccataaaataaaaatctcaaagaagctagaaactggtgcacaattattttgttgtgctgtggattagcttcatatactatggagttttcagattgattaccattgaactgaccagtaggatatatgaattgaaatatggtccaaagctttaaatattattatataatgcacatcagtcttatttctggtgaatctttattcctaaagctgttgaggtttatacccatacatagtgtagcatgtttatgtttgaaacaatgagaatctgccttctatggaatcttaagaatgtttagattgatctttagaaatttcatttattgtagattgtagatgctgccttatttttttgttcctgtgttttgtgcttccactgccttgtgtccttgtatttatttcaatgggttttgtaggattctcaattgaaatcaagggagaggcaggactc

SEQ ID NO: 2755 - DNA, 8957 bp, Glycine max
  Intron number 3 from transcript Glyma16g08150.1 (locus Gly ma16g08150) derived from phytozome v7.0 (chr-ID Gm16; pos 7399999 to 7408955)
aggattttcaagaacgttgccaaacctggtgccaagtaagtgcatgttaatattctggtttttatttcttcaaattatgctttttgattagttaattaaggttatatatggatcggatttggttatcatacgtgccgttgctttttctattaattattttaagagtctttttctagtgtttttatttttatttttaaaactatttatatatgatgggttgattttactaggacaagaaatttcggtttgaatggagttttgtactcacttaattagcaggaaacaccatcctgaatatatgttacttttttcttattttcttacatcaaacaatcaatgtaagaattagttatatttcaaccaatataaaaaacatgatgaaaataacatgttgcatcactcaggattacatttcttattataggacaaaaagtgaatacaaaacttcgttgttcaacatttcttgttatcctaagtgataaaaacaatgtaaatagttttaaaatcactctattttgatacatgatttttttattacttgtttcgtaaaaaatctaatatatgtaactaaatttaaaaggtaaattaggatgaaaattgtaaatataattgttcaacaacaattgtacattatatatgttgattgtcactccttcatttacaaattgtttttgatacatggagggtccttcatttacaaattgataagtgatatttggacgtaataatttcaaacacctttttttgagatgatttcaaacacctcattaatatctataaggttgtaatatttctatattttttattttattatgttactaatcatatttattatgtttctttctggtctctttgtctctttagatgtggattagagttggatgtccactaactattttcttacgaaaaccaacatctgttattatagtccaagattattggaggatcccttaatcctcaccattagttatggaatactcatttaactgttgagatgtcgctaagacacgaaaatcagacctaactctagttgatcctgacacgaacaaatacattttataagctagtaaaacaaaatacaaatggccatttcattttaggatggattagggtgaaggtgagagataaaaaaaggtcgagagaaaaaaataatagatatagtatgtaatatatagaaaaatatagagaggtaaaaaaaaatagatagatgtatgtaagagagtaaaatatatgtttataaggacacttaatattaatgtagacttactaacaatatttctcttaaaagactactaacaatagttatactaacaatttaattttaatttccactagtaaaagtctatgtcaatgtaaatttaccaaaagacaaacctttaatgttagtaaataaactttttgtagcgtaataaatcgatataagaatatgtttttcctatttatttacctcagatacgtttttcttttatgaaaagggaaagctttagttaagagcccacagctacgtttaattaaactgttacagttatcataaataaaattattaacttagtttttttttcgctgaatcttcatattttttctgaattattaacttaaattctttaaaagttgaaaggttctttttttttatcagcaacaaattttagagataattaacaaaatggaaagattaatattatatttattaattccatcttttttaatctaaaaggcacgcagaaaacgtggtaaaaaatcagtatctcttcagaatgttggaataaaaaatcattatttcatgacacaaaatttctaagccactaacagtggacagtataagtgattaaggtactttattcttttaaaaatacaaacaaacgctataagaaaatccgagaaaaaaaaagttagccactttcgggtaggtcaatccaaagggttgtgaattgtgatcacttgtccccttaatcataagtaaaaactactatgaagagggtcaattttgttgttgttgttgaaaaatgaaaaaggtgaatgggatttacaccacaggatatattgcaagtcacgttcggacccagatgtcatagcactatctattgtgggtttggtaattggtcccgtgttcattttattttttttacatttgttttgtggtccttatatatgatcctcttaaaatatagaaataataagtctaaggtgtgtcgtgaacctaatcaaattggtgcttcatttcgtactcagagtcagtggtcctgcattcgtttagtatttcacttctccatttatcgatccatttccgcaatttgtgctcagtgcttctctttggttgctcaatgtggcagtgcgtcatgccgcaaaagaaagaacgtatttaaaacacatacacaatctgacctaactcagtttaaataaatttaaatttaattaattgagttggttccatttaaatagaaaatatatttcaaatcaacccgaatcaaatcaaaatattaattttaactagatagcacatttctttgcataaacttaggtagatgacccttgtttcaaaaaggaagcaacaggaaacgataaaaagagagataagatgaatatattaattttttttctatttatttgggagaaaaaaaaagatttttttaaacaattacaaaaaattcctcccaaattgacatgatgtcaagaaagaccagctctcacttttttttttaattttaaaataataataaaattttcatatcatgaaaatttaaagaattactaatgttatgttaagaaaaaaaataattgaataaaaattttatctccttacttttttgcttcttatttctctccgttgaaattttttttcaattttttctcttatatattttcattttcgcattttatttctttttctttatattttaattttaatataaataattcataaatatcttgtcactctttctttaaaataaagtttattttgacaatatacatttgttttttttatagaattttatcgtgggatttgttatagacctagtattagtaaattaatcaacacttaggtgatgggtttgagagggttataaggttgagtggatgataaaaaaaaagaaagaaaaaagaaaaaaatatgagtttaattcgttttgttaatataaaaaattaataattaataattaatgtttattaataaaaaatgtgatagatttaatttaggccgtcaaacaaacacgccaggtgcttagatccattttttcatcaacacaaccatagccggtgatcaattttctattattatttttattcaaactaagttaagcgcaagcaaagcactactgatgaattgtgaattgtcccaccaagaccagggttttagcttggtccaagaaaagcactttctccacaattcctagtacattttgttggggtccagccaaaagtagtcaagctgcatttaatgcactgcatgtctctttgacaaattttactagctttacttagatgaatagctagggggtgtagtaatatttgaaaggcatgaaaaatgttttacggtgcaagctttgttgaaaatcttagtaaatttctatactaccttttgctttctataaataaaggggctttgcaggtgaaggaaattatggaacagaaccaaagcaaagcttctggatagttgtgagaacatagtgaaaagaaaaatagtaaatttggagagtgtgagaaaaatataccggcataggtataaactctataactttttgatactgtaaaacacaatattcaaataaaaatgagtttgacaggaaacagtatattatatctcttatgtgtgaaagagagtaaaaagaatattataatgttctttaatacagtgaactattttttgaagtttgttcaatggttttttcctcgatattagagggtttttgacattaaatattgatgttcatttttatagttactggtgtttattttattgctttcgttgtgtcacaatttttaattttaatttacactgatcacgttttgcttgttgagcccaacaagtgatatcagagctttagttgaggctcagtattgtgtaaattaaaatcaaggagaacaatggtattatggtcaagctcacctctacaaactaccccatttggaagccaaaaatggaggatatacatttctacaaggatatgtgtggtcttgtggaaaagggagatgcaaagccatacaacgtgacagttgaagactagaaaaagtcacattagaaggccatcgatttaattaggcaatgggtggatctcagtgtattccaccacgtggctgtagagacaaatgcccaaactatgtgaaaaaatattgaaaagatgtatcaaagaaaggctgcacaaaacaaaacttttgtcattagaaggttggtgaatttaaattataagaagggaagatcaattgcagagcacttgagtgacttctaaaacttgatgaaccaattagttaccatgaagttagtgttggaagacgaattgcaagcactgttaattttgagttctttgccagaaagctgggaaactttggtggtgtcattaagcaactttgctccaagcggacaacttactttatctcaggtgaaagatagtatgttcaatgaagagaccaaaagaaaagacctgggatcaagtagttctcaaacccttgtcacaaagaatagagggaggagtaagagcaaaggtcaatcaagtaaaaccaaggatagatcacaacctcagcctcgaagaaagtttaagtgttatcaatgcgatgaaaaaggacacctcaaaagaaattgtaaagcttggaagaacaaggagaagaaagatcggaggaaccaaagatccgatgaagatgaaaacaccacatcccctataattgatggggaagtggtgttgatctctattgaagaagaagaagagtgtcatgttgtagattcatgtgttgaatgggtcaatgaatcaacaacatcttatcatgcgacttccaacaaggaattctttattgtgtataaagtaggagactttggaaaagtaaagacgggcaatagtagcattgcaaacatcattggaattggtgatgtgtgcattcaaaccaataatggttgcacactaacactgcaagatgtgcaacatgtgcctgatttgcgtttgaatatgatttctttgtatgccctagatttagtcagatatcgcaaaaaaattggtgatggaaaatggaagcttaccaaaggttcattgatggttgcgaaagacacattgtattcaatgttgtgcaaaaataaagtcaaactaatcagagatggattgaatgcagttgagatgatgctttgccaaatttcatggcatagaagactagctcacttaagtgaaaagggattgcaatttttgataaggaagtccctcattccttctaacaaaggtgcaaaattgaatccttgtgattattgtttatttggcaagcatcatagagtatatttctagaaaacttcaaagttgaaggataatattgttctggatacggtttattctaatatgtatgaacccatggaagtggagactcttggtggtagcaaatattgtgacgtttattgatgatgcttcatggaaagtgtgggcgtacttcttaataatgaaggaccaagtttttcaatacttcaaaaggtttcatgtgatggtggagagagcagttagtaaacctttgaagtttcttcatatggataatgggggtgaatatacttcccatgaatttaagaattattgttttgagcatggaattagacatgagaagaaggtacttgaaacctcacaacataatggtgtggcccaaagaatcaacagagccattatggagaaagttagatgtatgctcaaaatggctaaattgcttaagccattttgaggtgaagctgttcaaaccacgtgctacctgattaacaaatctccatgtgttcctttgggctttgacatccctaaaagagtatggtttggttatgatatcagttactcttatttgaaggtgttcagatgcaaagcttttgctaaagtaaggaacaaagacaaaacttgatgataaagtcattccttatatatttttgggctatgaagacgaggaattcgattacaggttatggggatcctaaaaagagaagagttactagaagtagagatgtagtgtttcatgagtaagaaactatgttggattttgatgcattagaaaccagtgaacaaggtggtaagtttgatcttacaccaatcacccacgttagaagaattgccacaaaagggtaacatcttgatgatgaacttagggttaatcatgagctagcaattaataaaagatggtgattatgaaggtgttgagtaggaagagcaactactgcttaagagatcaaataaagagcgacaaccatctaaagggtaccctagttcaaagtacatcctcatcactgatgaaggggagccaaaaagttttacaaaagttgaaattcataaggataaagtccaatggaggaaagctatgaaaaaagaaatatattccttacagaaaaatgatacttatgaacttgtgaaacttcctaaaggtaggaaagccttgaagaataagtgggtgtttaagcttaagaaagatggtgacaagctagtgaagtatagagcttcggttttaggcaaaagcaaggaatagacttttatgaaattttctctccaattgtgaaaatgagttcaattcgagttatactcgaattggttgctagcttggatttggagcttaaataaatggatgtgaagattgcatttcttcatggagatttagataaagagatttacatggatcaaccaagaggatttgaggagacgggaaaggaaaacatggtttacagattgaagaagagtttgtatggattgaagtatgctccaagatagtggtataagaaatttgactcattcatgacgagtcatggatataccagggctgatgtagatcattctgtatatgtcaaaatatttccaggcaacaaatttatcaccctcttgttgtatgtagatgatatgatgataatgggacaagataagatgattggtgatttgaaggagttgtcaaattcctttgatatgaaaaatcttggcccaccaaagcaaattctgggtatgccaaattttttagatcagaaagctagaagaaagctatggttgtgcaacaatatgtggaatgggtcttagaaagatttaatatgaagaatgtcaagcttgttagcccaccactggccaatcattttaagctcaacaaaatgagttgtcctactagtccaaatgaaaaagaagctactatggttgctataccatactcctcaacagtcgagagtttgatgtatgcaatggtctacacaaggccagatattgctaatgcggtcggagtggttagcaggtttctctctaatcttggtaaataccactaggaagttttgaaatggatattgaggtatatgaaaggcacctgtaataagttcttatgctttggcaaagcatgcctaaatttggaaggctatacaaatttggatatggtaggtgacttggatagtagaaaatctacttcaagaattctattcacttttgtaggggggctatatcctgacaatctaaattgtaaaagtgtgtgccttatcaactactgaaatagaatatgtttccatgaccgaagcaggaaaataaatatttttattcaatagatttcttcaacagttgggaatgaagtaagaaaggtatgttatccattgtgataatcaaagtgctttgaatttaagtaagaatgtgatatatcactctcgcacaaagcacattgatgcaagatatcattggttgggacaagaagtggaagaacattacatcaagttggaaaagattcacactgataaaagcccaacagatataaagacaaaagttgtagcacgagaaaagcttcaactttgtggtaaggtaattgacatggattgcctgtgagcaattgaagatattccccttggctggagagagagaattgttggggtttaaccaaaagtagtcaatgtgcatttaatgcattgcatgcctctttgacaaattttactagccttacttagatgaatagctagggggtgcattaatatttgaaaggcattgaaaatgttttacggtgcaaactttattgaaaaacttaacaaatgttcacactaccttttgcattctataaatagaggactttataggtgaaggaaattatcgagcagaaacaaagcaaaacttttgggtagttatgagaaaatagtgagataaaaaatagagtgttgagtaaatcgtgtaggaaaaatacaccaagatcggtatcaattttatagctctttggtactataaaaaaaagtatttgaataggaatatatctcacgggaaacattatattatatctcttgtgtgtgaaagagagtagagaaaatattataatgatcttgaatatagtgaaatatttttaaagtttatttcatggttttttcattgatattggagggtttttcacgttaaatattaatattcatttttataaataccaatgtttattttattgtttttgttgtgttgcaatttttaattttaatttatattcatgtttcactacttgttgagccaacacatttttcataagaataataaactataaagtgggatgaaatattttggtgggccagagttgtaaattgcttcattgataatgtgtttgggactttgagtcaactaattaacataaatcattgaactggtagttgaccttttctttgacaaatcattgaactagtatttgactttttctttgacaaatcattgaaaaagtaacatctgaaaataattaccaccgagtatatatgactgagataattaattaaaatatggtattttgtaatttattgaaggtatattgaagaggaggatctc

SEQ ID NO: 2756 - DNA, 5254 bp, Glycine max
  Intron number 8 from transcript Glyma05g05190.1 (locus Gly ma05g05190) derived from phytozome v7.0 (chr-ID Gm05; pos 4480649 to 4485902 reverse strand)
gtccatcctcaccaagtactttgttgagggtaaatatctttaaatgttaagtctatagttgattgttccttaaagacatgtatttggcaaaaggtctggtttgtttgcaaatgcaagtagttctgttgtcacttttaaatttaaatgatggatgaagaaacaatgaccacaattgtgtaggtaagcggctctagcattggagcacccacctttcaggaaaaaaattacagatagttagtgctttgaatttgagtttgcaaagttagtgaacaaagaggctttagaaagaaatactacttattgcttttctgagaatacagaatttacacgaaataggctaaagctaccctaatcatagaaggtaaactgaaagagtgaggaatttactcctaacctacagacttatcaatcaggatacaatcaacagattacaataaatatacaatatttacagctacttgcattaagtgctacctcctataatgaccaagatcctatccaacactccccctcaaccctgttgttagcccaaaagaattggacaggttggttgggcctcaacatgatgggcttttggatgtgggggcaatatgattaaggggctgagagactgtgagagaagaaagaaaaaaggggatcctgtgtagggggaaattagttatagggctagggccctcatgtcgtgagtgggggaggaggaggtgtttttaggaaggtggaatgaggttgtgagggggcagttattttggcagacttgctggtagctattgagggttttctctctctctctctctctctctctctctctctttgtgaggtcctggaattgtattttcatcaccctgcagtggcagaggtgtttcagtgttgatcaataccagtgacttgttccccatatttttgtattgcacttctatttttcccgattattatctaacattttggttccgttgccgggaaacaaacccgggtctcctgggtgaaataagaatattagtcatttctagcttgccaaataataattcaaatccaggtgttgactatgctttggtgaataagtccgctttgtggtgtcctgttggaatgtgaacatactgttaccccctgaaataatttcatctttgataaaattcgaatcaattttacaatgtttcgttgggccatgctggactggcttgtgaactatgctgttgctgattcactgtcactacatacctccataggacattctctagagaattttaggtcttgtggagtctcaatccaaattcagacataatccttatacgattgctatgaagtcagcttcagcgctcctccttgccacaactgattgtattttgcttctccatgtaacaaggtttccccataccttttgtccatacccaatcatggacttactaactttagttgatctagcccaattaaaatttgcaaacccttcaatgtctcttatcctgcatttcttaattggaattcctttgcctagagtacccttgagatatttcagtacacagttggctgcctctagatgccttttagtaggacattgcataaattaacttattatgctgtagagaatgttgggccttgaaagtgactaatatatgaatttccctaccaacctttggccctatcccctgtctactagacattcattgttgttggatttttgcttccactttctctctactctctaaatgtgagagtgacctaagagtttatcaagcctggattgagattatgaataaaacatttaggaccaaagacttaaggaggaaagaggtttaataatctgtaaggaaataaaacagactgaggtatttgttgtaaataatagaagaaagcatctggttgaaaagatagcaaggagtaggcacagcacatcaccccaaaatggtgaagaactttgggttagtgttgtagtaatagttgtctgatttgttctcttaactatgcaagttccttctctaattcattgctctgataccatgttgagagaggagagaaacgggggatatgatggaatccatgtgtttgaaatacccagaaaagacttatatgctgggcgtaatgaaaataaggatttacaattatcctaaataccatagttacataataatatacatcatgtaatcagcccataatcatcatatttacattctttctatcagagcaagatctccagataaaagaaaaatcccttggcagacaggagtacacactaggtcttcaaaggagagaccaagtcaaatacaggaatttgaggggcatcacaactaggtagatcaactaagatttgaaaatcaaatccaaaatatgctaatgtagcattattaaagataataatgtgaaaaggcctagtacatatgaagaagcaacactgtcaaaggagtggatagataaaacaaaagatgagattgatgcattaaaatagaattaacttgggaaatagggccatgatctactagagtgcagcccatttcttgtaaatgggtatacaaggtgaagagttgtccaaatggatcagtatatcagtagagagatacaagacccatttagtggtttgaggattttcacaatacaagtgggactatgacaagaaatgtagttcaatggctaaaataattagtgtgtgcttttataacaagcaattaataagtcttggaggctttggcatatgcaagaatttatttctaaagagtgagttagagattaagaaatatacatggaacaaccaaggggtatattgagagcaagtttcacttatgtatacaagttgaagaaagcaccatatagaaaaattaaacttgtattacaacgtgaatattcaatgacatgactcaagcttgtttatgagagcacgagatatatgtttaaattggaattaggagtaagaaaaatgcttagctacacactcctaatgcaccctcttgaacacactttatgttattggctgaattttattagaaaacccaaaatttgtaggtcttggtccttatttaatgattctttagtgtaattagcattgcaatatcctacgaccttatagttcacacatttcttgtataatatataataattaaatgtactcttaacacaccttaatatccaatgtactatgttgaatcaacacactataattgcataggagtaatatcttggtgtacacaacccattttatctctgtcaagtacaaaagtgaagaataaagtagcaattatggctcaagagtgtatgtgtaacattcctgattttttacttcttgacggctctcacattattgcacttcacgcagtaacacttcactcaacatccttgttggtcataatcctccattagtcagaaccttccgtaggtagtcattttcgagatctcgacaatcggctctgcttgcttccaggattaatgactgaccccacaaaccaacaagatttttcagcgtgctttgacctcattcacacgttttctgagaaacttcccaaaaggtcacccatcccataactactccaagtcaagcatgcttaattgtggagttcttatgtgatgggctaccgaaaagtagatgcatcttattggtataggtagtatcaattaattcttttaagtcattctcagttgtacagtctcatacctgcataatctctgaatctctctcattctggtgtgatttaattgggatgttacatgcctaccaacttccgcttggtttgtcctcgaaccacaccatactaggagaggtatgctcttctaccatttgtaatattcctgattttcgacttctcggcgactctcacacgatggtacttcactcaacatcttgttggtcataacttccactggtcagaatcctccgtaggtagcccttttcaagatctcgataatcggctctgtctgctttcaggatcaataactgatctcacaaactaacgagacttttgagtgtgctttatccttgctcatgctttctgaaaaacttcccagaaggtcacccattccataactatttcaagccaaacacgtttaactgtggagttcttatgtgatgggctaccgaaaagtagatgcatcttgttggtatagataatatcaattaattccttcaagtcaacctcaattgtataggcgcatacctgcacaacctctggatccctctcattctgatgtgatttaatcggagtgttacagtatgtgtcctatgcaatcactacaagatctatatcaacttactgactatgggatggagttatattacaaaaattagttgacaattttgggatggagttatattacaataattagttgacaatttgtttagtagagaatctagtgtatcatgccgtgacaaagcacgtagagctgattatcattttatcaaagaaaagttgtggtacttgtggggcaacaaggccaactttcgaatatatttatagaacggcttcagagtttaaaaagtttagatgatagcttggtgtgacgacaaggtccaaagagagaataattgagcgggagtgttaagaatgccaatttattcctccacttacagtcttactagcataatccagaatatactagatgctataactgccaccatatttctcaaagcatcgggatacattttatcaccaccattgtcatgtattagtttgcaaggaattttgtcttatggcagattattttttagagggagcttgtcgtcaaactatatgaataggatttgtcttatggatcacttggccgccaaactactaacttttggatggagtttctgccacttatttatactggcatacaccccatatgaataggatttggatgttgtccatttgtgtgcgagagggtttgagataggagtgctaggttagagcacccattataaccataagcgctcctcagtgtatccgatttctcatttgtattactttctattactaaattgaagtttcgtttcaagtaaattttacttgcccacctcttcaaattcaacacaaactctcttgtttctccgaacaggcaccgtacttttggcactatagttcatcaccttcaccagcttatatatgcctttttctttcttttatcctccctatcaaatgttggagggttgtgctgaatcccgtgaccatgaccttttcaacccgtcttggttatttgatcatgtctgaagtggctgggtttactatctctttcatctttacatgtttctttcattaccttgctattttcaattgtgtatatcttaatttacaacagg

SEQ ID NO: 2757 - DNA, 3130 bp, Glycine max
  Intron number 2 from transcript Glyma15g16930.1 (locus Gly ma15g16930) derived from phytozome v7.0 (chr-ID Gm15; pos 13176522 to 13179651)
tcacatttccttcatccggtggtggcaatattctggtcaggatttctctactccttcttttcatgcttggtttttttgtctactttggtgcaatactactgctttcttttggtttaatttgctgctttactgtctttgaactggatcaagctagctttagcataaaactttctaaaaaaaaaatacaactttttcataaaggaattaaaagcaaccattacatttattgaacaaaaaaacactaaaaaaaaattaggcaagctctattcttattattttcattaaaaacggtagaattaagttagttattactctctctgtcacattttatttgacgatttagtaaaaaaaaaaataaaactcatttcgttttgattgtcaattttacaatatagattacaatatagatgagaaaataaaaaatagattttatctattatatccttaatcatttatttattgtggagtgagaaaatgaaaataatatagatgagagagaatcaaattaatataaaagatatataagaaatatattaaaatattacataatattttttcgaaactctaaaatattaattatatttcttaatttttgtgattaaattttctatttcaaataaaatcagatagaggatatctttgtcaataaggttcccatgaattactgtaaatcttttaattcttacaaataaaaaaaaaaacatacagaggaactatttcattttgtttgatatttaagattttaacacataaattaagaaatataattaatattttagatttcacaaaagttataaagcaattttttaatatatctcttatttagatgctctcccatctatatttctttcttctgtttttcactttgtaataaatgattaaggatacaataagaaaaaatatttaatattttattcatatcataaatggcaatcaaactaaaacaagattttttttactaaaatgacaaataaaatggacgaaagatagtactatttggtttaaattctagaaagcaaaaaataaatctacttaagatgatataaatgaatcaactcttaaatgattaaacgagtcaatcgatctcaatttaccaaaagcaagtcagacatgtcccacttttgaaaactcgattgaaaatattaatccactttttttttctttttttaaaaaaggaacgtatctcttatttatgtaccccaaaaaaaacatttcttctcatttaaaatttattaaaaaaattataagttttaatactcttttcattgtataataatattctttatttaatgaatctcattagtaattttatatttttaatactattttcattcctaaacttttgttattttagtattttaagtttatttcaaaatatttgtggctttagttcccatggaatattttttttctaattatatctagagttcagcatgtggataagttcgcccacgaagtccagagtccatcaaggccacaacacatgaagttctcattccaaatgggttcatttttagcgagcccgcaccacatggcttataaatttagtgtgtcgatctgcatatgataaaaaaaattcaaaattaataaaaaaaattaaattttaaaatagaaaatttgatccattttaaaccattttaagaactaactatgaattgtataattaaaaaatcatttgctcaaaatgataacataatttacatcttaagtcacttaaaaagtattattctacatcatgtttacttaatatatattatatactaaatcaaaatattatatcatcattaaatcaaaatattatatcatcatttactaaacattgaatcatataaaaattatttcatttctatgctttttttaaaaattttatatatactcaatttacatcccttatttattaatattatattttttatattaaattgtaaaagactgtgagccatatagaaaatctatttaacttatgggttaagtagatcagactaaaacatgtgtaatttaaatgggcttaaaatattcagacttatatattatgaggattgtggattgtgagtttcatgtgtgacatgcccacccaaacccaaatattaagttataactatatccattcatataatggagtacaaattatgattaaattattcactttaatttacattgaaaaggaacataatcccttcaaagaaatagataaattagttaaaaataatatagaaatttgtaaaataataaacaagagcattttttaatgtgtaaaactttttaaaaactgtactttctgaatggaacgagtaaattttaattaataataaaaaatgtattataaagaatatttaagatatactagaaagaatactttttcaaatctattattaacaatctttttcttttataaatatcccccaacatgataaaagctagctatttatttttttctttttcctcgtatgagtttctttgatttgaattctctaaagtcattaaaaataagtgtaaagtaagtcttttcaatagtttgatgagaaaattaataattagtatttcatcatatatattatttatattatgcatatacatatattagggtttcttgtattctttgcaaactaacttatttcataaagctgacatcgattcttcgatcggtgcgttttcatgtgctaaagtttgagatttggcttctctaaaatgagaatatacactttagaggagatacactgtttttttttcttgtacaaagaggagatgcaatttagaggacgaatatattaaatatcaatatattaagaaaatgcttgactggatcttttatttgattattaagggaaggagaaaaatacagtacagtttatggctagcatttgtatttctaattggtactaccaaaattggatatccaattatcatcaacagttatgccttactaaactttaaccattctcatacaagctttgatagattgcaagtgtataattagttaagaaaactatatgagggaagttaaacccaaatcatttttgtatggcaataatgctgcagtcctatgcttaatctccttacacctaaacatgtacataaaaaaatgatttgatcaggtaaaaggaggaacattgagagcttctgattcatt

SEQ ID NO: 2758 - DNA, 7473 bp, Glycine max
  Intron number 2 from transcript Glyma06g36610.1 (locus Gly ma06g36610) derived from phytozome v7.0 (chr-ID Gm06; pos 38891239 to 38898711 reverse strand)
tgctgctggaggttgagactgttcttcagactctggtacacttttcctcacttgggtcaatttgaatttacaattttgatgcaaagttgttggcttttgttttgtctggggaagagaactaatgtgggtgtttggggtttggttggtttatggatgaaaatggaaaccttttttcttttttttttcctttgaatttgtgtttgaattggtgaatgatctatcaatgtatatgaatgccgagattttgttaacaatactatgttggtggaggttgatactgttcttcagactcaagcacccatttcctcaatgggtctctttgaatttgcaattttgatgcaaaattgttagcttttgatttctctggctgatagaggtctaaagaagaaggcttgaggctacattggagtcaaatagtagattagggaattgtgtaattttggtgttgggctttttattttttatgtaattttgtgtttagcttgttgggcctatgtgtcaaatgggcccttggtggacttcaggttgggtccatgtctcaaatggcaaagaagaatctttttgagagttatcttgtgggcgaacataaggtaccgataaacatcttacaatatgtagaatgtagatgacaccatcttcatgggagaggctaccctctccaatgtagtggcgatcaaatgtatgttgagaggttttgaacttgtatccgggctcaaattaaattttttcaagagttgttttggttttataggggtgcctttagtagacacggagaggtatgcacatttgttgaaatgcaaaattttatctttgccttttgtttacttagggattcctattggtgctaatcctaggttagttgacacttggaaacctattgtccacaagtttgctaggaaattgtcgagttggaagcataaagtgttgtctatggtgggtagagtgtgtcttataaatttcattttgtcttcttttcctttgttctttttgtctttttttaaattgcctaaaagggtggtaagagtattatacaaatacaaagaaatttcttatgaggttgtgaggaggggaaaaaacaaatttgttgggaaagttgggatactatttgtttacctaaagcatgaggggggttagggattaaaaatattttttttatttaatgatgctcttttggtgaaatggaggtgggagctcatgagggagttgggaggattatggtgtgaggtgttagagtctatttatggagggtggagaggtcttgaaacaagggaggtatcaaaaacatcttctatttggtggagggacttgattaaatcttgggaggatcaaatgaatctaaatggtttgactctatggtagtgaggaaagtggaaaagggtgataaagtccttttttggtgcaatcgttgggtgggacaacaatccttagctaatgagttccctagattatatctaaactcattacaaaaggaggagtgcatcataaatatgggggagtgggctgagggggtttggaggtggaattttaggtggcatagggactggtttgtgtgggagagggaggtggtggagaggctgagtttgatgctaagtgaagctacgttggtagagggtggggaggattcttggatatggaagcaagatcgaaccaggaactatcttgttaaatcttcatatttggctctatgagacaggaatttttttccaaattgtgatgattccttgctcaatactttggctgacatttggtggttgaaagttcctccaaaattaacttgtttttatggaagttaagcctgttaaggtgaaatagactaccaagtggagataatttggcaaggaggaatgttgttgtggatgaaggtgtattgaagtgtgcgttatgtcaaaatcaagatgaatccttggagcattctttcatgtggtgtccgaaggcagaggaagtctggaaaagttgctattaatggctagatataaaaactgtatttccttcttctatgagaacgcattactggcagcttgtgttgatgattggcaataaagagaatcgggaaaggtggaggttggtttggtgttgtattgtttgggttctttggaacaacagaaacaatataatgatgaatggaggacaatttcaaaaaagaaaaaatagtgcaggagattatgttttatacttggtcatggatcaagtcatttgataaatcattatcctactcttttgtccaatggagcatcagtccaggcatatgcttattgggtaagtgaaggaggttattaggtgagaggaggcccgggcatgtgagtgatgaagttagacggtgtagaggattgggattgtaatatcctgagatattacttatgacgaggaagggcttcatgcagtaccaattttttattttggccgagaagaggtggaattgttggggtcatgctctgtttaagaggtggaattgtttgctgcaatgggaatatatggttaacaaagggagctgatatagctagcatttatgactggttgctgggaaaaaagagaatggttatatctcatttatggttatttaatgctataaatgtcttgtaaccattttgtacctgacctagtatttgaaagtagagagacaagctgttttttgttggtatatcttgtatgaaacttcactggtacttctggtactgtttaacttatatatatatatatatatatatatatatatatatatatatatatatatatatatatatatatatcctttttagctgattaaaaaaaggtataataggaaaaatgttgacattgtatttagttttgactcattttgaaatgaaactttgaagctttgtgagaggaaactctcttggttcttaggaactacccttggttcttatctttgaatttcataattcaaagtggtgaatcttcatctcaacttatcaattcatttgaattgtggcattgttctatcattttttacctcaatccatttttgtttctttgatgtctgtatttttctagaaaattacctaaaaaatttaagtgttagatgctgaatttaggatccaatttggggtctgtgtcatttggtatcagagcaaggattcagcatctttgtttgttcgagcagccagtggcatagctcatgtgatcttgcgcaattgtttgaagtccaaattgtgtttgttttgacttgcgtcaacttgttcctgagatcggagcaattttgttcgatgagcctttgttgttatatatagttgagtcacgcgaatctgattggaacatcaaattacttcagaattgtgtgctcatggtcacggttgaaatctagatccgattctgattggtatgtcaatatctggaattcttcatgtgtctttattgcttaataatttccttgtgcctttaattgctgttggcaccactatgtttgtgcgaattcattttgttggctgattattatttgtgttttaattcttgattccatgcttgtgcccagtttcggtggtggtgttgatttctgcacttgcgttcttagtgttcatccatccttttgtttgatccatagaaattaggactaagtttggtcttttttttgtaaatgttaaatagtttaaagatttcgtagcaataagaaaggattgaaaataatttctttttttaagagaattgatgtgggggttggggttggctaggtttctggatgaaaatggaaacattccccccctcctcccccccctgaaattgtgcttgggttggtgaatggactatgaatgtatatgaatgctgagattttgttaacaatgaaaggaataagtaggcagtgtatgattgtggatagagaaacatgaataatgcttggtatcttatgcttgtgccttctgtgtgaacatactagtttaaaatagtggatattgtgctttctgatatttgttggcagtttgcttttgtgggctatagattattttctccactcttcaccctttgtatttgtatgtttgttcttactttgatagaagatggcaacattgtatgagggagttagttgaggacatagaaattgattaagtagggttaaaatgattgtaatgaataagtgttcaagagagacttgagaatcgaataattcttctggtttaagtgaagggaagcaaacaagaacaacatccttgggtcattttggtgaatgttggctaaaaggatattgcgcaaacagaagtaaatagttcaagtgaattaatggtaatcattttatgcgatgtattatataaaacattgttgctgaaggtctaactggtcttatgagaaaagcagtaaatgaaaagctgttttctgaatttctggttggtaaagacagcataccagtaagtatcctccaatacgcggacgatactatatttttcggggaacccaccatgcaaaatgtcaaggtcataaaatcaattctgagaggatttgaattagtctctggtcttaaaataaattttgcaaaaagccattttggtgcagtgggcagacctgaacagtgggttagagaagctgcgggattcttgaactgcaggattttatcttttcccttcacatatctgggcattcctgttggtgttaccccaaggcgtggtcagctgtgggattcggttattaggaagtatgagaacaaattagcaaggtggaaataaaggcacctatcatatggggggagagtgacccttatccattccactttatcctccatccctatctattttctgtcttttttcaggttgcccgagaaagtagcggagaagctgatccgaatccagcataaattcttatggggaggtagtttggagcagtgaaagataccttgggtgaactggaaaacagtttgcctcccaaaggaaagagggggccttggtataaaagacataagggctttcaataaggctcttctcggtaaatggaggtgggatatgctccagcaaagcaacaagctatggtccaagatattggattccaagtatggtggttggaggtcattggtggaaggtaggagagggaataacgagtccgcctggtggaaagatataatggaggttacacaagaccaacagctgaatcctatcctccaagatggcactacttggagggtgggatgtggggataaaattaaattctgggaggattattgggttgaacatggagaggctctacagataaaatacccaaggctgtataggatatctcttcagcagcatcaacttatccagcaggtgggaaatttcaatgaatcctcatgggaatggaatctctcatggagaagggctttatttgataatgaaatcgcatccgctgcaggctttctggaagaaatctctcacattactatccagcgacatatatctgatacctggacgtgggaagcagagcctaatggatgttactctacaaggagtgcctataacatgttacaagaaagctcaatgggtgtcaatctggatgaagcaatgcagaacctgtggaaattaaaaatcccatccaaagctgcaatctttgcgtggagacttatcaaggatcgattgccgactaaatctaatctcagaaggaggcaaatagagataaacgacagtttatgcccgttttgcagatctcagcaggaggatgcagctcatctctttttcaactgtcccaaatctctagctctatggtgggaatctctagcatggactggaatagtaggggcattccccattatccctaggtaccattttttgcagcatcaaaacgggatgaatggaggaaaaagaaatcataggtggaagtgctggtgggtggcattaacgtggtcaatatggcagcacagaaataagatccttttctcgaatgaatcatttaacgctgctaagctaatggatgatgctctgttcctgttgtggtcgtggcttagagcatcggagaaagacttcattattcactacaattattggtccaccaatttaccaatatgcttttcagcagattaggatgggttctaatggcggggatgtagtttaggagggttcacaagccaaggggcctgattatgtaatctcctgagtgggtggatttccccaagctgagtagcttggcaggtggattcactacgttttctttaactctattgtaaccacagtacccctggtactgttatcttaatatatataattctatttggctgataaaaaaaaaaaaaaaaaaatatatatatatatatatatatatatatatatatatataaagatcaatgatgtttctgttaatgaggaataagtgcacgcaaattataccaattggacagaacagttttttgctgttttccatttcattttcctactattacattctgttggagttctctctgcttttatcatacattgtactgttctgtgtatgatgtcttacactagtattttaggaagtccctaccaaacatgacaatcatgtagcagaacttctgctttggtgaagtcttatatttacataccatttcagtataattgatttgactgccaagtagtagtgttatacttgtggttagttttgtttgcagttgtaacatctgtctgtgtgtatagcagaacataattgcttttgagcctatttgatgattgaaatgataaaccatgaagatgttgttcctgacttgttttttttttttttttacaataatagaatatgcactacacaattttaattaggagaaatagtgggaagtcccattgtctttattagattagtgactgataacaccatatgtggattgaaccatgaaaaggaaaaaggatatatcatagtctaagttcatatttttaggatttaagggtcaatggctgcttaatagtaattaagtttctcttgatactcttaggttttcttttttaatatttccttttcagtttggctctcgatgtttggcttcagttgcagtctgcagataaatatgagcagaactgaaaaaataaattgattatattgttttgggacctgagctttgtataactgactgaaatttcaaatatatttttaaaaccctgtttattcaatttatttatttattttttctaaagaatcactcgcatttaatatgaagatctggaaggagaatgtttgtaccatgtatactggggcttgcttttgtgttttgcagcagtttgggaattttaagtttgtaagtaaggaatgcatatataacgtggattgtttccttcgtttttaatactctttcttagaagaaactgtgtgagggaataaattccaacaattgttttatggataaaatttagctagacatttggtagaaatcaactccactattattgttttctttctacttgtttttctatgtatattaatatttgcggtgaactgtagaaattattcagttcaaattgcaatgaacattatactgactgaatggataatctttcaggaaccagttataaaaccaatttggaatacatttac

SEQ ID NO: 2759 - DNA, 7568 bp, Glycine max
  Intron number 1 from transcript Glyma10g41740.2 (locus Gly ma10g41740) derived from phytozome v7.0 (chr-ID Gm10; pos 48747209 to 48754776)
ggtaactgcagcgtgtgccacaacactggagggaggtgcggcttcgatttcgtcatgtacactttcaggtgcttctgcactgacagagttcattctgccaaatgtggtcctgatgatgatccaggttagttttttctaatgaccaaaacttctaataaagacaatgaccaggttattaaaatgtatggagacatgtaacgtttactcaaacttcataattgcaatggctgcatggttagatgctttgattggaaattactagtatatataaaggctgccagagaagacttaattaatttaaaactatttagtttatatggttgcaattggtgtgttttcttcgttttcagtttaaaaaaaagagtaaagtttaagactatacaatactataacagaaaactcaacagcaaagttctgttaacactaaacagaagtatcttcagtttgtttggcaaaagaaaggacggggattggtctaatcagtctcgaatgatggttatgtgagtgaaaaaaaaaaataggtgaggtagaataactaccaaacgaattagtcaaaccataatttccattttagcctgttaatactatgacttatgagatgaaggggtcggggaagcaaaaatctttttctatttcagtttttttaattttaattagaataataatattgtgaatgaataacaatactattataaatttaaattgatgttagcacaattttaaaataagaaagtcacacctatatcatttagttgacttcaaacgaattttgaatattccaaacaactgcttgttctttttctttttttcaatttcatgattgatacattatcaataatttaggtcgatgttcaattcctacttttcaatctaggatggatggctcttatgtctacgtttcaatgcatatattttgttatgggttatattactgagaactctaaagatagtaactaaaatatatttaatttacttcattaaatatttataattatttgaaaaaaatattaaatactttttttatgtttattgattgaggaaatattagatttatacatattagttttatacttttccaataatagtggaatatataaaatagttactggcatattgaaattaatgagatattagaaagataattaagttgaagagagaaattgatagaattagtgaattttaaataaggataattttaacattttttttaattaaaaacactattaactgatttctacaattttttaatatatgtaaattaataaaaataacttataataaaaaaatggaggaagtatttttcaatccttcaatatgaattctcgttgaaagaacacacatactaaagatagagatattctatcaccctctgagagagaaagaaatacactattaagtagtattaagtattagcaataatcttttttgttttcttatacttattttgtaaaatacatatattttttaaaatagaagaggatggaaaggaggaagcggggaaaagatgggtataattaataaaaataaaactgaaagttgaaaattaaattaacttagaagtgttttaatattttagttcttaaaactaaaaatgttatttttaaaaaaaattcaaaactactttgaacaaacatgtaattttttgtctttaaaatatatatttttaaaaataaacaaataagcttaatatattaaaagagtctaatttaattggttgaaaaaaatgcatgagtgtcatagagcctggtataatttctaattttttttattaattgtacttatttgttaattatcattgacagttgacagtaagcttttatttaaaaacttacaagatgcctaaatataataacaagttttaaactataattaaacagaaaaaatagttacgtaactatttttggaagtaataaaaaaagtttaaggcagtgaaccggactttctattgtaattcgttttctctttccgagaaaactatattaccgcaatagatattaagatgattaaacattttaacttttgattttgcatgaaaaaatataattgtatttgatactgacgttaaatgggaaaagagcatgtaatatagtttatttggcttgataaataactttagtggtatatcttaaaatcttaaattatttttttatttcacaatcccgcaaaacataaaatcaaagattttttaagattttttttatttttttctttattattagattttatttcttgagatcttagataacttaataagtcgtgtatgcatcatacttttaaatattttatttaaattttatattttttctcttcccctctctcattcttttttttattttttttattttcctttctctctcaagtttcactttcccttccccttctcttctttttattttcctttgttgctctagcatcactacatcagtatatgcgtcatattatatatatacatcagtgtatgcgtcacacacacacacacagatatatatatatatatatatatgttagtgcatattctggacaggacaaggagctaatttagtaaactcagcaaaaaaaaaaagagagagctaatttagactaacttaaactataattgttagttctctgaaaaagatattttcatattttggactttccctcttacctttctatggattacccaaatcccaattcttatgtcaaaatttctcacatttttttcatgtttactatttttagcaaaattcacaataatgggctgaagcctgaagttacttggttgggccactattaggctggactttgttactgccttttaagaatttcgttttttttccctaaaaatgtttagtcacattttttagcaaaatcttttcaaaatgaccttagtatgaatgaccaagttccttactaaatttaaaaacagctatccaacttcctgtagcaaaaaaaaaaaaaaaactatccaactacaagtttgcaacaattcaagtaacattttcacaacatctagaccaataatgctataaaaaaattcataaatatatatatacctgttgaattaagtctattgacttatataaaagattagatatcctagtttattccaaaattgatctactagtttattaaaagactttactaaaatcaaattttaaatagacttttaatttatgtttgagttatttctttttttaaagaagattagatcttaaaaaaagtcaatatcaattaaatagattacacttaatcctcatattaaaaaaataaattaaggctatcttgatctatttttttaaaacgtgactatatagtaaacgtccaaggtggtccataaaagaatacatggggttataaacatcaagtcggtccttcataatctaaaataagcatcaatttaatctagattaaattggagtttgtttaaatattgaaagacaaaataatgcctaaaatcttgaaggatcaacttaattaacatctcatataatcttaaaggatcaatttaaagtatctagtgactagtatgaatgtaatattcaataggatttattggaagtgttctgttaataaaatctcatgctaaaataagcttttctgtcagctattggtatagaagagaagttttttatattgaaaaaataggaagtttccacaaagtcttccagtctaaattagaatatagtctttgattgaaggtaacttattcaattatacaacaacaacaaagtgccttctcccgctaggagatagaaacttatttaattatattctatgatactcgaaccatattttataaaaacttgccgctccctcttcccaaccataaaggattttgcatactttttatccttgagtgcttttataagttttatttaattgaaatctaaatggttaaattcatagttaaatattcctattagcaatttttttttgttaagaagtatgatccatcaacccgttttactttctttttttttgtgtgtgattgcaacccgttttacttagtggcggaacagatctaacacacattttatcaaacactactcgttcacgtaattattctgtgaaggctatcacaacaaatcggcgatcaatattactttaattttcactaaaaaaaaaacattactttaatttttagaaaggagccctgcttcgaaattaggtctgaagttgaagaattcaatggtactataccttaattttttcccacggtctaatatgtttggatgtagggcatataatattgaaagtgacgtgtttcttatggtattttatatgctaccaatatggatgggggagatgatacttaccttgagtgctactattgttgagatctgaatccgttagatgaataaatgcttttttgagatgtgttaaagagtgagtatccaaattattctctgaaaataaatatttaaaagactttgattcttaaaaaacaaactatttagtctttcaaattataagtataagtatgagagacttcagttttagtctatacggagtataaataaatgaaccatattcataatcttgagaaattatttgctaactttttctgtaagatttaaattaagtatttactataaaagtatatttaagggttccataacaacacttactcgtggtactcacttattaattgttgatcgctgtagaaattgattccaactttaatcgaacttttatcattatgatttatgagttcaaatctaacatggtcactttaggcagagttttgtagataatatatacatataaatacgcaatggagtaatgccaattcttagtcgtaaggttgaacgggaataacttcctttgcctttaattatgaattcccaagttttcccatggaagactcaacatgaacctgttcctctacttaaactttcccggctccatttccctgatccttattttccagtctcttttcaattagagttaagctttcttcatcttgattttttaatagcacccttacattgaaaggttgctaatccaattctacttccttacaccgattctcttttggtcattttttgcttaaatatgaaacttatttttaaacaaaacccatgatttattgtcatcattaaagtttgagagactatattttattaaaaagttgctaaagaactaaaattgggcaagtattcgatttttttttttaaaagacaaaagattcaataacattaaaactgtccaggctacaagctgtaaccaagaccaaaacaaatacatagcaatatcagtcccatgcgattggacaaaatactaaacccataaaacaaagctaataatgaagcatgaatcagccataatacatgtataacccctgctaccaactaataaatgttgatacagaacttccacccttatttactgattactaataagtacattaatcactcatgattgacttccatctttgttatattatatggtacacaacctttgaggtttaaagtgcgtagagattaaattatgggatcgggtcataatttgatatggagaatcaaagttctggaacctcaaatatacagtgcgtagtgataagttatgagatgggatcgtaatccgatccggagggtacaatggtgaaattattatatagtttgatactttgatatcatcatattttcatagcaaaaaaatatcatcacattatcattgtatttgttttagtaaaaaacttaaattttctatatactattatttagaaaaaatgtagaaatcaatctagactataatattcatcggtcatataataatatttcctgttttatcacactcgagaagttgtttttaggcagacgtttagtttcacaagttcacacagagacagagagagtactagaaaactgagaaatgaggcccagaaatttgaagccactgattatgacactgaacgcgttttctatctggcctcgttgactggtcacgttgaagtgaagtgtgaacctaaccgcttaaaacgacatcaccattcgttaacgttgtctaattgccttattatttcccacactctttcaacgtcattcggtactctttttttctgcctctttttaagtatttcaacctcagaggcccactgcatttccaaactcttgtggactcgggacccttcccctgtgatatctttcttaaaaattcattactgtgcaaacaagtgtttttaaatctgatatgcgtctgatacacggtttaacaagcctcctagaccaagactagattcggatgcggaagggaagttttgaagcagagtcagttcagagattataaggagtgatcaaacaagtcaagtctttgtgcttgtttcaaaaggcgttagaaagaattggtctcactttctcttagggccagatatgtgtgtatttcttggtttcccactccctctttcatcttccgtagtcatcttctaattcaactgggaggagtataaaaacaagtcagacaaacttgagcttaatttacagttcagagaatcaaatcctagttgaattctgtttgcttttagatcatagacgtactgggtgactgaggaaggatgtgtggagtttatgaatttgtatcattgcttttgttttgtcaccttatgccacttctattggcggcggcttgtccacctctgctttcttgtggagatcttggcaatatcagtttcccctttactacaacagaacgccccgactgtggctttttacccatacggaattgtgaagatccactcaagttcaaaatgatccaattacagaataatggagaatggtttcgggttgtactcgtagctcagcttcggaacagttctatcataacttttcaaattagagacaaacatctctatgaccttctgcagaacgaaagttgccctgaaaacagaagcacccacgaatgcaatgcactaatccttgttgcttttatctgcttttcccattttaggttcttaaatgtttccttcacaatttgtgaaacattgtctacttttctgtaaatgtcccaagcccagttccttctcctacatcataaacagaataaaatattcaaaataggtcaagaaaagtgacattgatgatgtgcctaatctaagttctcttcttgtcttaaaatttcaaatgtacagtttactacacttagacggcaaggtctgagttgctctgattgattgtctaatgtctaatattattggtgcaacagtcacaattagcatgccatatttttctctgcttaactttatcgtcacgcttcaaatctgtgttatttgctaaattgtttcttctaattgcagcagttataaagaaagggttgagtttgaaggccaaactgggtataggtaatgtactgtttacataacttgatattccttttcaacatatgacttcaaaatcactgatcctcagtgcgaaagttcatttgtgtgttgaactcagagggtctgctgatttcttttcttttaattcccttatttccccctcaaaaaacatgagaacttatttaaaaaatttgtataactctatgtctctatcaatgctcattgctatctatcagaaaagtagcagcagtcacgcactctgttatttctc

SEQ ID NO: 2760 - DNA, 6474 bp, Glycine max
  Intron number 9 from transcript Glyma11g22940.1 (locus Gly ma11g22940) derived from phytozome v7.0 (chr-ID Gm11; pos 20378041 to 20384514)
agtgggcagatcacagttggtaagccattatttttttttcttgcttttccaaagttttttgttgactttctgttgtgcatggctcattttttatgggcggataaatgttggagtggagcatatgggccacctgttgttgggttaagaagtgagttgagagtgtgagggtaagcccctgtggtacgcgtgatactatacgcataaagattgttagcaagccacattgcttgcctcaattctcgagttgcagcttatatatctgttggacaatttcacttagtgacaattggttttaagttgaaatctaacatggtattagagcctatagcccatctctgttctcgcctattctagtaggtcctcctgttttggcaagcatcttcgttctcgcctattacaaggaagaaatactagcaatagagattatactagtactctaaaacaaatgagaggatcaacacaccaattagcaaaagataaaccagggaccgagatcccattgtgatgtaatcccattgtttataaataagggaagaaaaacagtcgctctcctcccgaagatgtaggcacacttgtcaaacctcgtttattctcttgtatttgcgtgtgagtgtgatttctctcatttcctttgaaattcctgttgctatttctaacaattggtatcaaatgatgcttaaatccgggaccaaatttcggattgtggtagaggcgtgttaaggatttgttgacacattaaggtcttctaaaggcactgtgtgactcaaagtctgataatttgaaggctttggattgggaggagttgcaatagagggttgtggcaaccatacgcttgtgtttggctgacgtggtcctctatcacgtgatggagttgaagtctccaggcgaggtacaaaagaaattagagagttagtacataccaaaattgctgacaaacaaactgtatatgaagtagaaactgtatgggataaagatgcaaaagggttcggatctccaacaacacgtgaatgccttcaatcaaattatcaacgatctggcaaggtatagattgagaaagagtataaggcatctattctattgtgttctttgccttcttcttaggaacatttggtgacaaccttaacttacgggaaagactcaattggtctgtaagtgaaacaattcaggctacacatatgtttcattctcaacggagacgaaatgcagcaggatgtttgcaaggcaatggtttgtatgtgaaggggaaataagaacgtggaaggacacaaggcaagggttccggtggtaggcagagaaagaagtccaagtctagataatgcaagaaaacaatgaaatgctacaaatgcaagcagaatggacatttcaataggaatttcttaaagttgaagaaatctggtgaaagggcatttcactcaacaaatgtgatagagactaatgattactacagtgagagagatgtttactatagtgagggagatgttctctctagttcatgcaatcagttaacagatgcatggattcttgattctagatgtttttacaatatgactcccaataaggagtggttcaccacatacaagttaggtaattttgatagtgtctatatggataatgacaaagcgtgtgttgttgttggaatgggataggtgcaaattgctatggatgatggttgagtagaacattgtgtgatgaccaacatatccctgagttgaggaaaaatttgacctcacttggtaccttgcaggcgaatggtttcaattatagaattgatggaaattaggataccctcagagtgtgtaagggggcgttgtgatgaaagcacgacaaactgtaggaaatattataggttgttggggagcattgttattggctgagttgcatctgttgggtctgatgatgatgatgctaccagattgtggcacctgtgtttgggtcatctcagtgagtgtgggatggtgaagcttcataagcgaggactcttggaaggagttcagagatgctagttggacttgtttgagtactttgtgcttaggaaacagactagagtgtggtttaaagctgtaaaacataccaccaaagtgattctagattatgtgcatactaatgtgtggggtcctactagagattcgtctttggggtggttctcgtaaactttcattgatgatttttctcgcaaggtttgagtgtatttcttgaaacaaatatctaaagtctttgagaagttcaagttgtgaaagtctgaggtggagaactaaacgagcagaaagatcatgtacttgaggtctgataatgacacggaatacacagactcacggttccaagaattctgtaaggagcatcacatttagagacatttttcaatgtagaaaacacaacagaataatgttgcagagagaatgaataggtcctttactgaaagtgtccggtgtctaaggttgcaacctggcctttctaaaggcttttaggcagaagtgatggatatggcatatctactcaaccaatcaccacgagcataatcagatgggaaagttgtagaggaagttgggacaggtaaatgattttgtgcatatatccagttatgagagatctaaacttgatccaaagtcaaaaaagtgtggtttcgtaggttattccaaaggtgtgaaggggttcaggttttgggatccggtttccaagaagatagtgatcaacagggatacaatgtttgatgagcaatccatgttactggaggtagttgagacaactgtgtcagtgtctgatggagcttcccctagctccatggagattcaagtggactttgagcaattgttggttattcttgagagggtagaaccatgcagttcaagacttgagcccacacccgcaactgagcctagataggtgagtccaagtgaatgcatcaggagtacaatattgtcaaagatagagatcttcgcaccattatactcgtccgatatgggtttgaagaattggctaaattggttgcctttgcacttctcattagtgctagagatccttctacctttctaaaggctatgaacaatcaggagaaagacaaatggatgggtgctatggtggaggagatggagtctttagagaagaaccagacgttggagctagttaagcttcctacaagcaagagagtcatagggtgcaaatgggtgtacaagagaaaatctctggtattagaataagaagggtaaaattcaaggcttgccagtagaaaagggatatgcacaacagaagggggttgattatgatgagactttctccccagttgtaagacacacttctatcaaggaggtgcaagccttggtagttagtcatgacttgcacttgaagcaaatggatgtgaagataacctttcttcatgatggtctagaggagcaaatttacatggaacgggcagaggggttcagtaaaggtagactgagtcggctggtttgtaagttgaagaggtctctctgtatggattgaagcagtctccgaggcaatggtacaagtggtttgattcttagatgctttggattggccacaagcaatatgagtatgactattgtgtttatgtgaggagccttgatgatgactcttttatttttctactaccatatgttgttgatatactaactgatggtaatcatatgtgatgtgaatgagttgaaatcattgctgagcaaggagttcgacatgtaggacttgggtcctatcaagaaaattcttgggatggagattcacagggaccgaaaatctagacaattgtggttctcacaactggctatgttgagaaggtgctagacaagatcaacataagcaatgtgaagcctgtgagtactccattgacaaaacacttgagtcaatgtccgaagacagatgctgaggtggagtccaagtcaaaggttccttatgtcagtgcagttgattgcttgatgcatgctatcatgtgcactagaccggatttgacacttgatgtaagccaagtctgcaagtttatgtctgacctagtgaagtgaatcttgcggtatctaaaaggtacaacaagtcatggtattatgtttggcagtcagcaaggtgatccttcagttgtgggatatgtggattttgactatgttggtgatctggatggcaaaaggtctacaacaagatatgtctttactcttgcaggtgggcctgtttgttggaagtctattattcagtctcttgcgacaatgtcaacaactggagcaaagtatatggcggtagcagaggttagcaaggaagctgtgtggttagcgagactagcgaaggagctgggcattgagccagatggagttcaattacattgcgatagctagagtgttattgatttgacaaaaaaataggtgtatcatgctaaaatcaaacattgatgtgaggttccataagatcaaagaattgatgacatctggtcaaattttacttaggaaagttcacacttaagaaaatgcagctgatatgttaaccaaggaggtcacaactgactagtccaagtaatgcttggacttgttgaatgttgattagtgctagatgtgactggaccccccaacccaagagactgaggttaatttactatttatcttccttggggatgaatatttgtcaaggtagagattgttgtgcatgactcattttataggaggacaaatgttggagcgaagcgtaagggccacctttgttggattaagaagcaggttaggggtgtgggggtaaagcccccgcggtatgcgtgatattgtacgcataaagatgatgtatgcagtataagataatatacatgtaaatattatgtatgtggtttaagataatgtacacataatgataatgtacgtgatttaagatagtatacacataaagataatgtacgcgataagggaagggattcacttactccaagagtaagtatttcaacttactctcaatcctcacccttgattattttaaaatctagcgatgtcaaataaaagggaattttatctcatgtgtcttctcccttccctcctttgtcgtttccttttccttgccatatgcaacatgaaaaaacagggcagttggatttacgtgagagaagtttccttttccttgccatatgcaacatgaaaaaacagggcagttggatttacgtgagagaagaactgtgattctggattctgtgattttgagactaatcagaatagaagatgcaatttcccgccttgtaaaatgtcccatcatggttggttatttcttgcggcatgactctggtttagcaagtctgatgcagcttagtccacttaggctctttctttaaaatcttgagtcaagcattttcttgtgtaagattgagcttttgtcctattaaaaaatgcaacaatcaaacctaagtcagagccttttaacaagattggatgttttattgatacatatattgtaaaaaaatccaactagcaattttgcaatggtataaatttatcaaaaatgagataacaatacaaaagcaaacacattattgatgtataagatgcatatgggattgtgttttagtggccttcacccgctggaaagatgaataaaaagttggttcaattgcattttgtaaatcagatgacaaggaaaaggaaagaagtgtagtgcgtctttcgtgttggcaaggaaaaggaaacagcaaaggagggagaaggcacgtgaaataaaatctccttttatttgacactattagattttaaaataatcaagggtgaggaatgggagtaagtttaaacacttactattggagtaagtggattccttcccttaagataatgtgcgtgtatattatatgagtttaatatctatgcactgacagtgtaaaactgttttatattgacattcaattacaaatcacagtttaaattactttaagataattatttaaaaagtcaatcaatttaccatacatgatgagttgtgataggatgagtgtgtaaaactttttacactgttgatgtataatcctttttctcattatatattatgatgtaactccgttgtaaaacaaaaaaaaaaaaacatttgctttactcccaaggacgtaagcacacttacagaatctcattaaatctctagtctttgcatgtgtgattatgatttctccatttcctatagaattccgattgctactgctaatactttcaaaatcaaagaaactttgtttattctccatggtagtgtagtacttggatgatattgtttggcttcttaggtagagtaatttctgattttataaatctataaattcatttggtctttcattccctcccaagtatcaagtatagtttttcagtctgtcttgaatagatgttcatggagaacatgaagattaatttatatgaatcgctaatgttaatgcaatatttttcctttatattattctttgtctattttccttgttaaacatggttgttacatgtatgacacctaccatttcagggacaacaattttgg

SEQ ID NO: 2761 - DNA, 1500 bp, Glycine max
  Intron number 3 from transcript Glyma17g31730.2 (locus Gly ma17g31730) derived from phytozome v7.0 (chr-ID Gm17; pos 34951135 to 34952634)
agaagggaggtattttcttttgtcaactttggcatgctgggaaagtctccaactatgatggtattatgctttcttttttactcctacaacaataaaaattgttttagatacaattttaggcttaaataatatattattcctataaattaagtttttttttaaatagttctagtctttaattttttattttagtactttaaagattttaatttttgtattctatgctataaaataatagcattaacgaacaatgtaatcgtgcattaatattttattgacttatcaagtcataaaaaactttcacaaaatagtcacaagtaattttttttagtaagttgtaattttaaatgtatcatcaactcttttgagtagtagacgaagatttaaaaatattttaactaaactaacaaattctatcagtggtaagttaatggataaaaaatgttgtttttatattatcatttaatgcaattaatgagtaatagatattaaaacaaaaattctttaaaggctaaaatcaagacaaaaaatctttaaaggtctaaaaaaaatccttacaaaatagggagtaaaaggttattacagccaaaattttattagttggaattcttaaaattttactaatttaaaattaagattcattaaacaaaataggttaaattgtaatttcaatttatatttaatttctaatacacaattttgatctctattctttttttatgattttaatctcacattttagaaaatctacaattttgattaatttgttattgcatatatttttcttttgtttgaattgaaccatcatctaacatatttatatataatttaatttattataatgtaaacaatcaaagaataaatgtatataaaattgaggattagaccaaaattacttattttttaaattttaaagactaaaatcatagataaaaaaattaatgggaaccaaattaaattgtaattaattatccatcgaataagattacatatatttagtaggaactagacacatgaaatttatctagtgagagagagggttaaaaatgtattcataacatcatttctctcagagtaaattatactaacaattccgaaattttgtgaaattacaaaaattttcctacttttaatattcatcacaacttcccttggacttagggaaaaaaagtataatattttttgaataattaagggagattagtataaatgtataagatgtcttattgtaatgtttttttttaataaaaaagctaaagaataattacggagtaattagtgtaatttcatgcaatcttgtgaataattagtgtaatttactctttctcatatgatatatagcaaccatattgtattccttaaggagttttttcatattataagagtatttgcaagcacaaccacatatcttctcctaatcaacacaagggtgtgaaatgatcttaattaataattaattaatttaattatttgtctattcaagtgtagaattccaaccac

SEQ ID NO: 2762 - DNA, 2606 bp, Glycine max
  Intron number 1 from transcript Glyma15g42810.1 (locus Gly ma15g42810) derived from phytozome v7.0 (chr-ID Gm15; pos 50236314 to 50238919 reverse strand)
ggggattatacggacgacacgcttgtggtacgaacgaaaattgtgcattttctggattgttgttgttggaatggttttttttttgagggcgaagtgtgacgttgattgcgaaattgtttttgtgaatatgactgataaataaattggtcccgcggtggttttcctgtgaagaactaatggtgattttgtcttgaaatttttgtgtagtggtgtgttgtttgtgaatgctgtgtgtgttatgtgttgaatgagggagggggttgtgttggaaaatgtgtgtaaattgttgcttgaacggttagggtttttttctgcatgttatggcgtgtgtttaggaatatggatataatgtaaggtgggagatgttagggtttattgaaaaaaataaaatggaggtcacttgtgcattaatgttgaaggctagcatatttaatgtgtttgaaaatgtgatgcaggttgtagtgcatgctaatttcttttgatatgtgacttcgtgtccctggtggttgatatcatgatttggggaaatcatagatttaaattgctaatttctttgtgggcaaatgctaccaatggtgagcccaaaaaccttgatgttgcagtaaaattgcagttgtggaccatttttaaaaccacgggtgataccttgatgcagatacactgtgcattatgcacacactctacaagtgtctgtttaacatggttggacgtgctccaatgagtttacaaacacaacctacatatgttgggcaggagcacgtgcatgcaaaatgagcttcatgtagttgtgctataacatgtgtgtgacattgaacacacacacatcattcaagatcctattttgaaaagtataggtaacttttgggggaattatatttatgctaagatgaggtgaggttggcacaatggtaaggttgccttgtgaactagaggtcatgggttcagatcctggaattggtctctgcttgcaggggtaagcatgccatcctccccacacctcactaggcatgagtttcgtgtgagtctcatgctggactgccccctaattgtgatataaagattgtgacacgtgaggaagagagtgataacttaggagaataacaccacaaagctaaccttgggagaatcatgccatagatgctagctattgtacttggaaaacccaaggccttataaaccctactctagaatcccatgcctccatactttaaaattggataataacatcccaccatgcttccatccctggggcccatgcaggttggttgtgcactagccgtttgactagttttgttgggagaatcacaccccaaaagctaacctttggagaatcatgccatagatgctagttgttgtagttggaaagcctaaggccttataaaccctactctagaatcccaggcttctaatgtgggacataagtaccataccttgaaattggatcttaacatcccaccacactcagattgaataatctaggattcagtatcagaaggcttgagtacgaaagtagcgcagccccgtgcccatgcaggctggttgtgcaatagttgtttgactagttcggttaggagaatcacaccccaaaaactaaacttcggagaatcacaccatagatgctagctgttgtagttcgaaagtctaaggccttataaaccccactctagaatcccatgcttccaatgcgggacataagtaccataccttgaaattggatcataacatcccaccatgctccgcagcctcgtggccacagactagcccttggactagttcaggggagcactgcaatgccaatgtcgttacccatgttgctcgtttccagttgggagacatggttgaagcctgaagtctctgataccatttaatgagaacattgggaaagtcacattgcaaaagctagctattgtagttgaagagcccatggccttttgaactgcacactagaatcccatacatctagtgtgggactcaagtctcaagtaccataccttgcaattggatcctaacagcagcaaaccctctagtgagaaaagcagatcaatagaagataatctgattaacaaataatatagaggaaagtcatactctgcaatattttaggagaaaccattagagaagaattttcctaaataaatctattgaaaattaattttgttatagtccaatactccaatggtgttttttgattcatgtggctagctctgcctagtgatacaattcttacttgttgttgcttcaatgtttagcattcatttatgttgtgcaatgatgttttttaacttcagaatttcatttttatttgtaagccattgttgttgttgtcgtcatgtggctagctctgcctagtgatacaattcttacttgttgttgcttcaatgtttagcattcatttatgttgtgcaatgatgttttttaacttcagaatttcatttttatttgtaagccattgttgttgttgtcgtcattgctgtgtacatatgaggatattgtatttctattagtagatatgctgcagtggcaattacaatgaggtattaaaaatttcttatgatgaatttgactttattgagtaaactaactttagtttgcgcaatgacaggatt

SEQ ID NO: 2763 - DNA, 2088 bp, Glycine max
  Intron number 9 from transcript Glyma03g26630.3 (locus Gly ma03g26630) derived from phytozome v7.0 (chr-ID Gm03; pos 34094369 to 34096456 reverse strand)
ttggaagagaggtaggtgacccttattattaatttgttgtttcttattggtcaatggtcacatcatttgtcactaaaatgattcctgatccgctggagcattataaataatctcttcatttgttatttataggattttttgattcttgaaatctgaatatcattttcttgtcttatagcatattgttattttttaccttgtgtttggatcaggaatttcaaaatttcagggaatttgaaatgcctaaaatttgaattgctttgattttaattttcttcatttttcaaatactttgtttggataaatcaattcaaatttctttaattttaaattctttgtttggataggacaattcaatttcctccatatgcaaaatttcaattttatattttaaatagatgaaattttaatattaaactttatagaaaacaaacacaatctaattttgaaatattaattaaaaaatattttttaatttttaataatttaaaaatacaaaatattgataattttaactagggttgtttgcctgaccacaactaatgatatttttaaaccgatatcaacttaggctattttttcagtcgacatcaaatagggtttttttgtcaaagtatgccgggaacatttgtcaactaatgtcagttgaggctatttttcggctaacgttggttgagtctatttttcagtcgatgttgactaggtattttcaccaatgtcggctagggtttgtttggccaacaccggctagggtctttccgaacgacattgaccaagactatttttagccaacgtcggccaaaaaaatcctaacaggcgttgacaaaaacatctatccaatatcggctaaaaaatagcttggtcaatgccgaccaatagaacctacccgatgtcggccgaaaaacatcattggttgaaaaatccctagtcgaagttggctaaaaaatagccctgaccaatgtcggacaaaaaaccctacccaacatcaactataaaataaccttggctgatgttggctaaaaaatagctctgaccgatgtcgaccgaaaaaactctactgaatgttgactataagaacttagtcaatgtcaactaaaaataatcggtcaaaaatacctagctggtgttagtagaaagaaccctaaccaacattagccaaaaaacctagctaatgtggttaggaaatagctctgactgatgtcagctagaaaaccctagttgatgtcagcaaaaaaaatcctaatcgatgtcggctaagaaaatctagttgacataagccaaaacaccctaactaacatcggctggaaaataaccctagccgatattggctaaaaaaatagctttgactgatgttggctgaaaaaacctagctgacattagctgaaaaatcctagcatgtgtctactcaaaagttagccatgactgatgtcagtagaaaaaaaattagctaatgtcggccaaaaaaatattaatcaacattaactgaaaaaacctagatgacaatggcaaaaaaaaaatccttggccaacgtcagtaaaaagttctcatgactgacgtcagtgaaaaaataaccctaaccaacatcatctaaaaaaaatcttagccgatatcggcaaaaaataattttggttgacatcatacaaaaaaattctgaccaaaaaaatctcggccaacgttagtgaaaaacaacttaagtcaatgccggtcgtaaaaactttggtcacccgtagttgcgagtgttgagcgagaaagagtcgtgggcaaaaatgtgagttagagtgagtgtctccgtaaaaagaatttcaaattttatatttttttagataatttgaaatcctactattttagtcaatcaaaatgattcataaaaataccaaacattaaatctcctttcaaatattctatccaaacaagctattttatcatgaatcattttaaattctttgaaaaaatgaattcccccactgaattgctccatccaaaaacactattagcgatttatggtgccttcaattcaagtggctattctacttcagtagttttcttacaagtttagaaattcaacattgctcatttttaacaggctct

SEQ ID NO: 2764 - DNA, 8720 bp, Glycine max
  Intron number 3 from transcript Glyma14g29810.1 (locus Gly ma14g29810) derived from phytozome v7.0 (chr-ID Gm14; pos 36409656 to 36418375)
cagctttaactaggcctggaagatttgatcggcatgtaagtcctattttttttccccaacagatgaatctattaagagaaataatataaatagaaagaatgatgattgtaagtcttaatctataatactgttgtaatgtggttttcttaatctcttaatgcgtgatgaaattatttgtgtttaggtggggaaggaagaaaagggagaaatgaggttcccaataataatggtctattagactgattgttatgatgtgttatggtgtgatgcaaaatactaacaataatggtactatactcctatttatactaataattaggtctggtaacactaatgtaatattactagtaaagcccaagtctgataatattataagactattaattaaataaggaaacgaatgagggactacgatgagataaagaagcagttcctgacgttttctctattagatactgatagattccataatatatattccaaggacatacaaaaatttatccctaattgcttgttttttgtagatgatatagttttgattaggtcaagggaagcaattaactctaaacttgcattttggagacatactttggaaatgatgttttcactcaagagttaagacatactttggaaacaatgttttcacttaatagtttagataacacaggtgttgtgattttagcaaggaggaaaatggtttggaagtaaaaaccagaaaagatgtgataccataggtttttaacattaaatatattggatcaatattacaaaataatgggtaaataaatgaggatgtcacgtattacaatatacagaaactgtgtcttgtaccacacatgtgctggtttatttataatcataaggatgctacaattaagcatatattatggaacaggatccctaaatattaactatttaacattctccctcaagttggagcatatatgtcatatgaaccaagcttgttacaaatataatcaacactagttcctttaagagatttagtgaatagatccaccagttgatcattggagcagacaaaatcggtggtgatttctcctgagagcactttctctatcacaaagtgacaatcgatctctatgtgcttagtctgttcatggaagaccgaattagatggaatgtgaagagcaacttgattgtcactgttaaatttttgtcttttataataatttctgtcttgtattagtcggtttttctttcttttcctctgtgtaaggtacctcagtttgcacctgttctctcttttgtacttgttgacctttttgtcatttcatatatataaaaagcctcagctgagtgtgtcctagtgagaggcactcaagcattattcaaaaatactatttctcaacttggtatcagagcgggttggtcccactctgcttttccggtcaccgtcgcctctggtgcgccttgtcacgtgcgacctaacctaagaagtcccgacctcagatcaggtcccatgcactctcacgcgcagatctagtgcgctgccctgtgtagtgcgtgaagtccacgcaatgccacccttctcggaatgccactgcgcaaccacctttagtcttgtcggagcttctttagtctgtttcaggcctcgatttgtcagtttattgctgtttggcaaggggtttacgcagacttgttttgttaacctttggacaaggtcttgtcactgctattctttagtttctcctttgttttagttctgtatcacttcaaggagcttcattagtgtttcctggttccatttctacgcatctctgattttgagaaatgcctccctgaatcctctataatggtgtctacccaatgaagaggacgtggaaacagaaaaggacttgatggtaaatgttgtcgtccacagtgctcttattgtaagagaatgggtcatactctaagagacttgcttttccttgtatggttttcctaataagacaacacatgtatctaaatttggaaaatctgacccaagattctctgatgagaagtatcaaaaatatctgaggctgaaatcgaacagcttagttcaatcatctttagtgcccaatgtttcaacatgtatttctcaatcattggacaatcatggtccatgggtaatcgatttaggtgctttagatcatatttctggtaatgcctctttattcacatctatgtcatccccaagaattcctcatcttataaccttaacagatggttctaaagttgcacccaaaggagttggtcaaatctcattgtctccctccttacatttggagtctgtgctctttgttccaaattgtcctttcaatttgattatcttgttatacaggaacgtggtacgggtggactgatctgtgtaggacatgagtcaagaggattctactatctggaaacaagttcttctatgttatgtgttgctgcttcatctcctaaactttttcatgatcgcttaggtcatccaaatttgtcaaagttaaagaaaatggttcttggtctaagtaaattacaaatgttagtgtgaatcatgtctattaggtaaacataccaggttgtctggggattaaagacattaaaaccctcaataaagcccttcttttcaaatggaaatggatgctgttccaccaatctgatcaactctggaacagaatcctggtttctaaatacaatggttggaggggcttggggcagggacctcaaaagcattacttttctacttggtgggctgacttaagggccattactcaacaccagagtatgtttgctgctgctaatcaaatctgttggaagttgggtagaggtgaccaatttctcttttgggaagatccttggggtgatgagggaatccccctcaaagatcaatttcctgagttatttagagtttcttcccaaagagatctcagggtggcagagatgggatcttggtctgagaatggttgggtttggaacttgtcttggagaaggaatctctttgataatgaactgcagttagcgtctaaattcattgatcaaatccatgcatctagtctaaacatcaacctgaaggacacctggacttggagagctgaagctaatggagagttcacaactaaatctacttaccaagttcttcaatctgagctggatgatcaaggtcagtatgaggggttccagcaactctggaagataaaaatccctcctaaggctctttcttttgcctggaggttgttatgagatagactccctaccaaggataacctggtcaagagacaaattcaggttgaaaatgacctctgccctttctgccataatcaacctgaaactgcatctcatctttttttcaaatgtgataagattatgcctatgtggtgggaattcttctcttggatcaaggaagacaaggttatccactgcaggccaatgggtaatttcctccaacattattctgcagcagcttcaaaggcttctaacaaaagatggaaaatgtggtgggtagcagctacaaactcaatttggagactcaggaatgatatgattttctataatcaatcctttgacatctctaagttgacagatagcatgttattccttttgggctgaaacgaagtgaagcagatcattcaattttttattgtcatacatcttcaggtaaatgcgtctatcttgttgtctatatggatgacatagttatcataggaaatgatattgctaagatttcccaactcaaagtgtacttgtcaactcatttttagactaatgaccttgggtgccttaaatactttcttggtattgaggtagctcaatcaaaggaaggcattgtgttctcacaaaggaaatatgctctttatattttagaagaaagatgcatgggtaattgtaaacgcattgatagtcccatggacccgaatcagaagttaatggctgaccaaggtgagccatattcagctccaaaaagatatagaagactggtttgaaagcttatttatctcacaattaaaagacctgatatctcctttgcagttagtgtggttagtcaatttatgcaggcccctcatgttgatcactagaatgctgtgattcacattcttaggtattaaaaagactccaggacaggggtttttatatgaggataaaggaaatacccagatctttgggtattgtgatgctaattgggttggatgccccatagaccgaaggagcactactagatattgtgtatctattggaggcaatgttatcccttggaagagcaagaagcaaaacactgttgcttggtctagtgcagaaggcgaacatagagctatggctacagccactttgagttagtatggatcaagcaacttcaagagttgaagttctctgaagttaaacaaatgaagttgtattttgacaactaggcaactctccatattgctttgaatcctgggtttcatgaaagaatcaaacatatagagattgactgtcattttgtcaaagaaaagctgctatccaaggaaactagtacggaatttgttagctcaaatgattagcttgcagatattttgaccaaatcttcgagagggcctcgaacctgttcaaatgttccaagcttgaagcatacaatctatacgctccatcttgagggggagtgttaaattattgtgttttatattaatttgtcttgttgtagtagtcagtttttctttattttcctctgttataaggtgcctcattctgcacctttgctttctcttttgtacttgttggcctttatgccatttcatatatataaaaagcttcagttgagtgtgtcctagtgagagacactcaaacattattctaaaatactgtttctcaactgttataaataagcttagtgtccttggtgtcttcaaattgtaattgttggagaagttgcctaagccaaataatctcgcatgtagctgctgccatagcattattaacaaaaaggacaaaaaagtttagtgagtgaatgggcttgctaacagaaattaaattgaaaggacaacctggaacaaacaaaacagaatctaaagaaaggttagggagtggacgagtttgaccaatgccacagactttaatttgagaaccatctgcgagggtaatagaaggcaatgaatccggaaaagacaattgagtaagggattggttactagtcatatgatcagaggcaccaaaatcaagtagccaagtgccaaggacaaaggattgggagacaaaggctacaggattaccagactgagccacgattgtaacaggtgaggtaggttgcttggctgcttgaaaccaaagaaaatctgtataatcgaaggcggaaatagtcacatccgcaggtggggcaggtgtgtcctgggggttgtagtaggctgtcctgttcaatttttcacaagggatcagtaacacattggtaaacgaagtgggatgttggagctaccgtggtaggctatgaaacgcagtgaaacaaggcaaaacagaacctaactgtggccaaacagaagctaaacggggccgaacacagcccaaacaagttcgatggagaaggagcacaatggggagtttgccagttggcggtgttgggtttgctggtgttttctttttaccggaaaacgagggtcacatcgctgtttggctactagtgtgaaggagcagtagctagaggggttgctggagtgctgtggtgctggaaaactgagggtggagggtttgtggaaggaggcgacgctgatggaagtgccgctagcgagtgggtctcgccagaaagatggtcacgtgccaatttggtatgagcgcgtgaaatacatgtgctggagaggggtggtgtgtggaagtgcgttagaggttgaacagcggtgggtcttggacagagaaagggatgccggagggtggcggttctgctcttagggttgcactggagacaaactggcacagcgacaaccaaaacggctgtgcagtggggaggggcactgtgtgctcccagaaagaggcatccactgccagaaggaaagaaagagggaggattgaaccctaggatacttctgataccatattacaatatatagaaactgtgtcttgtaccacactatcagagttcaagaacagggacattgaacaaaacagagaatagtaaactgatattattgatttgggaaagttagttaccaatacagttacaagagaggtatttataaacctctagaccttgaagctaatcacaaactaactaacagaattttgttagtgaaagaaatgtagttagcttaaactaactgtcctacaataactgtttataacagttatttttatgcatttattctaatacacacacgtgctggtttatttataatcataggatgctattaagcatataatatggaatatgatccctaaatattagctatttaacatcacacataggatacaaacaagatggttaaaatggagaagggcattgtgggttatttgctatcacaaagtacatactaagttcaaagggaaattttatcccattgctatacattcaactatactctggcagtcaatttttggctttaaaaggacaaaaggtgagagtagcggaagtgagaatattaagatgaatgtggtattgaaaatattgtatgaggagatatctgtgacattgattgagggaaaaaatgacaaaattggttaaggtagtttgggcatgtacaaagaaggccattggaagcatgatgagcacccaagcacttgtggaactctcccttgaaaactagttgttaagggaggtgaactaagccacgtaaatactccactgagcattccatactacttgatataagacttaggcaccttagaatacccaactccttatcattgcaccactcttgagagtccatatctctggtcgatgcactttacaacacttcactcagccattctggttaactcctccatagttagtcctttctgagacacaaccaactctgataccaatgataagcaaccaagcacttggagaattctcccttaaaataattaaggggggagaaccaagcctcttaaatactccatcgagcatgccatgctacttgatgtggagcttaggcactacataatatgcatgtccctatcaaagcaccattgaggggagtagatttcatggttgttagtcttgtgtaaagggagagggaaactaagaaagatgttagaggaagttgttaacagggatttcatgcagaagagtgtctttgaggatttggtctttaatcgagtctaatgacattatgtgattcatgtaaccaacctcacttagtgggataagacttttgttgtcattgttgatgaatgatgatgccagagattcttaggagaggctatatgctagatgaattactgaaaagtaactcagcaaagatggttggaatgatgcacaaccagaagagctagttggagtgttgcatggctgaggaagaatcattgctagaaagatgcacattgaaagacattgctgaatttatgcgaagagaaggaaaaggataattaaataaaaacatgtatagacaataatgggtagatggaaatgctaaagttccgattgtcataatcggtgcatggccaataaatagagaatatatcaagctcctctgtctccctctgttctgcactcgttctgcattctcacacaaaacacatggagattgacctctttttgtttgggaagaggtgcttcccaagcaactttgcatttatcacagcccagctcaagatttctgggctgactagctcactaagcctctttctcccactcagttcctgcatcttcagtccaagctcaaagtagtttgagcccttttccactgctcaccaccttgagcttctgcatgccaggggttgagtgtagtactctctctaagtgacagctgtcatcagttagcttgggtcccttctcgttgtaatctttagctagctgatttcagttagttagttgcttgttagttctcagattagttacaagttagttaggattttccctgtataaatacttcttttgtatcagatcattataattttactcattcaataaaattttcagaaattctttctaaattttctcgagtggtctgaactctaaaccctaataatggcatttagtagctgttgtagagaagtttctctgttgggcatactgagactggcacatgcttttgctccttgttccaaattttgggtttctgggcttccctttggagtagatttcacttgattgtgaggcagttatgtgtttcattttgtatttttttttgctcttcaagcagcctcgtgacaatatgacagatcaaagctcaagcattctatgatcaggttcaggtctggctttgtaggatataatatgctctgcttacgtttgtccaaaaataaaaactacaacacccattaaggaaccttacaataagcatttgttataaatataaaatataaaatatttaactacaatcctgaatgtgcaagttaatttcctatataatatgggtgttgctatggtaacctttatatgtattgtactcaagggagttgtcaggcatttttggattgttaatttcagaataaatatttaaaaatgtgtttaattatcaaccattaaaatacttgacaaactaccttttgtactgaaacctggaattataagtagtggagtaaatgcccacataatatattgaagatacagggactaacaaattcccaataccagattgttgtaccaaatccag

SEQ ID NO: 2765 - DNA, 1902 bp, Glycine max
  Intron number 8 from transcript Glyma16g04880.1 (locus Gly ma16g04880) derived from phytozome v7.0 (chr-ID Gm16; pos 4184645 to 4186546)
ctctcttgaggtaatctcaaatttatttaaaattttaattgctttagtttagtcttttctgctcatttttgggtttgaagaaatcgaggattttagggtttattacatatgtcctattcaacataatcattgaatgtgaactcttcatgctgtgttagtggatctaagatgctctcatagtaaaatagaactatataaaggatacaaatttttgggtattaactctgatgaagatttacaatttgggaacttgtatattttttttttgaatgaataacattagtgagagtaaaagtctctagggaaagaaatttgaattatatcagctcttaactcagaaacaacaaaatcaggagcaaaattaaaaacatgaaaatcctcatttgccgtcaaggcatgtgaagcgtaaaaatattactcgcacaatggcaaatgtatatcatatgcagtagtaacagtggactgaaagtccggtattgaacccaaaggaccagttgttgtgttcccaaacaattaattttgtaaaactaagcaattaagattaaatgaaagataattgtggtcaattgttcaatttagtaaataaaaattaaagatagaagagttgatgtgaaaacaattataataagcagcctaggattgtgatttcacacctatcccaatttctcccaattctaattctaacaaaactctaaatattgtcaattaccggtattttcaaattcagttattaacctttggtcaagttttaataacgttttttatcctaatcaatactcaattgatcatagaaatatcatattaggttaaatgattaagttcaaaacaagggtgatcaattaattaatctaccaaaatttctcataaccaatttaatcatgcaagttacgtagaaacaatctcttcctagatcatttagttacactcaaatggtcattgtcatgcaatagattaagatttggagtgatcaattccaaattaacaattaacaataaagaacaaagaagagatttaattgactggaaaacatcaagcgttttgttaaaatcagaaaaggatacaagagtatgactacatcacaatctcgaactagagagactagttgttcatagccacaacaaaactagaaatcccaataaagaacacagacatagcaaaagaggagacttggctaaaatcagtcccaattgtgatttttgtgctcctccgtagctaagagactctcacacaaccctcttctccctcaaaactctcaagaacgtaatagtattccttataatattctgcggaagtcctccttctatctttccttaactaaagaatcaattaggatttaaatctagcttgtgatccttgcaatctttaagtgacaagtgacacaggcagaccatgggtgtaaaaaattaccacacacatacataattaccgcaattgtacaaaattaccatgatcgtggtcttttgatgggctccaaaaatccaagatttttagctgttttccccataaagcctcttaagcacctatctttcacaaacttataccaaatcatgagttttaccaaatatatcaaaatacatgaatatgacatgaaaactcacatcaaaatactgtcaaatatgagtttcgctaatttatctgcaacttgattgacttttctcagaatgattccaagtaatgttgctgtcatgagaatgaattttatgaatagcttggacaatatttgtatgaacatacaagttcatacaaagacacttttttcatgttctcatagttttgcatatttctaatcagcttgtttgcatatagcatattattatagatttgtttggttttcagattaacctattgaatttgaatatgctaacagctgtgtggcatttccaagtgaagattgggagattg

SEQ ID NO: 2766 - DNA, 2481 bp, Glycine max
  Intron number 1 from transcript Glyma09g09100.2 (locus Gly ma09g09100) derived from phytozome v7.0 (chr-ID Gm09; pos 8599145 to 8601625)
ggtcacccaacaagtatgtttctaacaagtaacaactcctatgtctcgctttctatgaattcatgcactttgttcccacaaaaccggtttttttttttaagttattattattttcttcaattacccttttgattttgaacaatttcttttggatgtgagaccgtgagatgaagaataagacagtggtttgtgttaattcgatggtttccgtttgtgtgagatgaaatagaggacccatatgctttcgggttgtgtggccatttaagaagtgatttttttttaaaaaaattaaacttatgttgtgtggctgaagggggttttgtttaattggagatatgtatagagaaggttgtttaattgggaaaaaaagaagaagtaaagatagtgggtttcaattgtgcttgtaagttgtaaccctacccttagttttctgatgaattgagaggattttttaattagacccatcttttggattaagtgaattaacctgagagatttgggatagagggtgtttgatttgggtaatgatttttttttccttttcaaggatgaaattctgggaaattgaggaggaaaatattttctagggcacaacaaccaacctagccttattcagttaatcctacgaggtggaatctgctgtgtagatcaattgataccattcaaaaactaaattttcaagggataatttggcagttggtcatatttaatggttccattgaagttttctttgatccactttactcattggaacctctgttcatcctctcacataaccaaaccacccacttgaagaaagtttatgtcttcgtgtccttagtaggtgccattccatttttctatcagatgtattcattcctagaatcctagtcttatgtgttcttgtttatccacgcattaccatcaatactgttattttcatttgttattatcattttttgcactccaggtggaatatttctgctacactgtacactgtagagtattgatgttttctttagctgtcttgtagaattttctgagtttgataggcactttattatcataaattatacctgaaacatttcttcatttaatccacctggtatgaatcaatattggtgacatctctaccagtctactaaatgtctcgttgtttctaaggagatgagtttgtcgctattctattgtgtaccagggactcattttgaagtcaatgcctttggtttagtttcataaaaaagcttttgtgcatatattttctcacttggataatggatggatccaattggaaagggagagttctactttgatgaaattaaaatttaaaagcaaaattttccttaaatctatgtctttggcttaactctgtttcagtttaccaactttgtaatggtctgagggtctttgcttgacaaatatgatacatgaccttccctgtcaaatttaataaaaaagaatattatagttcaaaatataaacccatattctagtatgtatttaaatactatctatgccctggctatggaacccaaattcaagtgcttcctagctgcttggcttcaagggcattggctggtggatcacaaattaagttacatctgattgttattgatttatgtttagaggtttggtttctgaaaataattaatcttaataggcattctttatgcagcattattaatgacaccaacatcgtgtagcatggttgacagataaccttgctccttatgcatgtggttaggggttcaattcccaggtttgtgtatggaaaaacatttgttaagagagattaaccattaaatggacttcagtatctcgagggattagtccttggctctcagccgagggataccctgggtcatccaaaaaaaattaatgggctttcactttccatattggtcaaggattttgctggagtgagggatttaaaaattgatgaagggaatcatactgattttttttatcagtattttggtgtgttttaaagggtcaataattaccaatagaacttgaaacttttgcattcatgttaagctgttaacattgatacatattttggtccctagtggggtaatgctgttattgttgttgttgtaagcaccaattataaagacacctacttaagttcatatttggattagcttattttgtgaggaaaaaaaacgtttttttttggtagcttcttgaaggatctttaaagattatcatttcccttgagaaaggctaaaacaagcatgcacttatactaagctgtttagagttcaaatgttcaattgaaaattaattcttcacacatctcttaatactaaaaaaagcttctcactttaaaatttagaaaatataagaggaaatttattagaactaaagcatcaaaggtttttgaaagtctaatttacatttccatcaagttcatgctaactgatgttttctcatgtgtgtttctgattggttgtttatttattattttctcttctaggtctgtgccagcatctggactta

SEQ ID NO: 2767 - DNA, 1661 bp, Glycine max
  Intron number 7 from transcript Glyma10g35510.1 (locus Gly ma10g35510) derived from phytozome v7.0 (chr-ID Gm10; pos 43734513 to 43736173 reverse strand)
catatttggataacacggctgtctatcataccaaggtttccttctgtccttactgttttatgaaataattggattgctttttgttctgcattttattgctaaccatgaaattcatattgtgttggttgaaagaatgagatttaacaaagcgactcttcaagagagcaccctatacaaaaacagattcgttactgtggtttgattgtcaattctgagcctagttgtcattgctgacaagtttggttttagaaaatagatttgttactggacttcagatagtttggattgcttggcatgaacatacttaagaaaatagtgccttcttattctgtcaagttgtttgtgctttggtgcattggaaggtgagggaagaattgaaatctattttggctgcagtttggcagaattgatttgaatgactgataagggctttttttataagataatatataggtgctctacttttattgggcagggtattttcatgtttgcactttgtcaaccttgagttaccctacttgaaagtcctctttgtgaatgggattagagatatgaagaagcatgaaaaaccttgtgaagattgacattttgctgaatcctatcacattaaatactctttatattaataatattgaagatatgacaaccatttgcacataatttgctattgtggtgttaggtcaccgtagggggttgtaagcttgattttgcatagctggtgtctaaggttggaaatggtagatgcatgttgtttcaggatcatgttgcaacaaagagcatcctttaaactattctttgatttatttatttgaatctcctaaagaatttactgggtcaatgaaccatctagtgaagattttgatgcatctatttatgatttgtatggcacttttattgttcttaacatatactttgcccttaaatctgtatgaattatttattctaaataattaaagttgttattacaagttggatgtcatttacttgcatattatttttaatagatctcattaatttaaggagaatgcatcatcttatttttcagctacttcttattataatcatgtcttattcttttaaaatgtataattaatatttgaagtttgtaagtagtgtcctggatgcataaaatgtctgcaatcttccacacctaactttaactataaaataaaatatggtggacagatggtaagctttccatctcttgatatgctccttttggcctagcatggtttgctttaaaccatttctttagtgttattagtgctttccatgcaatcaattagtcagtttgcagaaactatgcttgtgctgaagtaagtcgttggataaatatgcaaatattaactattatttctactgtaaagaggaaaataagaagaaaagctaaccccttgataagtgaaggtaccttatgtcttcttgttacaaataatagtgactgaaatagtttgagttaatatgattttatagctacacggacatattaggattgacaaataaggattttattatagcctacaatctattgattgggagctgcaaaattgaatgtcataaagtggtggtggaagtgaaaagatatcctggggaaataaaggttttattcaaatatttttatatccaatgacaataatatgttatgttttcccttgtgcaga

SEQ ID NO: 2768 - DNA, 5916 bp, Glycine max
  Intron number 3 from transcript Glyma17g09430.1 (locus Gly ma17g09430) derived from phytozome v7.0 (chr-ID Gm17; pos 6970088 to 6976003 reverse strand)
tcatttcttggtacaatagggtccttggttttcaggtaaaaggtggacgtggtaattgacattcgtcctttgcacaaagattgcttttcttctcaagattgatatccttactagtttatatgctcttcaggggtaaaattcacattcaagaatataaatattaacaatccagatgaggagtactttttactcttccatgaaactgatacatactcatgtaagcatcatatctggttttgtttatgaacttaaaagtatattgatatactccatgaaatctgaattttatcctttatcttccggtgttaagctgtgaactttttctcagggacaccaaagagttgattcgtaacaccttttatcctgacatacatatagatcaataaaacatataaaaatactgataaacaaattcacaaatttacgggtaaaaggtttacattcatttcactattattaaataaaacttattaaaaacatatctggctcagaacaaggccgttaaagtttacaaaagaaattttgttaaatcagtgaggtaaaataaaataaaataacatcatacaattaaaataaaaactcatctccaatgtcacatactattagagcattgtgttcgagcgtcttctagtacgaggttctttaaagtcattcacctagttatctgctctcacaaacacaaggttcgagatcattacaagatccaaacactaataacacacagaaagtgagttattacatttataaaaaaagtacaaataaacaaagacatgatcaaaataaattataaaagtatttacaacatagctcaacttaatacaatccacgtcacttcaccactttatcatttaaaattcatttttcaatcatcaatcaaattatacatgaatcacacacactcaggtcaagtcgtaataacactcatcaatttcataataaacaattagcagacgttgtgcaacaattatactaagactcaaacctatatgcaatgtggtaccatgttagtaaaaattcacactaggacgcttaggagtacataacaagacacatcacaaagtgtgtatgtcaagtcactctcactaagtaaaattataaggtgaccatttagggtcactctgttttgcgagaatattccaatcatagtataattttttatcacactaatcttatccaaaacaaacaaattacacaaaaatgtttctcataacacgggagtaaaactctcaaacaatttcacataatcatataggaagaattacaatacaataaacatccaaaaataaatctcaatttgatcctctaaggactcctacacatgttcattctaaccccaattatgataaactcatccttatctctatgcaggctcacgtgtctagtccggtaatgataacgaaatctctagcaattgtttaagattcctcaagtttttcctctaattgttctattaggatttccaagcgttataagaaaggagaagagattgcagtctccatttcactgtcaacgtgcgagactaatttctctatgcaaaacattatttcgcaaatcctaacgatgagaatgtgcgaaaatgagtttcgaaggtggtgtccaaatttcacaaagatccaatgattaaaaaagaaagttcaatgtgagggatatgtcttccacaatagacattatcttaaaaatttcaacggtgggtctatgcgaaaataagttacaaacttcatgttcaaatttcacgatgatccaacggttaacgagtttgggatcgttttactgagacatgtttgagtgtatgctggaaaaagagagggttttggaaaaggaagtacggaaaataaatttgagaggagtaaagagcatagagacgtgtcgtaaatgtaaaaaatgacctattacgtttatatttatagttagggtactctgtgcctattatttgctctatttttttattcttattattttataaacaaaaactctattttatttcatatcaaacgaataaataaaatatccgttttattttccttcaaaccattattttaattaataaagttatttctccttatttatttaatcataaaaatctcattatttttctaaaaactatttatttttaaataaaaatatttttaatttattttacaaaaaatggatattagataatccaccaattaaacatgacaaatgatctatttaaatttgtcagaataatgaggaaaaaagttccaagaagttgtggcacaaggtacaacaatgctcctttcattcctttatatgactgcattcatgtgatgcaagagttctgtatgttgcaggctgaatttagcacttcaattgaaaaataagttaattagtcgtttgcccagtctgattatttttaaaaaaaaattgaaaccaataagcctttgccaattctgctggtttatctgtggccattgttgtagacttggcaacctttgtctggagaaagaatcttgctcggatcacatggttattaggaaggatctattacatatatctatacccgtgatcatctccttaaccatatttcaacaatttgtcttgtttttggaacattgatgaagaggctgcttcttatgaatgttatgttttaaaattacatcataacagggaatttagttgtgacaactgatgaacatgaagaatctgcctttaactctgcatctgctccagttttatcaatgtcatctgttagaagagattttctaggcaaggaaaatgagcatcaagctgaacctacagaaggcaataaacagttcaaaaaacaaaatgtgcacagaaggctaaaatcatcagttttatctcctggatctgcttcatctgtttgccagtctcctcgtttgaaggtatgagttgatctgcatcaagctgaacctacagaaggcaataaaattcctttctcagcacacggtattatcccaagataatggtcttcacagaagatgttccccggttgtagttggccattgtaccttcaacatgaatgattaagaagtccctttatataattttttttttatctattattggtgtgattgatcaatcttagcctagagaaagacgataatggttagactaactacttggctcagactatctaagacaactattttgtccttgatatgggcattgtagatgctgagaattttattttagtaattgtattgtgtattaagtattaacattgtatgattgttattgtttgaattttattttcagcaaatcagaaactgacaacaatccaattactggatatgtagatgctgactatgcaggtgatataaacaagagaaggtcaataattgtctatatattcactctatatggcaatgtagtccgttggaaagcaaatcttcaatctgttgtggctctgtcaaccactgaatcagagtacattgcactgactgaggccataaacgaagctttttggctgaaaggatttgtagaggagctggaaggaaagaaactgaagactgaggttatgtgtgatagccaaagtgctatatgtctctctaagaatcagccattccatgagatgacaaaacatatagatgcaaggtttcatttcatctgagacatcattgcaaaaggagtgatccaagtgaagaaaattgcaactgaagagaaccctactgatatgttgaccaaggttctcactgctgctaggtttgagcattgtctagacttagtaggcattcaaagacctaatgagtgaagtttcaattcagaaacttgagacatttattggagctgaagctgataatgaagatccaaggtgaagatttgtgaggattaggggatcaccattaggcttagttagttagatgccatagctgtttttggctaagtgttagttgaagagccttggtagttaagttagttatttctattataactaactttaggcttgtggattccttctatataaagtcttagctaggcaactcatgtgagtgtgaatcacaaacaatttggtgagataccttcgagtatgtgtgagatcaaagtgtgagcaatctagctcttgtaaagttattgtaatctctcaataaaagtccatgaagtatcttgaagagtggatgtaggattcaaatctgaaccagtataatctttgtgttctttcttttctttctgcattcttctgctaccattgagcagaactctttatagttttgttgctgcaaatcttacacatacatttctgcattctattctagatgtctgaatctgtacatattgatcaaatgatctctccacagaatgggtcaaacaatatttgtcattgttataacatgatctccacaaaatgggttagacatgaaacaatgataaataaaacaataatgttttaataaatacaataagtaaaatctagacaataaatatcactaatattttacaataataaataaatatggtataacaatgattctccactatttattttttggaaaaaggggttctcctctgtttagtagattgtacaataaataatcgtaaattcacacagaagggtattcctctataaacccccttgattatggtgttgttttgggctaccttatagaattctctaataacgtaaatagataattacatatatatacatggtatagaagactactaggtggggaagaaacactttgaatttgttgcttgacgtagccgtttgtgaagcaaggcatgggtgtcattccatagctttctagcttctgattcgtcatttgctagactggagcagttactctcgttacaatctgtaaaatatttcccactcactccatctgtttgttcgcttagagcaacataacacgtcgttgatgcaccctgtgattgtgaacacgcattaatgtaattactacaactcaaagtggaaaattacagagacattttttatgctttctttacaatttattttagtcaagcagatttaatctatatctatatttagtataaaatatgttttattataattgtcaaaccctatctgcctagttgttcgtgttatcaccattagtttatgcatctaaatttctccatcactttgagaatattaaacttgagcaaatagttgctcacttaaaaatatttcgtggaaagtgttcaaaataaataattatttcttcaaaataagctgaattaaacatgtatcgcgtgttgtttattttaaataaataattattttagtggagttgattttgaattgttgaatatttgtcaagtacatagccgagacgagtgtttaagttaatctgatttacaaattttattttagaatgtgtgatatcatatgacatgtgaaactgattttgtgttctaaccaaataagcactaaaacatttacaaacctgtgatatcgatttcagcaacttcgatgcaatgaaaaatagggaatctgcaagaaaattttaaggatatttagttgctcaaccttaaaaagaagaagacataggatacctcttaccaaattatttaagctttgtacgtacccgttattaagcccttatgtgctctaataattcccgtcttcacaatgcctggatgcactgcattaatagttacatttgcattcctttcctgcgatcatctcccaatttccaacaacattttagccacgtatacaaagttttactttaatatcgcgatgatcacaaataatttttttaaaaaaatacaataattaaaatttgaggagttaattagttatttctcattctaaccttcagctgtctggctacttccttcacatgcagaattgtggccaattttgacttagcatatgcgcgtgtgccattataactgcatttgttatttaaaagagtattacgataattagtatccaaatttgttcttaattttgcagggaaaggaaccaagtggtacggtaattttactttt

SEQ ID NO: 2769 - DNA, 2138 bp, Glycine max; identical to SEQ ID NO: 2295
  Intron number 2 from transcript Glyma14g00630.1 (locus Gly ma14g00630) derived from phytozome v7.0 (chr-ID Gm14; pos 305996 to 308133)

SEQ ID NO: 2770 - DNA, 969 bp, Glycine max
  Intron number 15 from transcript Glyma12g31540.1 (locus Gl yma12g31540) derived from phytozome v7.0 (chr-ID Gm12; pos 35133694 to 35134662 reverse strand)
gtgcaccatcaactgctggtgacattgcgtaagtttcatagctattgttgatggttatttgtgaataatggtactattatgttgtacatcacagtgactacgtttcaattggctattctgggtcaataggttaatttttgtattggggcatggttgttgatgtaaaagatgtccaatcaaaaccacaaccagcttgttttcttagtttgtatggtgcattgttgagatctttgagcaaattctggctgattattcaacatgtacattttatattaagtatgcctagttagcacaaaaatgcacgattcacatactgcctcactggaatgatataattcatttttgtagattttattttatttttatatttaaattatgctctgaataggatttctcttggcagtttgcttttgatattgatactttagcttactagattgtttattttagtggggacaaacaagtaaattgttatgttaatatgggagcttatggtgtcaaatggaatagaaaaggaggtcaaagaatatgaaatcattttttaatactgaaagatttcttgcaattattacattcttgatttttaaagatggtgctgcactagaatcaaatcaattgcatgaggagtggaaggttgagaaatatatttatgattgtgtgattcaaatttaggaaaattttcttggctatgtacatgaccactacctgtcgttcacccaaagtttataattgtcttctcatagtcatagttttattctaaatacaggtgttaagagtaatacttcagcacaatattcaatcttgttagtaaaatatatcttcttttgtttatctcttttcccttttccatctaatccataaaatatcaaaagggctattataatactagtttttaggcatttgattttctctattgctaattttgtaaaatgactatcagatatatcgattatctattcctaggagatt

SEQ ID NO: 2771 - DNA, 135 bp, Glycine max
  Intron number 5 from transcript Glyma07g01890.1 (locus Gly ma07g01890) derived from phytozome v7.0 (chr-ID Gm07; pos 1292455 to 1292589 reverse strand)
agcctctgggacgtttggaataatagcaatcatcagtaagtccttgaaattatgtcagatatgaataaaattgtattctttgtagttgattttgactttcagttgctgtgctaatgtgtttttctgaattccagc

SEQ ID NO: 2772 - DNA, 6400 bp, Glycine max
  Intron number 1 from transcript Glyma03g42160.1 (locus Gly ma03g42160) derived from phytozome v7.0 (chr-ID Gm03; pos 47439486 to 47445885 reverse strand)
gagtttctctcggggttcttggagttatttcccaggtaattaaattatccacaacaactttgttttcacctttctcatttctgatttcaaccgtaccaggtaaattaagtaattttatactcaaccagctcaaactcttttaaatcaatgtaatcattttttaatagatctaattactttactgctcatcctttctatgcaatacaattatacaatactaaattttaacggatcccggaaacaccagatgcttgagctatcggttttaattatacactttagataattaaaaataacaataaggcataataacattcaaataaaatatacattcattttgagagacagataaattaaagagtggatttctgcaatatctcgatctgagaccttattaatttaacaatggcaatatatcctttattagatagcttaacagactatgtaacttgacttggtcaacaaatttcagaagtatccaattaatttaattacatgcaattaattagttggatacttttgaaattttctaaatattgctacatgtaattaaaccaagtaaaactaccttttaaaaaaaaataatctaaattgtgcatatgtagcaatacttttatcagaagagtgaaaatattttactaatcacacacatatagaacataaataaatataaaaggactgaaatttagttatacaactaaaataaataatcaaaattaattttaaatataaaattttaactatttatatatggctatataattaaaactgacttttttttttctcacactcattaaatatgcctgatgtacatatactttagagcctttttcttatcatagaaaaaccttattctatagacgtatttatatataaataattaaaaattatatatatatatatatatatatatatatatatatatatattttcacattttaatgatttaatctcattcctgattactttagttttatatatacacacaggaacacggttaaaaaaaataaaaagaaaagtaaggcatttcaacgttccaataaaatatacattttgagattggaagagtaattttatgtcatttgttaaaaaaacagtaattttatgtcataaaacttcccttccaaatggcattatctgggggagtttattaaattaaaaatgccaataccggttagtaggtagcttaagattgattatatatgtaacttcaacttgaattagtcagcattttttttttgtcaaaacttgaattggtcaacaaatttaaaaaacaaccaactaacaataatttttttataatattttatgattatttataattaaataaaaatgtaaaaatgtattttatttacatgtatataccaagtaaaaacctttgttaaataaaaaactgtctaattacctaaagaaaatcgtctaattatgttgcaatacttttttatcttgacggataagagtagttaaaagcagacatttttttcttttcttgaactaatgcagcacaaataaatgttaacagaatgaattggtaaaatgaattcctcaattgaattcaacaatagaataagaatatatacaagtcatttgacaacttgacaactatgctaacagctgtacttgaaactaactaacagttgtaccaaacatatttacaataaatgatagcgaatgaaatatattaacagcccccttaagctggctcatgaaacattggatttcgagctattttgatggttgattggttgtcacaatatagaataatcgacaaagaagtttcttgatgcatatcaatgagcaaatagcttaaccattggagttcacaggcagtgattgtcaagggccaatactctgcctctgatgatgatctagaaatggtaggttgcttctttgatttccaagacacaatagaggaaccaaagaagatggaaaaatcagtgatagatttccttgtttctgggcaagctgcccgatctaaatcactagaatctcgaagcttgaagtcactagctgaagagaaaaaaaaaaaaaaacctttccctggacatcctttgatgaatttcagaatgcgtcgagctgcatccatatgtgactgtgtcaaattggacaaacattgactcaatttttgcacagcaaagcataaatcgggtctggttttagtcaaatatattagcctgccaataagtcttcgataacttgatggatcggataagagaacaccaactgtagcataaagtttggaattaggtacatgggaaccaaaataggcttgcagcctaacaagccaacatcggttattaactccaaggcatatttgcgctgagatagaacaattccagacttggatcgagccacctctaagccaagaaaaaatttaagttctcctagatccttgatcctaaactgttggtccaaaaaactctttacataattaatttcttcaagatggttaccagtcaaaaccacatcatcaacataaactaggagaatgctaatatgagaattctgattcttcacaaacagagaataatcagaagaagattgatggagacccaaagaaatgagggcagcagtaagcttagcattccattgcctatttgcttgttttaatccatataaagatttttggaacttgcaaactagttcataattagcagtggtaaacccaggaggaactttcatgtaaacatcttctatcaaatcaccatgtaaaaacacattattaacatctaattgatgtaaatgccaatgttttgtagcagctaaggcaagcactagccaaacagaagtaagctttacaacaagtgaaaaagtttcattataatccacaccctctaattgagtgtaccctttggcaaccaacctagccttaaatctttcattgctaccatcagatttccttttaatcttataaatccatttgcaaccaacaagtttcttatcaagaggtaattcagtgaggatccatgtgttattgttttgtaaagcttcaatttctttatccattccttcttgccaactaggatatttcacaacttgtgcatatgtatgaggttcagaaatggtggacaaggagagtaaatatgctgcatgtggtgatgataaatgatgaaaggaagtaaattgagaaaggggaaagggtgtacctgaagatgaatgtgcagtactaagagtatgtaaaagattacattgataatccttcaaataaatgggtggatttttaattctggtagatattctagtaggacctgaatcaataggagaaaaagcaggaacaatggaattagaaacagaaattgtttatgaggtagagacaggaattgaacccgagtctgcagaaattgtttctgaaagaactggggcagaattaggtgtagaattatttgattctgtaggattggttggtaaagaggacaagtccgaaccagtatgaaaaacagggagaggaagtgtaaacatactgtcagtaggagaaggaggaggggaggtagtatgaaatggaaaaatggtctcatagaaaacatgtcttgagattaaaagttctcttgcttgcaaattatgtaagagataacctttggtgccaaatgagtgaccaaggtaaatgcatttttgagctctagattggaatttggttctatgagatggaatgatggatgcaaaacaaagagacccaaacactcttagggattgaaaattaggattggtattataaagaagaaaatgaggtgatttagattttaaaattttgtatgacaacatgtttagaatatggacagcatgtgcaactgaaaaagaccaaaaagaaagagggagatgagatggaaacatcaaagaccttgcaatgttaagaatgtgttggtgctttctcacaatgactccattttgttgaggagtctcaacacacaatttttgatgcaaaattccctttgaatcataaaatgaagacatggaaaactcaacaccattatcacttctaataattttgattgttttgttaaattgtgtttgaatgaaagacaaaattaacaaggtgctgcctagtttcagacttagttttcatgagtttcaaccaagtgaattttgagtgttcatctacaatagtcaagaaatatttatggccttgtatggaaggaaccgagtaggagccccaaatatcaacatgcactagatcaaaaacacaattagtgatagtagtactagataaaaaaggtaagtgcctctgtttagagaaatgacaattgtgacaagttttattaataatagatgggatattacaattcagcttctaaatattatcatagcgccaagatgaaggatgacctaatctatagagccatacattggaaaaagaaagactgtatgtgtaggtactagtaaaatgaattttaggaacaaaattagaattagaataaccagattgtactagcagtgccaatcatcttctggccataaatctgctgcaaaaaacaaagcttgtgagcgaaaatagtttgacaatcaagacttttagtgagtttggtaatagaaataatgttgactgaaaaatgttcaataaagagaacatcataaagaattaaagaattagtcagcacaacaatgcctctaaacaaagcagatggaaacttgccattaggtaatgcaacaagaattggtttaatggctctataagatgcaaaaagattcaaaaaacaagcaaaattatcagtagcacccgtatctaggatccacgaaacattatctgtatcaggctgagtagaaatgtgattagagctaacaaggttggaagagccaaccacatttgaagagctggtagcatcggcagtaggcgtagcagatggcaacaaggcaagcaaactctgaatttgatccttggttaggctagaaagaatgccaccagggtctgaatcatcctcaggttgaagattagcaattgcaacatcatgcacatatttctttgatttccatccaggaggaaatccatgctttagaaagcatgtgtcaatgatgtgattagtccgattgcagtgagtgcataaacgagcatgaccttgtttgacaaaattgaacttgaaaggagccttgccacgaccttgtgatgcatttggtggagcctgagcagtgagaagagtgggagtaggcagaacaccaacatgcaattgacgttcttgctgaagaatcattgagaaaacctgatccaaactaggaagaggatcgagcatcaatgtctgagattttgcaaaagcaaatggctcattcaatccgtgaagaaagcataaaacagtatcacaatcacgatacttcttgaaaagctgaaccgctttggaagaaccaacaagagtcgcatcacaggtagggattggacaaaaattacacaacttatcccacaaaattctcaatttggtgaaatagctcgtaacagaaagatcaccttgtttagtggaatagagatcgttgttcaattgtagaatccaaacgcaatcaccttgggaaaaatgggtacgcaaagcattccacacctcagaggcttgattcggccaaagaatgctggttgcgatgtcaggagaaatcggatgattgatccatgagcgaatcaggttgttacatcgtttccaagaactgtagtttggatgttgctcatgaggttttgaaatcgtgcagtccacgaagccaattttgttcttcatcttcaataccaacgtcatcgcttgagcctaaccatcaagaagagcagtaatgagtttcgcagagggattctcgttagggtgaacataataggcattagagatgtcttgaggaagaggattggttgtggaggaggtgaccgtaacagaagagtcagaagtctcgagagtaaaagccatgaaagagatctccgatcaatgcaaagaatgttctttaacaaactgataccatatcaacaataagataagaatatatacagctgcacttgaaactaactaacaatccgaaaaagatacaagcttgatatatagttaccattgaatacttccgttaagattatattgttgaattaaaaaatatttacatattttttaatttaaaaatttaatgataaaaaaataaaactcaactattaatcagttttatatttttcaaataaataataatacattaaccactcttcattttaaacattttttaatttctctttctattatctgataaatcttattattttttttctttctctttatttatagatgtaggataacatatataggatgtataccaaacatttttcttttaaaatatcaagtcttaatattaacttgttgagttagtccacactcagtcaccgagagttgttagtgtaagtgatacgtttggttataacttttgtacaggttaccctgaatttagagcctctcttcaagcgatc

SEQ ID NO: 2773 - DNA, 7069 bp, Glycine max
  Intron number 6 from transcript Glyma09g30140.1 (locus Gly ma09g30140) derived from phytozome v7.0 (chr-ID Gm09; pos 37036457 to 37043525)
ggttaattcttcttcgaggtaacctcttttctttctctgatgtgtatgagtatgaatcttaggtgtcactatatgcatgggtgcatgggtggattcactatctatatctatataaaaatacatatgtttgagtttaataattaaagtttgagaaaatctgaaatacaatgtccaccctttgcgaaactcaaaaagtgcttctttctgacaacttttgcttttcatttattttctccacttctacttactttctttctttctcaagatcaaagtagtgattcctcatttggttgatacctctttttgatacaatgtcattcaacttctttaaatgtgtagaaagcaaagtttcctgaaactagattaaagtttagtggttatgtgcaaataaatatacaaggagaggagctattctccactgtacaattacttcaatatataccttttatgggattaacattccaattttagaacaacatatttctatgctttatattgacttattaagtttcttacttcctttggccactatcattgcatgtcttaatggacttgctttgatctccattcaataactaacattatctcacaacactataccgttatccaatctggctttatttcaattccagtttttttttcactgtgaagtcgtacactttttggcatttaagctttatcaaagattgatgcttaattggtactagtttctaattcaaaattttttagtcaactaatacgacaaaagaggctaggatcttaggtgtggcaaactcctactgagtactaaccaccaataggacgtttctacggagaattggaataggtagggaaaaaagatctctagtggaagtgaaggtacacataacacacagttatataagaaaaaaatttagattgtcattggggtatgatacaagacaatgtccttatatcttctttttctgtggctaaaaatggcaaagatttcagacacagaaaatcaagcaaattatcttgataatattatgatatttaattatgacattaagatgagtcttcaattttgcatagtaactttagtttgtatgagattatatatatatatatatattccatgaccatattgatcacttttagcttccctaagtcttgaatcatgataatggtggtccagaattgagttggcttctgatcagctttgactcagatgctcgcggtcctcacgtttgtacactgcaaaaaagtgccttcaagtcagagagacaggcaatgaggttgaattggtgtttctcttttgctacacaactcgtatttagaaaagaaatgctagtgtaattcattaaactttatgagccccattaaataagttatgcctgtttcttagtaggaattaggaaaaaaaaatcaattaataatgagaatttaataaaactcatcaaatttatttgacaataaaaatatactagccaagtaagtaatacattataatgcttaatttaattgctacctatataactcatatatatagaagacaaatgttatagcttataagttaagtagtctttttttttcatacattctttttaacatttactttttgtaattgagaaaagtttcttagccacattaagcaggcctgttttttatatagtgacatacagataaaatttataaaaaatgagtaataaaataatataaacttttttcataataaacattgtattagtaaaataatatgttaagaaatatgcattgtattagcattctcatgttcaaagatgacatacctcatctttacaatcactcccacctgggagcaggctcatcattaaatcaattataacaaattcataggtaaattattgatttagtgtaattaaatataaaaaagactaattttatacgaaaggaagaaaaaggaatcttaataatataattgggtatagatgattaggattacttttatattttaatcttaatcattcatttaaaatattaagatcccttattaatgggtttagttcagttgattaattagtgtgtatgggtattgtaaatttttcggtaaaattgatattggataaaatgtataaattcaaatgttacacataattaagttatatatatatatatatatatatatatatatatatatatatatatatatatatatatatatatatatatatatatatatatatatatatatatatatatatatatatatatatatatatatatatatatataaaagtaaaaaaagaaaactaaatgatgttttatgatatgtatttcaaaacaatactgtatatcaataaaaaaagaattagctatcatattagactaagtgtactgatttagatagaacagacatatataatttatctttaatacatttaaaataactttaatattatatagtatcatatatattggtcatacactaacctgaaatgcaattcaaaccacctgataactaagctactagctagctaggttattgaacagcatcgaatattatatattttcaacttgtaataatatatattgtaataagatttgaattgagattctgagaaatctactttaatattatagatttaagtacttattttagagaataagactttttttttgttatataaatgataaataaacttaaccgtatgattggaacgattgaacgaatggaaacagatggaacaaaaagttttcaaaaatgatcctccctatgtttggtgacttgttaaaaaggaaagaataacgaaaaagcagaggctcactgattctttgatccttctgatttggatggaaagtgactaagatgtttttatgtaagtaaaatacacagttacacttatatattttatacacttttttaaggatatttatgtcattttacatatatattttctttccttttatttcctatacaatcaaattttcagtatttgtaattgaataatcataaattgaagcgatacaatctcacaaatgattcaagatcgagatgctcatgagataactttagaaggtttcaattgcttctcatgttttttattgatgaaaaatcgagtatttgtaaactcaatttaattatggtatgtgggtagtttaaaattggaaagctaagcccaatgttgtttgcaataatagtttatttcattaatattaatcgatcattgcatttcataatattgatctttggtgcttataattggttattggttataaataattgataaagaatgttagaaacaccccctacataacacgtttctttaaatacactttctctaattgattaattttttttaaaaataataaaatcagaaaaaaaatcatggatttactatatctttttgactccttaattttttattttttaatctctgatttttttaaaccgatcaagttaccttgacttgtgtatatattgcgatttgtacgtattaatattccaactaaaatgtaagttaacaaacctaaaaaacatttgttattgtgcatactcacttgtttatcgattggaataaattagcaagttaaaaacatgtattttaagataatatttagttataatttagtaatttactagtgataatgattgaatttgtgatttcatcaaaaagtaaaagggtttatttgaggaattttgatttcgtattgataagattttgttgactcattggcaagtgtaccaaatcgttacaagtagtaaagttctcggaagtccgagtgtcgaatccacagggactttgtttgtacttagattaatgcaaacccaatttaaaagtaagagataagaaatttaaaatttaaaataaaagataaagataatagataagataagatgaaagaaatttaaaatttaaaataaaagaaaaaagataaagtcaagataaaatagtgttaggaactgacttgccttgtctgcctaggatgtatgagtttatgattttttctttaccaattcaggtgattttatctcacccacatctattcatttacctgcccctgatgtctcacgatgacaagcctattttacctatctatcccccaaatgcctttgcaaagactcaatagataaaatgcatgaagttctaattctagatgtttgctttgacgcatgggcataatgcaatcactctatgcctagcaatgattttattatgatatcttttcttcttgttctattagaagttatcctctcccgagcgtctaacccctaaaactaatgcatgcatatcttctttaaatcttatttagaagttaccctctcccgagcatctaacccctaatagaatataaacatgagtatgcaagataaagacagaaaagaaaataggaaagaaaaacctgatattgcattgataaatagtgaagagtacatcatacatcacattggcttctaggcctgccaggccctaactaagggtttagccacttatggccattgagggctttacaagtagaataggggtgaaagaaagaaagggagtaaatgaaacccctaggagagggggttctgtcgtggtgttctctgtcccttggactggctctctatttatagttgttgaagtgggctttgggccttcgtaggcacgctcagcgcgacaccccctcgctcagcgcgtgtagatcgcgcgcttagcgcgcatgttgcaggcttagcgcacgcttctgttagatcgcgggcttagcgcgcgtgttgcaggcttagcgcacgcttctgttagatcgcgggcttagcgcgcgtgttgcaggcttagcacgtgcttctgttggatcatgggcttagcgcgtaacgcgcgctcaacgtgcgtattggacttggcctgcttcagattttcttcttttcttcaatttttctagcctttttgcttgttacacctccagtttttatatctgcagccaaaattcaacaaaacatcaattctttaatatttaagcgcaaataactgctaaataattatttttaaagacaattttgccttattttctatcatcaaaatacaattatttagcagttatcagatttcttagagaatgatattattagtaaaaaaatagtatccatagatatttattgtacctatatttgacattttcttacaatttaaaagttcattctaagattatttaattacaaaatataatatctttgaaaataaacaaaaaatcactctttcctctcacaatctatcatatcggctatccatatatcactacctactgtccaattggtaagacttaattaaaccattcgtcggaatgaattataaatactatctcacatatagatatgacttagtgggagttctgctaaaaaaatgtctgaaaattatttttaatatttctcaaaacctttaattatatacgtacctctcaacattttaaagaatataaaattaatccctctaagaaaagcctctaaatgagatcaatggaaggttcttccaggggctaactcaatagtaaacaaactaacattgactcacaattacagatgcatatgttcttaaattccttttaagaacctatatagattccctattatttggtcttaatttttaggttgttcgtcttcggtggccttttcccgattctttttcttaccttttgcctaattagtttgtgtctgtgcaacataatttttatcttgaattcaaattaaagaaatacatcttgaatctatccttgaaataaaactttgtaatttgttatacgtgaacatcaaatgaagttttaaaagtatatatgtactccttattccaaaaggtcttaacttaatcctttttcgtagaaaaatctgcagatggcttaaatgtgagttagtgttttgtatgattaaaatacaaaaaaaaaaaaaaaaatactgaaacaaaatgcagcttgaccttcacaagtattctttttaatgtatcttatattattgtaatgttggtaaacctaattataagaccggacttatattctttattttactagatgaagaatagctacttataatatgtttgtataatatgtaacaacattatttaatttctgcattgtcacattatatttattcaaattagatacgattttcaccctattccttattttctaacaaaaggtcacctgtacacaaccaaataaggttaatttgtagcataagaatataataatgcattcactttctcgtcagtcaccactttattttcttcttttctttttcttctctgcctgcacacatacacttcaaaataaggtgtctatgttgataactactctataggagtatcaatgatatgacatagtataagttattttaacattacaatatacatttcattattgttgcatttgatcaggagagggaaatgataccttagggtgtattcggtttatgataatatattccatgttcttattgataattatatagatgcagtcatgatcatatattctttttattttatttttaagaattattacaaaatgatgaaataaataaaaacaaaaaattatggtttttcctctgattcatccaagcacaattgtactacgtatgcttcactcttatattatcgtttctcgctaccgaattcccagatcatgctatttaaatttcttttgtcttatcagtgtgttagtttttcaatataatggtgataaaaggtttgaacttgacctcatgtaaactatacctaagtttcttagatctatttggataaaagtcataaatatttttgatagtttttctactgaaaatataaaacctttttcaatagagaaactttgaaaaactctcaaaaacacttctacctttatatcaaagatgttcttacttctaattcaatcccaaagacttatccatgaatgtgtatttatccttgtacttttattattttccttggagtagatagagctcactataataatataggatcaaataaccaaaacgataattaatttgtatcaaataaagattatgttatagtgtgtgtctgtgtatctatcacattgaactttcattcattcaaaacgttgttccttgaaatgattagcgctagaggagcacggatacaagctaactcaagag

SEQ ID NO: 2774 - DNA, 1184 bp, Glycine max
  Intron number 2 from transcript Glyma08g18840.1 (locus Gly ma08g18840) derived from phytozome v7.0 (chr-ID Gm08; pos 14238473 to 14239656 reverse strand)
ttcgaagatctcaacgttacaaacacgctttggaggtttcactttcaccctttcctttctcattcataccttctttccattgctgaattagagtataacacatgattggagtttaaacaacttttttgctccacgacttctgcaaagtttattttagttctgtgatgctggatttgggatagtcaaggttttaaatatcagctgtggttcgtttgttgatatcgcatcaaattgcggacaattgttgatatcgtgtcaaattgcagacaattgcaacctatgcggtcccaattgcggtcacggtacagtttaaaaaaccttgaagtggccaaaatcacagtttttaaaaccttgaaaggggataattttcgcaaatggttaagataaagtagaagaaagaaaaaatctgttgaaggccacccagcagatcatgcaaatgcaagcttttgaatcttttttctgttttagcaaattagagcatgttactgaatttccacgattggttattatcctgattaagagtaaattatactgacatccctgtggattcttcgaaattcacactgataccgttgtatttttttggacaataaccctcttaattgtttgaaaattgaaatacattaccttgatatccctgttacttcagaaacacattacactgtgttctcatgttaagttttttttttttttgttgagttaaaacttaaaaaggaaaaggtttcatgtgactttcgaagaaattgcaagggatgtgagtgaaatttgctttgttattagtagtttttttaaggttcagaagaagaaagaaagatcttaaggtagttcggtttacttatttttgtagcgcctataactgttggaatgagggttctttgatgttgttcagtactgagttaggcctttggcaaatgaggccatcacacaacactacagaagtttcccgaagtgaatatatttgaataatgttattcggatatttgaatatattctgtatggtttatatcaatctgaaatacttccaatggctcctcgtctatataaaagttttgtttattttctagtgataagattgcatctaacttggaacaatttattatgatttatgaatactgctctctttttcagttggatctatagcttttgcaatttgtgattattgataattgcagatatctgagtgg

SEQ ID NO: 2775 - DNA, 1803 bp, Glycine max
  Intron number 8 from transcript Glyma10g02760.1 (locus Gly ma10g02760) derived from phytozome v7.0 (chr-ID Gm10; pos 1963585 to 1965387 reverse strand)
ctgcggtatgtgagagattcctactttttatttcttatccttttttttatatatattgtattttatttcactgggattcatttacatgtctttctcattattgctttaaaaagtggcatgatttgttcatgcgcaatgatgtggagattaatttctcttattctcgcaataaagcttgtttatgtacatgtatgtggctgctcagaccccgatggtaagaattgttcttacattgatctaagcattatggggtctcacataataccagagtagtcatttgcgtgctatagcactgctgtagctgcattgtggagcgtcatgactataggccactcagtggaaccccgtggtgttacagctcactgttgcacctggagtgccatgaatcgcagcttctattgcatcagagactaaatgtccccttttgtcccctcaaatgatattgtttggtgctgtttggggggggggggggggtggcgtaatctttggattttcccccccttttatttcatccctctctcactccaatcaaaggctaaataatgctggtcacttctctcttcgatgcaaaccatctgacccagagttctcagctgcatttccgtccaactcatagtaatagcatgttgatggagtttcctgccaacccatggcactctggtggaatttccagctaatccacactctgtcgaactctgacactccgttctgtggtctctactctgttcacatcctttggggtctgttctgttcatgtcaaggaggactagaggagtctatgttttgttttatattcttcgttcattgtactgttcatatagacaacctgcactttcttttatattactcaactcttattattaacttctgtttctgcgtttgccttaaatttatggcttttaatcattaattatgaaaatacctttaattatgttttgtttttttgcatttatatgtaacataaattattttaacttagatacgaaaatttcataatatacggtaatctttcatacacatacacacaccttagaaatttttttaagccatttatctcttgttctctaacatgctgataagctaatcgtggtttataacactaaataggagaggttatataaataatatcataatagtggttgacatagatttggatttgggaaaagataccgtctttgaaaatattactctatttctctcactttatttcttatactatttttctccaacagttgaatgcttaattttgttttctttatttgtcatcattttgttcttgtgcaataaagagagactgtgtgaaattttaaaagaatataatgtagattcctctctttcctatttaattctgcattccggaataagttcttgatatcttttagtagttggatgaaaaactagttcagtggcttagaactagtgtaagatttttctacttttataataatgtcaatttatcttgttgaaagtttaggtatttgggtagataaggagggaaagagagaatattctgacgtattaaatcaatagtgttgtgaaagatgtgatagaaaagataaagtacttagctctatttactataatagaagactcctcatcccgattaaataaggaaacaaatcctgaaatatatatggaatttattgctaaaagatcaccaaaggttctctaaaggccaatatattcttagatataatgttatgatatctagagatatcctctagatgttttaaagttttgatgattgtattttgatcgaatgtggcattgtgttctttcaggtttttgttggtgcacgattac

SEQ ID NO: 2776 - DNA, 1302 bp, Glycine max
  Intron number 2 from transcript Glyma08g10220.1 (locus Gly ma08g10220) derived from phytozome v7.0 (chr-ID Gm08; pos 7390507 to 7391808)
tcacagagcttcaggtatatacatatatgctccttttgtttatcactgttctttatttatttctttatttttccatttaattaagtaatctctttctctatattttttggaaaatatataatctttgatttggtggtgtagacacctgggaaaaaataagaagaggtagaagacaaataattgatatgattgttaatgtgatttgaaaaaaaaaaagagaaagaaatgaagagtttggataagatgtttacatttattgggtgttgttaagatagctagtctaggatggtaaaaaacaccttgaagcttaaacggtaaaaggaccttgttgaattaagctagatatagtatagtagaatatattatgatatcttttaattttatttacttttaattccttaaaatttgctagatgatacttgtatgatcattattcagttgttgacacctttatataagtgtatttttttatctactatcatcaatggaaaaatataattaaatatctattttattttgtctataattttaatggtatagtattctacgtattttattataacaaagaagcagctatccattactgcataacatttttgttaaactgaacattcatggggtaaataattaggaaaactatacttggacactcaagtgctaattaataaccagggagaaagagaaatatataagtatataatgtgataaaaagagagataaaaaaataaaaaaatattaataagttcttacaaataaagaggtgcccacagtgactgtggttaattatataatttgtcagatagtgagttataatgagatgagtaagtaataaaatataatatttgactataccctgagagagaataaagatatttatttagggaaaagtcttgcagacaagttggtgataaaccagtacaagacaaacgaaagatataaaaggttgaaggtcgtatttatgactatttgactgcttagttagaattgggtttccaagaagtttcggggtataaaagcaaagactcattattagacctaaaaaatttggacacaacagtggaacctatcgacacttttgcctttaatttggtgcatgtttttctcgagaggttttctttttatcgagtcaccttatttcataatactactactactgaataaagaaaaataataaatgagtcgataattttaggcgcagaatattcacatggtgcaggagtcctgaggtcaattatttggattatgaaaaagagttctaaagagtggggtcatgtgtattgcatgcaggccagatccatatta

SEQ ID NO: 2777 - DNA, 1151 bp, Glycine max
  Intron number 1 from transcript Glyma08g19280.1 (locus Gly ma08g19280) derived from phytozome v7.0 (chr-ID Gm08; pos 14586830 to 14587980)
cattcaacgcttctctctttgaggccattggaagggtgagtcagattttaactctttaagttcattaatttctctctgtcatgtcttaaagtcagtctttgcctttttctttcttgggggtggatcacaacacaagaggttcctcgcaaaattggaaaagctggtttctttccctttttaatgaaccaggaggaaatgagagaaataaggttggttagatacttaagaaagaaaagaaagaaagataaattggaatgatttctagtattaacaaaaattaataaattaatatttgccgataaaaaatataaatgaggaagacctcagaagtcgttaattttagtcactcaagttgatggttttttctcaaaattttagggagtttggtgaggttctgatttctgaatgtgaaattgatatgccattgtacgggtacttttctttaaaattaagtcattgtgggggactttcctactatttctttcgcaaataatggtgtatgatctacattactgattcaacgaattagagggaagagaaaattaaagcactagaaaaaaaaatatcgggtgttcttaaattagtaggtttgaatatggacttatttacaggtggttttagcagtgaggttgaagatattcttttgttgaataaaagaagtaaatgggtgggtggggtagttacaaagttttttttttttcactctctcgacttttaggtaaaaatgcctgattaagcaatacaataataaatgagacaaaagtttagggtgagttctcaggtgtgaacctgcagaatttggatttagatatttatggggttttccccatttcttttccagctttcatattgaaactaaggtgaatgacagagagggtttgatgccgattgcttgccagtgatgtagtttcaaaatggatcagtctctctgttatcaatttttgatagtagatttaaatgggaaataaccaaattgctttaaataatcaaaatgaatagttagtgatattttgctgcagagtcatctatttttgtgatttatcacaattcagacagttactgtctgcactgaacttaaaaaaaatgagtttcaagtggtgtttaggattaatttgtggtcatttcaggtggtttcaacagaagcccgagca

SEQ ID NO: 2778 - DNA, 856 bp, Glycine max
  Intron number 1 from transcript Glyma09g41560.1 (locus Gly ma09g41560) derived from phytozome v7.0 (chr-ID Gm09; pos 46228980 to 46229835 reverse strand)
ccgccggcaaccccctcgtcacccttcgccggaaggtttgttatctgcgttctatttctctctcacacgtgttagttaattttgggtatagttaaattgcatgatccacgctgcatacacgtgtagctagatgaataagtatgaaaaatataaatttgttattttttaaagataaatagttattttttcgctaaacgtagaaagtgtctacaaattcgtcttcaaaatatatacattttagtcccaaaaatggttatttgtcggcctatctatacatttaggcacgcatgctatcatagaagatcaaaattaaattatattttaagtaaataactatttttttatagtaataaccaacagaagttaacaatagataaatttgtcacatctttaaaactaaaatttgaattttagaggaataaggacaaatttgttaactttttgcgggtgaaaataattatttatccgtttttttaaacttaacttttaaagccttccttttagggacaaattgtaggacactaattaagaaactaatattagaatttttttattgagatttttgtattcttttacactatcctataattgttttctactttatttcataattatgatctttattcttttatagtttaacttatttctgaactaataaaaaaagtcacctgctttaattggtaaaattttatgactaacgctactctttctagaaaccctgctaagctttttatgacggactactataactgttcttgtaacttttgaagtgtaaattgcttttatggccccataattcacaatctatagttattgagtctgatattagatgtaaattgtcttattgatgcagata

SEQ ID NO: 2779 - DNA, 3019 bp, Glycine max
  Intron number 2 from transcript Glyma10g32750.1 (locus Gly ma10g32750) derived from phytozome v7.0 (chr-ID Gm10; pos 41167673 to 41170691)
ggacttttgtcatagcctccaccgtttatctctcggttagtctctcaatatattatttcttttacctagttttctgtttttttgcccccacaaagagtttaatatcaattcattcatttagcttaatctctttttagtataatccaataacatgttgctaacacatctttcaaatagtttgactcctcatattaattattgttagcgtgttcatatgtcacagataatttagtccaggcattgaactcttgtcacgaaatgaaaacatgtagaatgactaaataggtctcgagcttgacaattttaattaactttattaatttgtgtatattcatccctctaatctcacatggggagtggttgaaaaatgaagctaggtgggacagatataactcatataagtttgaagttaatttcctctgttaagatccgtgaaggttacatttatacaaataattttatatttaattattagtagttaaggagacaattgattattttattattttttattttaaaatttcataagtgtgagggtgaagcagaataagatgagtgtaggtttataaatattaattctaaaatgattgattttaagtcaaactacactgtccgcttttggtgaatccaatgggcctgggtggcattatcactacatttcaactccccactcccacatgttagaaacttagacaagtgtctcccaagatccttgatgcaagttgttctgaatataaaaatgaccataaagatatatatatatattagatctcgatattttaagcccgcatattttgaccataagtttgattctataaatttaatcctaaatttgactgctatagggtatatactacttgttatgaccttaatttgaatgcattattgctaccaattttttataagtcatttaatcttatattaatatattatttaataaatttaattatattaacaataattatatttacatagactaaaacacatgtttaaatttatttaattcattatatacatgttcttaaagtctaaatacttatttcataatgattgcaagtttttatatatgtatatatataagtattaattgttaatagataatatatagctatctatgaacttttttttagttgtttctctggttatatatatacatggaatctcttgtgtaaattaataagaaaaagtcttatacagattgcataatgaaattattgcacaagattaattaaaatgatctagtatttagatgctaaatattgcatgtcaccagctgattattctacacaaaaatctgtcaagaaccaaccaaccaactgaagctactatatactgtaggctaacactttcaaacttttggatcaaagactttttggcattttttattggaatgttgctagtatgataagtggacagtagctatcgatggaccaataatacactaattcccgcgtttgattagtgattcgggacaaaaaaagaatcttggagctcaaccagtgattcggaatttgacttttgaagatgaacgattaatgagatggtatactatttctatgacaatgatatttaataggatttgtggaatatttatagactgctaatttgatattaaactacttaaattctaataaatataattaatagaggactaaaattctaaactttgtatacaagaaaagttagagtaatatttatcaattataaataatggtttacacatatagagaaagaaagagaactcactaaaggatagtatgtttttacataattatattaatacttttttttacagaattaatcatcttttatataagtccactgtttgaataaatttaatttaatttattttcagctttatttttttatatcatgaatttatcattatgtttgatatattaagtagctgttattgcagtcaaattatttattaaataagtatatgtaattaaacaataataaaaaattcatgataaactaaaattgagcttttgttacacactgatttcttcattattaattttctaaagtgaatctctaatagaacttggataggacatgttataatattggcaaagtattagaatttgacctcatgacagtgttgtctaagaaaaagacatgaaaggtagtaggaaagtgtccccgtcattttctactgtttctagtttggttcaaagcatgtggcattctttttcatacttgtgacgctagtggacggcgcttttcatggttgtgtgtgcatctttctaaaagtatgaaatgttttttaaggtccacaaatacaatataggttatcatgttcttgtacctgcatgaagtccaaaactatatatcaagctcaagtcaggggattgggacagggtgcggttgtggggcttcagagtgagccacaaataaagacaattaacaacttgtatagaagaatcgaatagcaataacaaaatttgtctaaatagtactagtaagtattgtgcaaaagatggatggataataacatataaactgaaaatcggacacgtgttttaaataaaaccttgtgtatatttataattaatataaaatcattttcattctagtcttagtatttttcacttaataaatccaatgatattattcagataaactttttaatattgataggtttttttggaatccatgaaatgggagctcctgtgctttacgcctttacttgcttgtaaatcgtaatactgttcctcaatctaacttctacccaacttgcatatttggattgagtgttgcttcataattcttgttcttttaacctctacccaacatttatatatatatgcataaagaaaaaaggcgttgtagaataatctcaatgatctcataatataattatctagattgagacattaaagacagagttagacccataatgtaacaaattttttactacataggataactttttggacaagaaaatgatggttatgcatactgttcaaactgccaaattaattcgttggggatgtttgatctttgatggcagggt

SEQ ID NO: 2780 - DNA, 1263 bp, Glycine max
  Intron number 2 from transcript Glyma07g03060.1 (locus Gly ma07g03060) derived from phytozome v7.0 (chr-ID Gm07; pos 2124885 to 2126147 reverse strand)
tagcactctcagccacgattcccggcttgaacaaggtaaattaattcattcatttagtcaaattctattttatattgtcaaaatgcacatgccaatgcctcacatcactttaattactttttttctttctttctttctgtacaccactctaattattattattaagaaaagatagtattgtaagtattataataatttatggtaaagatgaaatctgacttcatattattatattaaatattgaataattgtcctagctattcattatttgattcttttgtaaatcgtaatcttcaccgtcgatcctagctgttgaagcatactttatataatattttagaccaattcttagtttttgcagataattaaatgcttatcatgttgaagcttgaattcaacttaattataatctaaatcgacagcgtacttcaactgttcattaattattagcctccgtgtctcagcatgagtcagtcatggaatcctatagtggatttctatcgtttaagtttttcttttcaattcttatcgattactaacccctactgaatacaattattttttttattaaaatataaattaattaaagtgcataattttggcaatgatgaaaacaaaagtggtcttgatatgtcaccagatcattcttttggggtcattgactatgcgtcaccgaccatttgcaatattctataatatactcattaatttctcattatattatttcgcattggacttgataaaaaaaaaaatctgaatcctgtagcaaaatttttaacaaccatttttcttacgtccaatttgtgagtactattcttttcatcccgtttacgttacggtaaggaaaattaattgtagacatccaactcatttttttttgtcggattaggtaaagtaataaagagagagacaagaagaagaaaaaaaagagggaaagtgatagatatagtaactactaactagtgtgataataagaataaattagaaaccaaatgaaaagtgggtatatttatagttaattacttaccttaaaaagaagaataggaaaaggctgcgaatttttgtgtgtctgtcttgttatctatgtcctacaaaataacattctaagtcaccacggaatgaaaaacacgtggtaatgctaaaaccacaagattacaaaataaaacatggaggcactagagaagaaagaatgataagtgatttgtaattgtaaaatttccatgtatagacggacaaggcttctgtacttcgagcagcaattga

SEQ ID NO: 2781 - DNA, 2168 bp, Glycine max
  Intron number 3 from transcript Glyma08g43260.1 (locus Gly ma08g43260) derived from phytozome v7.0 (chr-ID Gm08; pos 43095785 to 43097952)
gggactgcttgtccagttcggaagcaagtatacactctcgatctcgatctatcaactctttatgaaaatttatttactttgtttttggaaagattaggctaaaatgcaaacaacccactccaatcgtaggttactagcagaaaactacatgtgatttaagattactcaatttgattccgtgaacttaccaatctgcacataagatattggttctcgctaatcgatgtccttaaaatattatttaagaaacaaaaataaaaaaatatttattatggaaatcacaaaagaacttacaaaaaaatcataaataacatgattttttacattctaataaaaaatttattttaaccaatattcaaagaatttgcctaataaatttaattcttctagcatttgaaatactaataaaaaaaaaacttgaatactcgacaagtttaaggtgttgagttatatagtgttaaatcacatgagacttgaatttaattagtgtaaatcacatgagttatatagtaataaatttattgttgttagaatgtgttgattgtttgccaagcatactaaaatgtctaagtaataagaatttagaagtttaagtgtcgattttcatatgaattttgttttgtacttgtattggataatttccgatttataaaaataaaagatgagatgagctaaaagaaacagtaactagaataatagatattactaagagacaaaatatataatagaaaattcaatgagatgagaatactaggacttaacatgtcttatttgtttaagatgtattattttgatttttctctatcaattaggtaaactttttttatccacatctattagaatacttgtccctgatgtctcacgatgacaagtctatcttacgtatctatctcccacgtgtctttgaaaagactcaatagataaaatacataaagttctaattctagatgtttgttttgatgcatggacataatgcaattactctatgtctaacaataattttattaagatacatcttccttttagttctattaaaattatcctctatcaaccgattaatccctaaaattgatgcatataagacattccttgtatttctactaaggattatcctctgtcgagcacctaacccataaagatgatgcaaggatgagtgatacgtgaaattaaaataagaaaggataataggaaagaaaacacatgtttgcattgatagatatgaagcatataatacatctttcggctttttaggcctgttagaccctaatgaagggtttagcctctcatagtcataagagaccttacacttgaagggggtatatagaattgatggaggagaagggatgaagaagggaatagaaaacaatggaagaaaagaaggaattccctaaggaagaatttttaggttttaagtgtgtattagagtgctctgagactcggtatgtcttttttccttggcttgaccctctttttatagttgctggagtggacttggactacgtacttgcgctaagcctgcgctactcgcttaacgcgggtgcttgtattcacgctaagtttgtgttgctcgcttagcacgagtgtctgtatttacacttagcacacctcttcttgcttagcgccaatgcatgtctttgcgctgagcgcgcgctacacatcttggattgggactcatgccaaaatcttcctttttcatatttttgttattttctacatcttttttacttttaatccttctttttcatatttgcaaaccataaataagaaaaacatcaattcttaataattaagcataaataactactaaataattatttttaaggttattttcattataaataaacaattcatatttaatcgttatcagaacaagagtactcatttagtctctaacaataggctatttacgaaagaaaatatttgccatgtgtaggataagttttgaactagttgtgacattattattgagacatattagtatattacaaataaaatttgagatccatattaaaaaagaaaaaaaattgtgaagccacttgactattaaagaattttttacaaagaatatatgatttgcatctctaccaagaagttgcaccaatatttaactagtggactgatgtttctttaaaggtacaaaggagtgctgaggatcaaagtgtattgat

SEQ ID NO: 2782 - DNA, 1794 bp, Glycine max
  Intron number 13 from transcript Glyma03g01210.1 (locus Gl yma03g01210) derived from phytozome v7.0 (chr-ID Gm03; pos 965435 to 967228)
aagccttgcataggtacatacatatcttctatttactttctctgtgtctggatctccgagaagtttagcagaattggtaactcaattaaaacttggcttaaatgtaattttagcccctgtgtaattttgattcctctattttaaaataaaaacatttagtcctccagtattttaaattccacaatttaattcacctattttaaaataaatatatttagacctctacttttgtaaaatccgtaattttgatcatttcatcaaattcaaaaaacattgatgataagaaattaacttgatgtgattcaaatttagtgatctgacacaagataatttgttaaatctatgttataatcaatgttaatttcttaataattaatatttttagtttgaagaaatgatcaaaattataaattttacaatagtggggactaaatgtctctattttaaaatagggaactaaggcccatttggggtggttttagttttcaagttttgaaaaatttacaaactaaaactgatttatgtttttaattcatacttttcagttttctttgtttccagttttaaaaaattgttaccaattttatcatttttcttttaatttgttagatatggcacttctataacctccctcttgtccgtgtcacaactcacaagacaacactagtactgaatttgcctttaccaccacgcgcaaccttagcgccagaacattcatcatgctctgtctgtcgtccacaacaacctcaagccaccccacaatctgtagagactgcgacgttcgtaacctgcttcccttcatcttcattcttcaccctcgtcatttctgcttgccacgcctccctttaaaacttcacaaatttcatattaaagacagacacgtaaataaatcaaacctagaaatgttttgtttcttttcccttttccgagaaagggacaaagaaagggaaaaggaaaaagttccttttaatgttattgtttattcagcttggtgtgaaaaaaaataataaaaataaaacattttgaggtgggaatcagatatccaattggaattttgatgaaaagtgcaaaaggaggtgtggggaatttgtgtttagatttgaagctggtgaatgtgattaaaattgcaggaaaggggaagaaggatggttcgggaaaaggagcatcgggtttagattaacgcactgctgcaaaagagccaaatctcattgagcagttcggcgccgtcaatattgaaggtagagaggagggtgggggtcaacaacgatgatgttgttctgctcaacgtcggaaatgtcagtggctttttcgaatgagggaggggcgaagcattcacgaatgaggggagctattacaatagttataaaaaacttacaactttggataggaaacccctttttttggttttcaaaattagcctatataagtgttttaaaatttggttaaaaaccattttaacaccaattttgccaaacaacttttatttccaaaatttcatttcaaaactaaaaactacaaactggcaatacaaaattaaatgtttttattttgaagaatagaggaactaaaattccatttaaaccttacttacaactttaactgatgtgcgaaaccaatgcttgcatccattagagccctgtgaatgtgagactgcctgaatctggttgtcttggagtagcaatgcgatactctctttagtattcttaaacaatactttgatttcttgcatttcgtaactttttcatacaatgtattgcaggtgcgtggtggcatacgcttccgatctaatatttc

SEQ ID NO: 2783 - DNA, 5692 bp, Glycine max
  Intron number 4 from transcript Glyma11g07510.2 (locus Gly ma11g07510) derived from phytozome v7.0 (chr-ID Gm11; pos 5260017 to 5265708)
ctggttaagacagctagtaacaatgaggctgacccttctgtaaaatgccaatatatggaggcattaggccaatttcttagtagcattaggccactctatgcagagtcatagatttataatagtagtatcgagtaatattcatcccaatattacaaaaatatcatatgtcatattctataacaattttcaagatatcaatatgtaaaatgccaatataaaaaaaagaacttttttttgtactagcttcattaggaggaaatctagtgcaatataacgttttggatgacaaaaagcaaacctatctagaaagaagaaaaacagtcaattttatatatcattaaacaaagtcagtcaatgcagatacaaatgagcatagcaggtttttcaaacaagggcttcttattcaataagctttatactctaacgtatttatgtaaatctgaataaatgtgtaattatattataaattgctgatgaaaatcagataaataaatttgaataaatgcgcaattatgtattatatatgaacatgtgatatttatagttacttttttattaataattaaaaaattattttttaagtaatttaaggggattaaatttcttcattacgatatgtatataatcggtctgtacgttccgcttggtattgttttaaactaataatcaaatgttcggtgtcttgtgtcaagaaaaatgtatgaaattcgttaaattaatttattttagattttggaataacgttttatatatttgcttttacttcggatgaacaatccattgcacccaaaggaagaatgtatttaaccagtaaatcaattgacataaggttatttgtagtatttgattgtaaagaatgaaaactaaaaaaaagtgagtaaaaagagaatagaaaaaaaattccgatgagaggaaaagagatagtaaaagaaaaaaataatttggtaagtagaaaaaaaaagaaaaaataatattaaatacaatttatattatttttttaacgtatgcttttattttttttcctcatcttagcggtgaaagactgtgccatgagaccttttcttaaaaaatctctttttcataccttccaaatgcaaacaattttcatgtttcatctcttttcactttcattcttttagtttcatacgttctaaatgttatttttaattagagatatcaaattctaatcgtatgcaaatttattaaatatttcaaaatggagaaaatattaaattaaagagatgaataaacaatttttatgacctttatctaattatgtctgaaaaggttctaccgagattattctctggatcactgtactcgcccggcacgatagccgatattattattattatttgttgtaatataaaatggcgatcaaacaagcttccattgttgaatcatgaatgtctaagttggactttttcatttttttaataaattggttggaaacttgctagtagaaaattatattgcttttattttgttcaaaatgacttataacaaagttattaaaattataaattataaatcaataatttaaaatataatctaatccatatatgttatttgtgccaaataataagaatctgataacatttgagtagatttatggcatcagttcattctatactaagaagaaaaattaaatgacagaataaaacaatagcgaacccaaatatttatcttgtccaaagttcaaacatgcactgcatctacagaggatatgtttgccggaaaaaacaaggatattttttggtttgaattttgatagaatagattttaaaaggttaatattattctctctaaaaaaaatattaaaaaaattgttttaaaaaaatgatgttaagaaaaaataacttatgttttgaaataatattttcaaagtggaatatttaaaaatgacttttattaaatgataaaatgattcacttttgaaacatttttttaaagaaaaaattagcagtcttaccctaattttcattaaaattatattatttatataaaaattaattaatcaaggaattggacacaaataattaatatgttcaagttaagatgaaatcattatatataatgtaaaaattgataaaaataattattgattaaattttacttacttttcgattaaattttgaattagtcagtatttttttcgaaaggttaagaaaacaaaaaaaatcaattaaactcattgcatttttttcattctcaaaaatttccaaatagcatcgtttactagtattattaaacgaggttgttaggttatttcacctaccaaagagcaaaggagtcaaaacgagactacatgatcgccaacaaaaacaaaaatcataacataagtttgagttagtttgtttgactgatctagtatgaagtatcattgtatcagtaattgttgactactggaaaacaaaacttatgtcgtgaacaaaactgtacaataaagcaagcattgaattttaatttgaaaataggtatactatacaaataaaatgattgatttaaatgtagaaaatcgatctattgaataaatatgttaactctctcaacaaaatgttaatttagttactttagcatttaattatattattaaagttaattttatattatatttaattcaatttaataaatatacaatttaatattattatgtaataagtactggaaagatacaactttatacctctttccaagggcactggaggtagtaggtgacttggtggagcgatgagtactacctttttaaaacaaaacaaaaaattattaataaattaattttctcttcttaaaaaaacattctagtttatttatctaatttctttattttctcatatcttattttttattcaataacaaaattatttttttattaataaaataatgttctatattaatttgcacatattaaatatgtgaaaatttaatttttctttaacttttttttttgttttatcgaaattatggtttcgcccataagaaaaacaagttataaatattttcaataagttagctaatctattttaattattaaacaatgaaattactctataatatattaagcatttgcttactttgcgtggaacttttattttaaacaatttagaaaatatttaacttttttgaaaaaataacatgacattacctctaggaaatcgatcgttagataaggaatttttaattctttatttttatagtgactaaactcactttaaaggataaatcctcgaggggtatacataataaatcataaatgtgttagaatatcattttttaaaaggaccaatatcttcttattaacaagtgaaattacttacttcatcatctgtaatttaaatctccttaagtagtctctaatttaaactttttatataaaaagtaaatattggccaggttttatctctttaaatactaaaaaatgatccctttgaataaattctataactcaagtcggtttaacaagtgttaaaactataaccagttagccgcgaagatacgagaatgacgcaaattgcaagaaaaaaatatatcaaaaacaaaaattaaaaaaaatccaaaattttgcacaatatatcacatttatatatgaaaaaaataatttataatatgataatataaaataattttacacattattcactcataaattattatgtgaaaactttattaaattttataataattatcttaaaagtaattaattatttgtataaaaaaatttatactaaccatacatattataattattaaaagctttgtatacatacacacaaacatgatctacaaatgtgttaggtgatatttttttttaaaaccacaaatattttttattagaaataatcttatttgattcatatagttggtagttggtaataatcagtatagtaaagatagtaataataaaatgtgaaatgattcgttgtcctttctttttcatcatcgattattacactatttcttaatatttataataacttggttaataaatggtttgagctttcctcaatttttaattttcttctactcaagaaacaaacacgtccgtccctttctttactaagaccatgcatggtctttttcaccggtacccaaaacaataattttatgaagccatcgaattttttattgtgcatgtgaccactaaattcccaaaacaatttaaaattcaaaaacctgttatattaaaatatactccagcaaaatgttatataaaaataaaatgatgaatattaaaattatttcgtttcaatatcaataatgaaacatacaattattatatatttgtataatttttttaattcatacaaagactagtcaaattattggttggtttggactacacagaattcatggagccgccgccggccgcagatcaggaaatagatacttgtttgtttggtgcgttaaacttggaaacaaaagaagtgaaattttgcatatagatcaaagttgatggccctataaatacaaattgaagtattgctatgcatcatcactaagccattgctagtttgattacctatcaaaaccagaaaaacacactgcaattgtttggactagttttaatttcttccaattccatggctgggaaagatagaatcctgattttgggacccactggagccattggaaggcacatagtctgggcaagtgtgaaggcagggaacccaacatttgtgttggtgaggaacacccctggctctaacaacagggtcaatctggtcaaagctgctaatcctgaaaccaaggaagagctcattgagagcttcaaaaattcaggagtaaatctaattcaggttggtgctagcaatttcttatttagaactagtttcaaacttaatcctagtaggagtaattgatttgatgtatctgtttaatgggatcttcagggagatatgaatgatcatgagagtctggttaatgcaatcaagcaagttgatgtcgtaatctgtgcatttggtagactactaattgaagaccagttgaagatcattgcagcaataaaagaagctggaaacgtcaaggttagtcctttttactgaataatcttaaatttgtgttttcaaattaccatgcactttaaattaagtaacgtagtactagaagattaattttatttgctcatgtaacaaaaatattttcttttaagatgacttttaatttaattattataaaaatcaataattgcactatcagtacgtaggttagtttttttccaaaacttatccaattgtttaatgctgtctaaaattgttaataaatttttctacactaataattagaaaatgttgattcttaattccttgtgtcaacagagattttttccatctgaatttggattggatgtggatcgtcacgattcagttgacccagttagagaagttttcgaggaaaaagcaagaattcgaagaataattgaagccgaaggaattccatacacttacctatgttgtcatgcctttactggttacttcttacgtaacctggcacagattgacatcactgttcctccgagggacaaggtattcattctaggagatggaaatgtgaaaggtaataaactatagctgaattagttataaacgattttaattgtttcagcacaagtgataaatctcagagacacaactcagttgcttcaaagtgtacatgttttttttacttgtttcaggagcgtttgtgactgaggctg

SEQ ID NO: 2784 - DNA, 916 bp, Glycine max
  Intron number 5 from transcript Glyma14g09160.1 (locus Gly ma14g09160) derived from phytozome v7.0 (chr-ID Gm14; pos 7161396 to 7162311)
ctatccaatttgcacaacagtgagtactgagtactgggtactaatagtcacttaatgatttcctataaattcattttattttttggtgactctgatgaacaatttttactaaatgtgtattgtttcaccaaactcataaaagacttgtatttttccaaggaagaaaaataaatttacatttatttaattaagattaatcaattcttttagcaacttgaatagctttaagataacatagcaaaggagaaacattaaacatgtcctttggtttgtttttatcatctcatttatgcacacagcctccttttgttccaagttactaaggattttgtgtgacgtatctgataggcatacctgagtgcctttatggctgcaacttcacacccatcctttgattttaccttgttctgattggactgtccaactggtgaatctcatattgaattcctaaaacatttgcaccaccctgtgttgacctcatgcgatattaatgtctaaatggcactattacaggtgctgttgaagccaccataggtcatcagtgaacaatattagctgattagcatatgttcgtatctttttccctttattttatctttatgcatagtattccaattcatatagtctagtaactactaactagtaattgccaatattcatatacttttgactgctagttacaactagacatagagataacgatgttgtcattttatctatatctagtcaagtgattccggctggatccctagtgtcattccactatcaaacaatgttcgggttaaaatttctgctacataagtataatgttgtaattttggtcaaatacttattcttcctatgagaaacttattattcttaaaatgacttttgatctctacttagcaacaaattatttggtattacaggtgcaggc

SEQ ID NO: 2785 - DNA, 7780 bp, Glycine max
  Intron number 4 from transcript Glyma20g02690.1 (locus Gly ma20g02690) derived from phytozome v7.0 (chr-ID Gm20; pos 2238961 to 2246740)
cgaacaaaaggtttgtgttgattcaaatttcaactaccctcccaaaagaaaaaaagaattatcgttatttataatatatgaattaaaacatggtgtagtaatgacttgaatggaggtgctcaagtgtggtccaggtatttttgttcaagaactatgttaaaaactttgttggaaaacagcattaattattaacatcctagcctgccttaaattgagacctcatgcaccttcattgtgatgtgagggggtgggtgtagtcccagttgaccagagataaggcttaagtagtgcttataaagcttggattcattgttggggccacctacattgggactctaggccgatagccctaggcgggagggggggggggggcggggttgttggaatgctgcattaattatggacacccttgacccaccataatttgcggcctcatgcaccttcgttgttattggtgtgaaggggtgggtatggttccacattgactcgacggcttaagtagtgccttataaagcttgggcaattctctccttacaagctagttttgtgtggttgagttaggccctaagcccaaattctaagaaaaagttaaacaacacaacattcttatcagcaaaaaaaaaaaaagaacaagagtttctttgtcgcacatttctgatatactatttggatattataacttgctttaagtataatttttcaatttaagtttgttttaatactgagttagaggttattttcttaatttatggtatatttatgcatatgcatattacatataagtataatttttgcattttaggtgaaaaataggatcttacaatcttagttatgatcttcgagttacgagttttcaagccctgccagatcctaggtagaatgtcgagttgaacatcgtaaaagacatttgtcttaaaggggtaatgatgtaaaacgatttgaagtaagatggcatacaatgatacaaatgtgtggcaaaacttaaatcacgtgaaactttgtaagaactgcaatgctgaggcagaatacagctggattcttcagtcttcatccattctcagatggccaaaattttaagtaagaaagacatggaatatcttgggatagtaacatgagaaatgctaggaatacactgttttattaattgaaatttattgaaaatgacaaaaagttgtgggtcccacatcatatttaatgtttctctctcctgattttgtagttttcaataaattttaaccattctaaggttgtgtttggaggagtgtgttagagtatggcactcctctgataacatttgttcaaattgtaaaagaactttctagattttttttttaaatcaacaaaagtaatattgtattatgtatgaatcagtacaagttgtactgtgaaaatttcacctgggtgccaaattgagcagaaatatggtgccctaatacaagttattcatcattaattaaaaagcatatttctgactgtaaacctggctcactgttacagacacttataaaaatatccttccctaatcccaaaaagcctccctcatattactgccaggtctgacctctgctgccattatcccttcctaacacgtgatggaggaagtgctatctcgggttttgtggtaatgcacctgaaatatttgtccatgattatgattcccaccaaagcggtaaaattttgttgcagctaaaaaaaatgtgtgctgcatcctcttcttgatttgtgcagaatgggcaggttggatcatttatttccacatttctcctatgcaggtttactctagttggcagtctatccttgattagcctccacatgaagaaagaaactttactagggacctttaccttccatagcgcattaaaagcaccatcctgattttcatcagtttggtctttcatcagcatcttatatgcactccacactgtatatgcagcagatgcatcttccctccatatccatttatcttgttgatctggatgaatgttgataccatctaatttttccaagaactttgcagctatgtctatctcaccatcaaacagttgtcgtccccattgaaaatcccattcccacccttcagctgtgaaacttccatctgctgtataacattttgttgttgataggacatagaaaacagtgtagggtacttcagcttaagtgacactctatcctccttccatccatcctccaagaatttaaccttttctccacataccactgaccatcctttttatcgctttatctaaccagctgtcgtctacaccggaatgagctatgcgattgacatccttccaccatgctgattcactgctgcccctactttccccctcacagtccaccatttgccatattttgacattagtatcttagcccagaattctccttggttatgaaataagttccatctccactttccagaagtgcataattaaactttcttatgtccttgagtcccatatcccctttctcttttggtaggcacactagtgcttcatgtcaccaccccacaaaaaccgcctttgaatccacaccagcttgtctaggaccttttgggtacttgaaaaaagagaagaaatatatagggatagaatttaaaacagatgttatgagagtgacccttccctgaatgaaagtagcttttgttttcatttcgcgaactttttctcacatttcttgacaataggatcccagacgtcactacaacttgggtttaccccaattgggatacccaggtacaaaaaaggtatggctaataggctgcagtttaagtacctagcagcctccttccacctcactgaagtcccaattgctccaaaattactctttgaaaaattaattttgaggcctgagacaagttcaaagcttctcaagattgtcttgatcgctttgacattttccatggatgttgtcccaaagaaaattgtatcattcgtgtactgtaagttactaacttctacctcatttcttcccactggatagccttgaaacacatttttctccgttgcttctctcattaatccattgagtccctcgacgacaacattgaataaaaggggagctagtgggtccccttgtcttaggtctttttgtggaataaactccgccgaggggctaccattcaccaatacagagacaaaagcggattttaggcagccctcaatccatgatatctgtcttttgcagaatcccatcctccttaacatgtacaacaagaaatcccatgatactgaatcgtatgccttttcataatctactttaaacaccaagcaaggcttttttacttctctttgcttcatggattacttcgtttgcaatgagaatgctgtgtaacatatgtttgccctcgatgaatgctatttgtctctcatctatcaacattgacaacaccttcttcatccttctcgctagtacctttgcaactattttatatatgctacctattaaagaaataggcctatattcatttaggttttgcggatcgctgaccttaggaatgaggcattacaccctttcgggaatttttcgtggacaaaaaattcatccatgaatcggagcacatccgactttataaattcccaaaactccttaacaaattcaaaattcactccatccggtccaggggtctcgtcgctcccgcattcccacacaacaacctttatttctgtttcattgattggctccgacattttggatttctgctgttgtccaatagctttaaatctgaccccatctagtttgggcctcacccaatcttcctcctgaaatctgttctcgatatacaaacatatttcctccttcacccttttgggttcatcaatccaaagtccattgacaaacacacctctcaaagtgttgaatcttcgatttgaatttaccaacatgtggaaaaacttggagtcacaatccccttctttgatccattttgcccttgccttctgccttaatagtgactaatgagatagagctgatgcccacaactcctcctacagcttttttcgagtcagcacttcattttcagatagctgtctttcgtctccttcagtttcaagcttgtttaaatccttctcgatgcttacaatcttttgatgtgagtctccaaattgttcctcattccatactttcacccttgccttaactccttttatttttttaagcacaaatacatgattatctgtccaagattgttgaaccacccttcggaatgatttgtcatggaaccaacaattcaaaatccggaaaggtcgcggtccttaatcaatattttcagatttcagtaggattgggcaaagatcagagaagtttctttccaatatgaactgtgtagttccttgccatttgcaaaccattctaccaagacgaggattctatccagtctgctctttgctgtcccatttgacttgtaccatgtaaattttctccccacacaaggtacaatccacctgaagatcactgatccattcgttgaattcctccacatttctttcattttcgcctctttgactcagtcctactctctcagctgggcttctgatactattaaaatctctaagtatgcaccacatcattcctgggcttaattctctcaattgtcttatatgcgcccacaaatttctcttctaagccttgtcgcatggcgagtatatgttgactataaacatcttctgcccatcaggaacccatatgccttctaagtgaataaatctttgtccagttatctactttccaatttgaatgatttttcatcccataagtagagtaagccccctgctctattacatgatggttgcatctcccaccttacctttgcacacagtgcctgacgagtgagtttatctatttgttccttcttagtctcctgtagacactacatattaactctctcctttttgttaccattttaattgctgcccactttacccccctccccaaccctcttacattgtaagtgatgatgttcataatccagccccattgtttcccaacttggcagccaccttcctatccctttcctccatatagtaactagcttgttgaccactggtacatctccccttccacatgtaacttgcagattctgcgctatggtccattgtgttgttgcttcttttatttgatcataaatttcttggctgtaattttgtattgatgactgtgtttcttgttgcttattttccatttcatccctatctgccactttcatctgactgtgatgcttgactaaagagaggctgtcacccttgttgtgagtgttgttggcttccatgtatgcacatgtgattgatttttttgagagcccaagtttggacccatctgttaggcctcggtcctcttgttgtttgcaccttctggttcttgagtgcaccttcttcaactgtgatattccattttgttcgcagtttatgttttcttctgccccttcaattttccatcaaggttgttttttggaaggcccattaagggcccatttccctctgatttttgtgcaccttcccgtgactctggagcacctgattcaaatttttctggcagcagtgggcccccctcatgcccattgtcttttctgcactttatcccttgcagcttaacgttctctttcctttctcctccacttgtcttttctctaccaaccctttactgctattatcctcgggttcttcttggtggaaaagggtatgctttgcttcacctaatatcctttcagtctctttttgatgaataacattgttattttctgcaactagtatccgttctgcctctttttgttcatttttggcctccttgtcgtaagtttggtcagcttccttctgtctaatggtacgtcagcttccttctgtctaatggtacactgtgatgtgacaattttctgtgctcgcggcggtatcctccaattggtcttgtggatcatgcagatcctgttgttctttggtctgttgcccattcgacacctctgggcactggttgctgccgcatgatatcagaaatatcttcttcgacagcttctccattttcgatagactctcgtctgaggttattttctccgatatttgcacctattttgattatagcaagtttcctcaaccatgtacactgagtattctaccccattgatccatgcggatatgttatgttgaatttgcagttgtcgtggtgtctcgactaggacctgcgccctatccaacctctgtaatccttccacttcatcatcacctccaccacttctcctaccacagatacgatctgtttaatgtgttccaaatcccacgcatgtaaaggtattccccagcgcaacaaccagtccaggcgataccccgttctgatttgagggtttcatttttcctgcgagtaaaatactgacaaagcttgttcatttgctaccgtaatcatttgtttggctctgtcctctgtgagtcccagaggaagtatcatgccatctcctatatattttggcgtgatgtctttgcccccatatcacatgaaatcgtcttccactctattgaacatcgcaagattcttcggtcttcccacccatgtgttgcttagccatgtcttctcttccacaggtatgttcaatggtactgatgaacaagagattgttcctcctgttgagctcaggtttggggtatttcttcctcgtcccgtttttctgctttcggtcatcagcattgtcgcatacgaggttatctctttcattttgttgaaacttttgtctcactgcaccttcaacgctacttttgcctttgtcgtcctcgttcaccttaccagaagttctctccgccctttgcatgtcgttccagttggcatctccctgttttgtcctcatccttcatgctttgctatatttacgtgcattttcaatccccctactaccaggttatctagttttctttcaagccagctgacatctttgacccctctgtatcttacaaagcagtatctctccccccttctgttgtggtttcttgcgataaagacttctcgcacgtccccccattttttaaattcatgccactgctctgtttcattcatctcgtgaggaaatctggtgaaatagaaggaatgaacatcagctgcatccctccagttcgttcatctcttttcagtcttttgaccatacccatttttgacgtggttacaacgggatcctactctcacccactctctatttctctctcacacccccccccccccccccgcgggttttctctcatctctaattgaaagttttagcatcttaagttgtcattgttgtttgcaattgaaaacgcactgcaactgacatggttggttttttgtgtgcattttactgaatcaagtatgataagcatctcagtggtggaaactggaaagaatgttgctatcctatttcacttttttctccccctttttctttccatgcaaggaaatagtcaaactgggattataaatggctagaaggctttttcagaaacaaataatatatgcatgtttgtcatacaaaatagggaaagaaataaagttaattgcccatggtgaaacattaatgaataccatggccaaacttagaaaagtctggaaactaaatttaacaaactattttgacattggtgttattacatgaaacagaacctccaggaaatagccttattgaatatcagtctaattcctgtatcgtcaatgtatgcttttttgggattctcctattccagttatttgttattttgatttgcaagcatgtttttttgttaactattctgataatttgtttataagagtgtcttgttgatcagttttatgaatgcag

SEQ ID NO: 2786 - DNA, 5092 bp, Glycine max
  Intron number 4 from transcript Glyma09g40210.1 (locus Gly ma09g40210) derived from phytozome v7.0 (chr-ID Gm09; pos 45163277 to 45168368 reverse strand)
caaatttctcaggctgcaataagtaaattctctttctttgtttacattgtgtcactgcattcttagtgaatagtttgcaattacatacagaatcttaacaattttactttataaaccagacgaaaatgaagtaaactatatacaccatcaaacacttattttcaatagcattatgcaacaacatacaaaaatcactccatcgtaaacccacttgtagtgaaatcaagctcgttaaatcaaattcatgcatagcgaaatttcaaaaatataatccaagcccacattattcttttagttttaatttttaaaaatctgcattttcacatttagaaaaggaacttgtttttatgtcataattgacatgagaatgaagttttccaaaataaaaaaaacgaggacgatttttgaaaaaaaaatatctaaatcaactaagtctattctagttgacttgtaataaatcttgactttcaactagaactaaaccaatcacaaccaaatacaagaatggtcttgtcaagcaaatatttaatttctttccaaaagtaaccataaaaaacacaggaattttttagaaaagcaataaggaacttcatttcagagctaagatatactgatttaagatttatcatcaaaatgcttgcagaaattttagctagatgctgtttttttaatttataactaaaatggattttgaagacaagtttaactgaatttcacaaatatactgaccttttaaagagacaagtatgccgctggtttaaaaaatccaaacttttaaactcaagttgcagaacctttcaaaagaaagactcttccaaaaattggcatatgccactgtaagtgagaagcacacagtattctttagtaaaaggcgaaagaatagttggctctgtgcttatcacacgactccatgactagtatcagaaaaattctttcattttatagcataagtagttcagtttcactaaatacactactcgatgtggacttttgtaagaaacaaagaagcaaaccctctttcagttttttcatctatggggcctctattgtcccagtcctccctcatgccctgttgaatgtttaatcttttcagtatcagtctttctaaatctcaagatcccaaaataaaggacaaagcagaaatttggcctcgaagctctgcttctgcagaaagagaccaacacatagtgcatagtgcctgcctgcctggtgaatgtccaagaaatcgatgcttcatgtgacaccctctacccctcacatacatactaataaggaataaaaaaaaattcaaatattaattaaaaatatttttaaaacattttttttaaacaagtctttcaaaggggaaaaaggctcacattgattttcttctacatcatatttaaacttgtccaaataaataataaagtattctcgactcaacaaggtcgtctaagcttcatacaattaatatagaacctatatcctaatgtcacatcctatcagagcgttgtgttcccgtgtcctctagcatgaggttcttcatagtcatccacctattcatctgctcccccgaacacaagttcaagatcatcacaggatccaaacacaacaacacacagggagtgagttatcacattcctagctaatagagaaacaagacaattaaatatacatattatataaatgagatacaacttgcttaaacatagctcacgtaacttcaccacttcgtcattcaaaattcacttttcaattatcaatcacattacacaagaatcccacacttcgatcaagatataataacacatcaattagcaagcatatgcaatagttatgctaagacttaatcctatatgcaatgtggtaccatgtcagtgaaaaaccaccctggggcgcttaggagtacataacaagacacaccacaccatgggtttgtcaggtcactctcactaagtaagatcatagggagaccagtcagggtcatgatgttttgcgagaatgctccaaccatatgagatcagcataggcttaaaggagcactcaaacccggtgacccccaaggcctacactccgaagagtccgtcagggcctctccctcctgattcaggtccaacccctaaaataatttttgcatgcagacactgctcatgaattatacaacacccacgaccttacactcgtgttttaaacacgttcaacacaattgcgctacgatttaacactggttcctaaataggaaacctacattttctctttaacactgcgcatcaacgcttttctcaagataacactggtcgggttattgtacaattcatagcttacaacacaagtaatttcacatcaagtgttaactacacacttatccacaactagaactcattcacaatttcacatctcatagtgtgacaatccaccatcacatgtttacacgtatctcacaaattaacacatgttcaactttacacttatactcaatctcaataacaatattataatctcaaagcaacatgttattttacaattcatcacatactcacaatttgaatcatcatttcatatcctcaatataacaatttatatataagaccatcacaacatgaggactaaaacccctcaaataatattacacaattatatcaaaatcataggtcgaaacatacaaatatcaagagcataatttatcaagcaatcttcattaggacatcaatattttatttataatcataaaggaaaaaattgtaatttaacaaatatcccaaaataaaaccccaatttaatcctctaaggatccctacacatgttctcactaatccccaattgtgaataactcatcccttacctctgagcggactcacgtgtcttcagccagcgatagcaacatctctagcggttccctgaaattctttcaattattcctctgactactccgatagaattcccaaacgtcagagagacggagaagagattgaaacttccacttgtactgtcttcatgcgattcatttttcttcctctacgaatattgtctcgcaaatcccaacggtggaagcgtgcggaattgaatttcgaacaacatatccaaatttcatgaaaatccaacggctaacgaaaccgggatcgtagttttaccgagacagttttgggtttttgcgggaaattaaaatgctacaatgcgaaggacttttctctaagctcaaatatgattttgaaattaccaacggtaagactgttcggaattgggttgtaaacatgatactcaaatttcacgacgatccaacggtgaacgagttcgagatcgtcgttttactgagacaggtttggtgggctgcgggaaaaagaaagggttttgagaggagaagaggaaaaacgaaaatgaggccaaaaggaggcagttgacttaacataactatttataataactatttatacctagggtactcagcctattatttgctctgtatttatttatttatttatttttactaaaaagctttttaaatttatttacgaaaaattgggatgttacacttcagactttgctcactgttgtttccacacattacctagataattaggattctccttgcagcatacattaccacagctaaattttcctttacccacaaaatccttcacaaagatccaattattagtgaaacagctgaagtgcagatcatccgattcaattaacatgttagagaacaaaaaaaaaaaatcaattgtaagagaatgtttggaaaaaactatttgtattttggatataaatctctgtaaaattattttaacacactattgttgaaattaatcctgtcatacgcaaggttttgttataagccactgtaatatcaatttcaaaacaaaggcaaatgatactagttgtactgaaaaatctatataacaaatttattaagcacttgaaagttcaataacaaggttaaatataccaaaatcaaaagaaaattgacaaaactagattctagacaaaacttttgaaactcatgttgcagtgacaacaaacacacgatattctttagtaaaaggtgaaagaatagttcactttatgcttatcacacggcttcgtaatctgcctaataaaaagtccatcgttttatagcataagtagttcactttcacttagtacactacttgatgtgggcctagtaataaacatagatcggaccacattcacttaagtagttcactttcacttactctgttctctatcagctgtggtgcctctgatgttacagtcctccttcattcactgttaagaacgcctaatctttctctctctttcggaacttattatcacattgtttctagatcttaatatcacaaaacagaaagaagaaggaatttggcaatgaagctctgctaaatttggtcttgaagttctgcttctgcagaaaaagactaacacacagtgccaggttaatcacccaaaaaattaatgcttcagactttgctaacactaatagttgcttccacacattacctagattattaggattcttcttgaaccattaaaacacatcagaagtacattctggaagaaatttacctgtacccccataaatggatgtatgttatctttcacaaatattttattcatagcaaatcaactaagagctagtcacgctagttaaaattaatcttgtcatttgcaaggatttgttctatgccattgtaatattgataaaataaagctatacaactgccttgagtccttgactaatgcaaaggataacaattatcctgaaaagcaaaaataaaaataaaaatcctatatatattaatatagataaaaataaacgaacactttcaaatacctcttttttgttaggtattatgtaccagttacgcataaatccttgctattaaacccttgaaagtacaataaggaggtttctcttagttcttattcacaatccactgttaagtcggggagtgtaatgtagatactagatactattgatctgcatgttttcaacattaacttgacaaatttatgaatggcttagcttaagatctaacttgtgaattccatctgcatgtcaactctttgtggcaaacttgaagaaagattataggagccaagtacttcaaggctg

SEQ ID NO: 2787 - DNA, 2478 bp, Glycine max
  Intron number 1 from transcript Glyma14g03340.2 (locus Gly ma14g03340) derived from phytozome v7.0 (chr-ID Gm14; pos 2151463 to 2153940)
aggtcattcaggtgaggctcattgtttctgtttaagttgtttgtttacatcagaaggaaattatgttgttgcttgccttggattcatatatgctcttcttcatccatcgcacgacaatagaaattattgtttgtcctctcaacgccatagtttgatatgtagatgatagattgtattgtgattatattgtgggtgcttctctcgtagaattggtttactttaccgacataattgtgtagcgaataccctgtggctttagcttattatgcaaaatggccagccaaaccttggtgtttgaattttagtttggaaattattagcacaaacaggtttatttttagtttttcacacccgatttggttagtatattgagagctattattttgtgtgcctctcttcccaaatggaagaaactgacgattatattagaagtttgaattgagtcagtgattgctacgtgtgttcatttggttcagaagagactgacatggcaagatctatgaatctattgcactggtttaatagatctataaatgttagagaccacaagaaggcaagactgtaatatttcaattttttagtatcaatcaagtatttgctgtgcaatacaatccatttgccagccttccaaatctttcctttttgtggtcttcttttcctccggtatgctgtaaacagatgccaaggggtgacttgtgctatactatattacctatacataagtgaagagggagtaaggaaatcaagggtaattgcttgttgtttctcttttgtgtaaaattcttttaataggcttccagctttatgcaacattataccgtcaaaggcctttctctcttcaaaagagttgtataggatgcagagtagagaaattgtaaaagttcatgcctgtccattctcttctgatgcattaaacaccgctagatggattttggatgagatgagatcaatatgcaatcttttgaaaatcaactcctctgtatgtattcagtgtaataaagtgatcaatatgttagatgtatgaagatgttgcattgatttatttagtaaggtcttttatcctagattttggaaaaatttgtgatcttataccatgtgcaaataaacagattcaatggacttcctatttcctaggggtttgggtcttcatgatctattatactttacagtattgaattcttaccaaggaacactcatcagatcatacttattctagctactgttgttctcactttcttattttctatttgattttttttttctcattttcggatgttgactgctgctgctgcataggaaggtgatcccatgctaactgatcgagtgtgggaggccattacaaaggcttttgcaagccaaatgaagtctgctttcactggatcaagttttgttaaagagatttttacaatgggatatccaaagctttactccatgatagagaatctacttgaaagaatttcacatgacacagatatcaaaggagtgttaccagctatcaatttgtctggaaaagagcagataatttcagctgtcgaaatattccagaatgcatttttggctcattgcttgagtcgcctttcagatctagtgaattctgtatttccaatgtccagtcgtggtagtgttccctccaaggaacaaatatcaagaattatatcacgcattcaggaagagatagaaactgttcagatggatgcacgcttaactcttcttgttttgcgtgaaattggcaaggttttaattcttcttgcagaacgagctgaataccaggtaaacagaaatgacgttattgtatctaaggcgttgtatgctgcttattagatgttttaagcgctacatttattggcttagaaatgaaatcaatgctatctagatcatgggttttcaggaataactacttatatttttggaataaagaatattttattacaaggaaagaatggattcacagaaaaaggaaagtcttgttgactgtactgtaaatcatggcattgttaactgcatgcataaagaatatcatgtgttctttcattgaggagtttatacttcatatgcgtattgtattattggacttgtactgtatcacattgtagtgatcagcaaccattcaatcatttaacttgcttactcattttatttttcagtgtgttaagtaattaatatttttgctcgacttatataatatttttctgatattactacctgaagtgttgtcacttgtcatgatatggtgagatataatgaccggagatagataattatttcctaaagtgctgttgctgtatgttttctctggaacctaaaggctttgtttccccttcttctttgtgtatgagttttgcaatatatagaatcccaaagtccattttattcaagtgaagggaggacaactactatagaagcatagtttctaatcttttaattattcaatgtcattgttatgacagatatccactggtcctgaatcacgtcaagtaa

SEQ ID NO: 2788 - DNA, 1143 bp, Glycine max
  Intron number 10 from transcript Glyma15g16150.2 (locus Gl yma15g16150) derived from phytozome v7.0 (chr-ID Gm15; pos 12459322 to 12460464 reverse strand)
gattcctgtatgcatcttaatttttctctttactttattttatctgtattttgtgatttcagaagcttttcttatccatctatcaggtttgatatattacagcttcctcctgattttcaataatagggatgaacttatttgttatagtcttatagaccttggtgattgatatattagtattttcaccattttctattttttattgtcaaagttcacactattgtactagatattccataatctcttaacaaaataaaaaaaaaattatgatctgcttttttagtgaatactagtcacaggataagttaaataaggctttcgatgtgaagcactcaaccttatgcaaaactaatgcttttaggacttgtttagaaagattattacatatacaccttagttcaaactttgtgagttgtacaatgaaatattaaattgccaatgtagaagtttcaaaatttggggaattatatgttgagatttggcttatctaataatacatactaattactaaatcaatgttcttatttgtactaataattaggtcaaatacttgtgttgtattactagtcaagcccaagctcacaagtaagactactaaccctaattaaattaaataaggaaataaatcaagaaatataaggaataggaaataactcctaagattgcctcctcaattagatgttcttgattttgccatatattgtaataaagatcatgtaaaatattctaaatattcaaagatacaacaaaaatgagatattttgtggacatcttaccccctccccccctcataatgaaacttgataaaatctaagcttgttaaaaaaggataattaaaagagaaaataacataaatacaaagggtccatgaaacatgaattgaaaaagaactcatggatgctggagatgctggagggatgggcattgctagaaaatataactcaacaggacagctaagaaaatattcagcctgatgagctggatggactattgcattattaaacatttgtcatctatgattattttttaaaattcttttattagctttcagtgttactatgttttttgaaagaaaaaaagtcctctgaatgtatctgcttttatgcagattgatagtgctgtgagagcaagaaatcttctctt

SEQ ID NO: 2789 - DNA, 4177 bp, Glycine max
  Intron number 8 from transcript Glyma17g00480.1 (locus Gly ma17g00480) derived from phytozome v7.0 (chr-ID Gm17; pos 175200 to 179376)
aggacaaatttcttcaacatcttactggaggcgaggttagtagtttttgtcatatatttacattttatagaagctagggtgcatggtatttggtattttttggggggaaaactggatatcgtcagaagaaattggagctatttctcatgtgccatattagggattttaggatgagtaaagatgacaaggtctttttgatggcatgcattttatgcagttagttggtgcctttaattatggataaatgctagaagtttcaaggacaattgcttattgttaccactcctttagtttaatttgaccaccttattgatttctgggtactcatttttttttattggatattaaactagtgtgattcgttcaattgatgtttgtttttccctctatgtaggaagatatcttgtccttgcttttgtacttttctctctttccttttctttaaccaatttattttcttaattcttataaaaaaattcactgaaatagtgttgaatttatagggatttaggttgagaaggaggaagagagaacatagagattttgaataatattctgtcatctataacgatgtgatggtgtgattcgaggagaaaacactaatttctatatatactgctggaaatatcaaaggaacaaagattggcaatcccttgacatgtctattatgaaacccattaaaagtccttgtgtgttgcaccaaatagataccaaacaccttatcccctgtcaaatgatgcaccaaaagggatctgcttaaaaatacgagcattctatttcaaccaaatacaccaaactatatgattgattgccaatacttaaaaaatatagctttttttttatcggcaaatataatattgtatttatataaaatgaagtactagaggtactgatatacacatataaagtttaccttactgctagttccacagtcagacaaacctagtctaaaggagaaccaaagtaaggatataattgaaatttacatgtgttgctctgcaaactgttctagcctctactgatacaaaaaccttgactaatactacttgaccattggttaaagtggattgtgaaatctttttcaaaaccccttagccaagtccaaatgaggaatgtagcatcttcaaacaatttattagcattgaaggttgcattagagaacactatattgttttggaattagaggaaaagcaccttttatatgcagccatgacatggtttcccaccaaataggttggattttgctgcaatggaagaataaatgtgatgcaccctcctctgcatttctgcaaaaaggacaaagcgtatctgtgagctgcacttgtctcctctgcagattttgtctggtaggtagtctgtctctaagtagcctccacgcaaagactgctattctgctcggaatctttaatctccacaattgcacaaagcactcctcttgacttcccgcagctgcctcctcctctaacatttgatatgcgttacgtgttgaatattggcctgttgggtctgcactccactccccctcatcggatccttgttgctgtatgaccttaccttcaacctctcttagaaaattgacagccaagtcaatttcactgtcaaacagtggccttcaacctctcttaaaaaatatagctttaattctaccaaaatcatgagagctaattattaaaaaatgttccaaggatctaggttcagtaggttgcacccaacattcagtgaacatgatgaataaatagacaaataagttgtgcatcaaaacaatgtaaatgagttgaaacttatcaaactggctctgaaaacggttcaaatgtttgaactctttaaattgattctcggatggaccatctgtttcttatgattttttttttcttgtttatttcaaatttagaaggaaggcacatgttacatagcgtgttgattgcaaacgaggtagttgatgaggccaaaaggtgccaaaaaccgtgcttggtattcaaagtggattatgagaaggcgtatgattctgtgtcttggggattcctgatttatatgttgaaaagaatgggtttctgctccaaatggattcagtgggtggaggggtgtctaaaatcagcatctgtttcaatcctcgtgaatggtagcccttcagcacaattcacgcctcagagagggctcagacaaggagacccattatcacctttcctctttaatatagtggcagaggcactcaatggcattatgtcacaagcgctccagaagggtttgttcaggggcttcttagttggtaaaaacaaggtggaagttagtctgctccagtattcggatgacacaatcttctttggggaggcatcaatggagaatgtgagagcaattaaagcaatgttgagggctttcgagttagtgttgggcctcaaaattaactttcctaagagtggctttggagcttttggggtgtcggattcatggaaaaatgaggcagctgactacctcaattgtagcatgttgacggtccctttcacataccttggtgttcctattagaacaaatccgagatcatatcagacatgggtccctatcatatctaagtgtgagagaaagttagcaaaatgaaagcaaagacacttgtcttttggggggagagtgactcttataaagtcagtgctaacgtccattcctatttactttttctcttttttcagggtacccaataaggtcgtggataagttagtcagaattcaaagaaggtttctatggggaggggatcaggagcaacacaaaatagcttgggtcaaatgggaatctatatgcttgccaaaggaagatgggggactaggagtcaaagatattaacttattcaattcatcactgctgggcaagtggaagtggaacttgtttcatagtcaaggggagttgtgggctagggtactagaatcgaagtatgttggatggaggggtttaagcgaaataactagagggaagggagaatcggtatggtggagggatctaaagctagtgcttaatcaatcgcatcatggagcgataatgaagaatacaacagcatggagggttggttgtggggataagttcaaattttgggaggatgcatggatggggggagaggagccgttacttgcaagattccctatgttgtatagcatttctactcagcaacaccaaagtatacagcatatgggggccatcaaagatgcaggttgggaatgagactttaggtggagaagaccactgtttgatagcgaagtagatttggcggtgtcattcttaacagatgttacaagccacccaattcagcctcacaaaactgatcaatgggtgtggaaggcagacccaggtgggcagtacacagctaaatctgcctactatgtgtttcggggggaaatagttgaacagcaacaagatggagcgtttgaggagctgtggaagatcaagcttccgtctaaaattgtcatatttgcatggagactaataagagatagactaccaactaaagtaaacttgcggaggcgacagattcagcttggagattcacgatgtccattctgcggagttgaggaggagagtgcaggtcacctattcttcttgtgcagaaagatcattccaatatggtgggaatctttatcttgggtgaacttgtcgggtgctttcccaaaccatccaaggcaccactttcttcaacacatttatggagtgacagagggaatgaggtctagtagatgaaaatggtggtggatggcactgacatggaccatttggaagcacaggaatactattatcttctcaaatggttcattcaatgctaacggaatcctagatgacacaattttcttactatggacgtggctcacaaatttggagaaggattttaatacacactataattactggtcttccaacatcagagcagggttcctaaatagaataggatagaatattagtgcagatttctgtataacctatatgttctttcagattggttcaaactgcgttgggaccaaatctggactgttacttgtattgtcagtacctctggtactcaattaatatataatattatgtttgctgataaaaaaaaagaagttagatactttgattttgggtatgggatttcaccaatgtactgtacaaaaatccttttttttctgcatctaaattctttcctttatttctttgcagggta

SEQ ID NO: 2790 - DNA, 1595 bp, Glycine max
  Intron number 1 from transcript Glyma10g07710.1 (locus Gly ma10g07710) derived from phytozome v7.0 (chr-ID Gm10; pos 6442539 to 6444133)
tcttccttcaagagcaaattccaaggttaatagtattcactatgttgtgtgttttcttttctatatgatttttcttcattagatgctatattgttgtcctgttactccttataagatatgcgttcatggtttttgaatcgtatttaatttcagttcctaggaaacgtttttatttctgctcgtattttgttgttcggttgtggtggattacttgtttatgcggcttctacgtaaaaaaaaaaacaattaatttaagaattttactttgatgatcccgcatagaaggagaaaaatgttatagatatgatccagatctttgttttaacaattttttaatggaaagtttgaaattctgttcataataatgttttgattggagaattgattgtaagttttgttcatatgaaaaacatgtcgattaaatatatttcttttatggaggttaaattattcatttggattttatactttcaatcttttaattcctatagtttgaaggtagttttttttagtcctatagtttacattttatcttttagtccatatagtttaaaagttatctttttaatctttatagtttacattttaattctcttttggtccctatagtttgaaaatgatctttttagtctctataatttatattttaattactttttaatcttacttacaaaaataattaactacaaattaattataaattattaactatttcttgcgataaattaattaaaattatttattaatttttttgtagttaattgtaattgataatattattcatattttaatgataaggactaaaaagaaattaaaatataaaatatagagaataaaaagaccactttcaaactataaagacaaaaaaaaaaattaaaatataaattataaggattaaaaaaattacttttaaatgacaggaattaaaagaaaattaaaatgtaaactataaaattaaaaaaattactttaaaattataaagataaaaaaatacaaatgatgaaactagagaaaatgaataattaattaaacattttatggatatatctcctttaatactagcttcttctcttttttcgtttgatgatattaaatggacgttataccctttggttggttttatctatgtaagcatgaacgaacaagatcaccacctttctatgtactaatctgttcttggttggactaaccggcaacatgtaattaacatgactcagaagtcagatctgtgttgctaggtagccacgtggcacaaacctcttcaaaagatgcatcaatatgcaagttaaaagaatatattttcaaatcaataattttgcatgtaaaatctgaaaatttagttagttcagcaaaaaaggacttttaataagatatagattgtatccattcttattatgtgtaatattttttcccctaacaattacgtgttaccagcaaaattaatttttaaatcaaagatatagaaaaggatgtatccatcgaagaagtcatatagaaaaattgattagatttatattcattcagtgaagccaatgaaatcaaataataaattttcttgttgtcgtggataatgaatgtattttgtaaaattgcag

SEQ ID NO: 2791 - DNA, 4674 bp, Glycine max
  Intron number 1 from transcript Glyma18g49770.2 (locus Gly ma18g49770) derived from phytozome v7.0 (chr-ID Gm18; pos 59112176 to 59116849 reverse strand)
cactcccaagctccgttcactccaacaacactccggtgagctttctcccttctccattctcaatccccaatccgcttttcgtgcaaagattgttattctttttttattacttttggaaatgaaagcaagtgctttcgatcggaaggatgtcaatttcccagatttgagattctggatagctttgcgtgtggataaggaatggctacgatcgtgaagattatttttttgttgaattgttctaagaagtttctcattattattttaattttatgttgctttttcccccttatttaaatgaattcatatgttgtttgctttctttatgttatactattattattattacgtccatcgattttcaacttatggtttctgtgattattattatttttacgtgtaccaccactgatgtcagagtagtagatgccttttatattcctaagaatcagtggaacattagctggtgatggttaatggacgatgacaacatttgaaaaatctgttgttgttcataagcttgtagtagcttattcatagttggaaagattgaaagaaacagtatagtcaaaggtgcacctgaggtgaggcagcagagtgggtcactgaggcacacagggtgccttttatcctgttgtgtgcttgatgcttcttttggtaattgtagaacaccctaggaggcgttggtataacttgctaactgtgattctaaaacagggtaaaaaagtaagaatggtaaaaaaaatgttggtatattccctaaaattaaggatatttaataaccattattacaggtattgtatgattcacaaaacgattccaattccatcaatatgattcaattcaaggccttggtattggaaaaaattcaattcccacatcagttagggatagtgtcaagataagagtatataagtgggggacaaccctcaccctatgagctaggttttggggttaagttggacccaaactcatattttaagatgatatcagagcatatcctagatccattaaagggtcacataccatgttatctatgcaccaaaccctaaaatactgggtgcgagggggtgtattgggaaaaattcaagtctcacatcagctagagataatgttaagatagagtatataagtgagggataatcctcatcttataggctagttttggggttgcgttaagtccaaacttacattctaagacttggtgaaatgaattgtgtgtcaaattgtttttttgtttgaattgtagatgatttgctctaatcccacatgaatctcatcctgcttacgaattgtgcgatcctggcacagccaggtcgcactgctaaaaatgtttttttaggtaaaacaagagtaagaggccaatttttaccctccaatctgacctagggtgggcccctatctcttttcatgttttcgctccttttctttgtagtggcagctactgtttttttgaccaggtggctgttatgattttgatttttgtttgttttgaagcttatatgtcactttgttagctatttgacctcaaaatgctaatgtatatgtgtatatatatatgttgatttttgattttatgtgtttgttagttttatatgctatgttttattattgatcatgaatcttatgatttacaatacagttcaatttgtgatttggaaaatatgccttccggttcatgatttgaatcccaactgttctaccatcttaataactatattaatccttgttgtgcaacaccttagatgccagctatttttaatggtggcagtgaccagttgtctgcctttgaactcctaccagtgaaagtattttaccggttttggaaattaaacacttagtatttcctttttcgtttgcactacaaatgtgttgcttgaatagttaatttgagtgcaatttaatgcaaattgcaaagtagtaaaagcttttattgttctcttctttttctaatgttaatgcttgtctttaaggttgaaattggagcttgagaccctcactagctgggtgttggacatgaagctcctatttaaaattggcactctgctcctttaatatcctggttttcaagagtggacttacctctacgttaactggtattgtagccaagtctttccattctcctgatgtgaatggtttgcaatatgcaaaagagtaggtcttgcattggttgggcgcaagacacagaactcccatttgaagtagatgctctactttgtacaataaggcgtgtgctttttgccacctcttgtctgaaggagttacaccccctagcaccttaaggctgcttttcacctttggctaccccgggaaaaagtatattctttcttgagctgtgcatcaaacactgaaataattttccatgaaatctatggagtctcttgaattatcttggagccttatatacagataatgtgtatataacttatctggctgcctataccctttttgtactggtacctttaccttccttaaggtaacttatctcacaaatctaggacatacacataagctttcaattcctagtgcatgaggctccaacattggtgtggtctggcaggcttgatgtaggcaatgaattgaatccttagccctgtgcgtgtaaagggaacttcctctgccactagaaacagtgacattgaatcacatgtcagtaacttttgtgccatgtgccaccctcttatgattgtagaataccaatggaaaaagaaaatgaaagattctatgatgctattattattattattattttttttttagttttttctatttatttgtgaggacgagccttggtgcagtggtaaagttgtgccttggtaattggttggtcatgggatcgaatctgtaaataatctctttgcaaatacaagggtaaggttgtgtacaatgaccctccccctatacctttgaatagtgaggagccttttggcattgtggctagtttttttcctgttattaatgattttgtcagtgtgcataattataatgttgaggagctgccttcattttctatctaagaaaatttattttataataaatagttattaatgcggtgctacaatgctgccattgccttcttaaatgttgcggttgcttttgtggaagaaatagcatggattgtggcaggatagagcggtgctactgaggttcctaaaaagccctctttaatcagaaattatgtctttttgggaggggggtattttggggattttcaggaaaaatacagtaataagggcgagaccttctgccgctcccaaatcttgtctcttgactttcttatttcatctcttctctcctttatccggtgacgagacctgctgcctccctgtctctggctctggcagcattcgctgtctctggcgagacctgctgcctctgtgtttttattgttaattatgaatttcatgaattttgactaacttttatcatttttgacgatttatatttatagtatacacataaaaaatttcagaatagtggccaacctgttatcatgctatagcattttttaggtcagctgcaaggtgccgctatctgggattgattatactgagaccaaatgcacctactcatatctggtctctgttgtgttctgtctgttttctttttcattttcagcatatctgtgttttgcgttttctctgttctttgtttctttttgtgtttgtattccaagtggcagggtagccttacgtgctgtttacttttcaaagagttctctctgtctttttttccccccaaattgtattcagagaggactctgttcgtctgtttttgattctgtttcccatatgttcctagactttttaacttatgtgtttaacttaaaattatgaattttgactattgattatatacatgttctcaatttctggtgcttttttgggcatttatatatgtgaaatataagggattcaccttacctagtaggataaggcttttgttgttttgttttgtttatatatgtgaagtataaatgatttaacttgtatttataatcttcaaaatagcagtcatcctgctttccactaccctttgatagcagttttgggtataggtgctacatgctgctataggggatcgataactatgttatcatagagaactgttgattttattacttataatacaatcaatcagaatcttattttctttgattgcaacaattattgagacagttgttctcaattacaagatgttctggatcctcttttgcctagtagtgttgctttcatgtgatatatatcagtcttggtgtacccgtttgttggtatttaatattaataacactttaaagttttagttgctgagacttttatatggtagagttgtagatttttttccattctcttggtgtaggctacacaacgagagctatccctctttattcgctgaacccctctctcatttttaaaggtcggtttgaattggattgtagatccttgcccttaaagaaaagtatatttgggggtgacaatcgaatttgtctagttctgtaaaacccttgtgacagctcatggattattttgcatgcttctcttttcattctagtattcttttggtgtttatatctgatgtagatttcaacatattttgcatttgtttatgcgtctagatatattttcatatgactgattttgtgttgtttcttccacaattttccctctagatttagaa

SEQ ID NO: 2792 - DNA, 2468 bp, Glycine max
  Intron number 2 from transcript Glyma08g45920.2 (locus Gly ma08g45920) derived from phytozome v7.0 (chr-ID Gm08; pos 45174087 to 45176554)
tgaggtaattaagtacctctaactgtaagcactctttgaacagccttaaggtctgttttgacctttatgagctctcgagatccaactcagctaaacttttggttgtaaaataatactattcagatgtatttagaaagttggtacttggttgaattggtaaggaacggactcatgtttcacaaaaatatggttttgatttcccttgccaatgtcagaaggttgttggtgagtaatacttctgtaagcacccattgaactttaggcctgtcttgtcttaacgagttcctgaggcctgactcacctaaactttcttttttatataaaaaaaatggcaagatcggtcgtggtagtgtctaattatggaaattacttttgacctccctgaatgtgcgttgtgtggtatcagtgtagttaagaattgtggcatggactaatttgactggaagaaattgaccatttaagggcaattttgcgattaattttaggatttgaggagtgcaattgtaatttccgttgattggggactaatatgattgatgttattatgtgattaaattatcgttctatgcatgccctttgtagttttttgtagtctttggttatgggtgttatagtattggatcagaggattttggatgtgggcttgagggatactttttgtttttactcttaagtgggtatggtattttaggtttcgcgaccccttctgttctgactctaatggttttgtttatgttggcttgttaggtttggtttctaagtttttttttttaaaaaaaattcaatgggctattgttggaggaaaaggaaatatggcatttgaaatgattaggaaggagaaaaattatggagtgtaaatattagagttgggtttgcgttttttatttctttcctttctctgcaatttcaagaagcagtttagagtttagacattgttacttgcatggttgacatgtgttccatttttgcaacccaatttggatttacatggaacggttgcatattatgaatgaggatgttgaagctgatttatttgcgtagtagtaagatgttatctttgccatctatgtggatgatgcaggatttatttttttggaattagatataggatatattaatttgaaattggaaagatatccacctgattttggttcctctatgtcgtagattggaataatgaaattttccccattagtggcctaaaataaggaaatcattgaatattaataatgccgttgaatttgtttattagagaatcagggatactgtgatcgttgggtatttgtttattcccgtaattgctgtcaagaccttaatattatatcagggtactatatctgataaaagttccatgaccccactttgtgttagtacaaagttgcatggctcccttgaattatcaacacttgcttctcaattctcatcattgttgcggtaaatgagggatttgtatggctttcccaaagcgagcaacaaaaacaagtattttttttttcatgattaaatgctgctaggcaatttgactgttgcctgattcctgactttattgtaaagatggggaatttgattctctgcagttgaaatttcaactgtacaaatcttcaccatccaaaatagtattttatatacatcaaattagaaaactaaaatgaagtttataaattttaaacagcaaaagatgggactgcatgaccctacacttatatcacaatatattttttatgcatcaaattataaaaccaaaatgaagtttataaattttaaacagcaaaagatgggactgaatgaccctacacttatattacagctgtagaggatcgtattccgtaaagatggaatgctatttttgcatattctttactctggactgtataaactgcttaataatgttatatttctgacacatttctgggatattttgcacattgtcagaactcagagcctatcttatgatattatatagatacatcacagcctcaaatttagcatattatgtttaactttggcatatatagaatcaaataggagttcacccaccaaatatataagtgtcatcgctcatcaccttaattctcaaaaatattcgtgtcatcacgttgcccctttgtcttattaagagtaaagagtgtagtgaaactcttatttagagactaatttgatgatatttttcataattgatgacacttcattattaacacactaaactgaagtaaaaaatcctgagtgccaaaatgatggtgcttgcatttttgaggacagaagcgggttttttactgcctggactagttaggtctgctggtccttttggggtcaatcaaaaacatatggaaaagatatacttttaaaacctgcattgttatttttgctatgtcatgattatcatcccgctacatgcctttaagaacttcaattcttattattttggaatggagagtttgattcttgcttaaattaacctgcagctcaaa

SEQ ID NO: 2793 - DNA, 6367 bp, Glycine max
  Intron number 8 from transcript Glyma10g12560.1 (locus Gly ma10g12560) derived from phytozome v7.0 (chr-ID Gm10; pos 13728434 to 13734800 reverse strand)
ctaagactcttcagagggaaatcttcagtggtgagccaatcaaattgagatttagaaagaacagaaaaacctgcatctatagtcttctttttttctgaccacattatttacagaatgaaatttgactctgttgaatattttagtatttatctatgtttgatagcttagttggtaagctttattcaaaaggcagcaatgaattgtcactttcatagtccttctctctctcttatgtattgtatatatatatgtatcattttgaaatcaataaaggttaagagagaaagtgagaatattactcgaactcacctcagttcaagttggcatcagagcaggtgtcgtctgccgcccgccgccgtcgtccaccgccgccgccgtcatttccggtggacatttctctgacgagattagggttaggctcgccttgaaaagcgtgactcagccctgggaagcgcgccgccacgcgccgtccttgtcccgtgcgatcttcggcgcgtgaagtccacgcgccaccgtctcggcaccggaatcgcatcgccaccgttcccttagtcggccccttctgagtccgttccagccctcagttttcagttgtcacctggaacgtatcagccctattctcctctcctttttactcccttagggtttcatcttgtgggtcaaaatggcttcctctggacctgttttctccttctttgggactccaaccatctcgactgctaaactaaactggaaaaattacccctcgtggtctgcttccgtggaactttggtttctcagtcaaggacaccatgaccacttggagaaagcttccgattccattccaaatgacaaaagacctgaatgggagaagcttggctatcaactctgcgatgtgttatggcaatcagttgagccagatattttggatattcttagatcatttaaaacatgtcgttctttttggaagaaggcccatgaaatttttgccaatgatatccaaagcttgtttgatgcaaccatgaaggttacaaccctcaagcaaaccagccatgacatgattgctcatgtgggtaaggctcgggctgccgtggaagagctgagaaagttccttgtggctgattcattggaagaagtgaacagaaaactggacaagttctacatggtcctcatcttgagaagcttacactcagactttgatcatatgcgtgatcaagtactcgctggggatcaggttccatcaatggatttcctcatcactaggtttctccgcgtgcctcatgtatcgaaggatgaaaatcctgctgagggtgtggagacgtcagccatggttgcatctcatggtagagaaggcggccgcaacagtagaggaggccgtagtggaaggggtgaatgtcttcattgcacttactgcaagaggatgggtcacacccaagagaattgctattcgttgcatgggtttcctgacaaggtcgcacaggtttctagatcagagaaagcagagtctaagttctctgatgaagagtattaagagtatttgaagctcaaatctgagagacccagcaaccaaactcaatcctcatctataccatgtttttcaacagcatgtatctctcaatccattgaaggtcctagtccttggatactcgactcaggtgcctctgatcatatttccggtaataagtcctccttttcatccttttcctttccaaaaattcctcatctcgttactgtagctaatggctccaaggttgtgtctcaaggaagtggtcaagtttcattgtctccctctttgaaattaaattttgtattatttctttctcagtgtccctataatctaatctcattaagtcagttaactcgttcgttaaattattcagtaaccttcactgctaattcttttgttatttaggaacatgggacggggcgactgattggagaaggacatgaatcacgaagactttactacttggaatccagtccacctgggtcttgttttacaatctcaaaacccaaacttttgcatgatcgtctgggttacccaagtttaccaaaattgaagatgatggttcctagtcttaatcttcgagtcttagattgtgagtcttgtcaactaggaaaacatgtcaggtcattagttcctcaaactgtacaaagatgtaatttggctttctctaccattcattctgatatttggggaccaagtcgtgttacgtcttttggttttcgatattttgtaaccttcattgaataattctccagatgtacttgggtttatttaatgaaaaatagatctgaacttttgtctatattcgtgtcattctacaatgagattgagaatcaatttggaaaaacaattaaaattttcagaagtgataatgttaaagagtatttctctcacgatttttcttcttttttgtcttccaaaggtattttatatcagtccacatgttctcacacaccacaacaaaatggtatagcagaaaggaagaattgtcatcttcttgaaactgcacgttccctaatgctaaattcgaatgttcctacacatcattggggagatgcggtgcttactgcttttttcctaatcaataggatgtcctcttcttctcttgaaaaccaaatccctcactcaattgtctttcctcatgatccactatttcatatttctcctaaagtgtttggttgtacctgttttgtccatgatttgtctcctggtttagacaaactctctgctaggtcagtcaaatgtatcttcttgggttattctcgtcttcaaaaaggttacaagtgttactctccaaccacgagacgatactacatgtttgcagatgtaaccttctttgaagacacacccttcttctcaccttccgtagaccattcttcatctctccaggaagttcttcctattacttctccttgtcctctaaataactcagaccaaaatggcagtgttgtcccattttcctcaccaaattcacctgaagttgcctctccacctctgattacagatcaacacaggacaaggcagattgaatctctagtacctgaagcctctcctcgtgatcctcgttcttcaaccagtcctacactcatggatccttcctctccttccacttcttctcctcattttgactcacattggcccattgtcatcaggaaaggtactcgctctactcacaatcctcatcctatttataatttcttaagttaccactatttgtctccttcatatggttcctttgttttctcattgtcttcccttactattccttccactatccgtgaggcacttgatcatcctggctggtgacaggctatgattgatgaaatgcaggctcttgaaaataatggtacttaggagctcattcctcttcctcctggcaagacaactgtgggttgtagatgggtctacagtgttaaagctgggcccaatggtaaggttgatcggcttaaggctcgcttggtagctaaaggctacacacaggtatatggcattgattactgtgatactttctctcctgtagccaaactcaccactgttcgtctgtttcttgctatggctgtcatccgtcactggccccttcatcagcttgatattaaaaatgccttcctccacggtgatcttgaggagaatatttatatgaagcaacctcctgggtttgttgctcagggagagtatggccttgtgtgtaagcttcactgatctctctatgggttgaagcaatctcctcaagcttggtttggtaaatttagtcatgttcaaatgtttggactgaaacgaagtgaagctgatcactctgtattttactgtcatacatctcctggaaaatgtgtttatctaatggtctatgttgatgatatagtgattacagggaatgatatactactaaaagagcacttattcagtcatttccagaccaaagatctaggatctttgaagtattttcttggtattgaagtggctcaatcaggagatggtgttgtgatctctcagaggaagtatgctcttgatattttagaagaaacatgtatgcagaattgtagacctgttgaaagccctatggatccaaatctgctgctcatggcagatcaaagtgaagtttatcctgaccccgagagatataggaggcttgtgggaaaactcatttagaccattggaatgctgtcatgtgtattctgagatatgttaagagagctcctagacaagggttgttgtatgaagacaaggtaatacgcaactatcaggatattgtgatgctgattgggctggttgtcccgtggataggaggtctacatcaggttattgtgtcttcattagaagaaatcttatctcttggaaaagcaagaaacaaactgttgtcgctcggtgtagaagctgaatattgatctatggctacagttacttgtgaactcatgtggattaaacaatttctgcaagaattgaggttttgtgaagagttgcaaatgaagttgtattgtgataatcaggctactcttcatattgcctcaaacccagtctttcatgaaaggactaagcacatagagattgattgtcatttcattcgagagaagcttctgtccaaggagattgtcactgacttcattggttctaatgatcagccagcggatattttgactaagtccttaagaggacccaaaattcagactatatgttccaagcttggtgcatatgatttatatgctccagcttgaggaagagtgttgaatattttagtatttatctatgtttggtagcttagttggtaagctttattcagaaagcaacaatgatcatagtccttctctctctcttatgtattgtacatatgtatgtatcattttgaaatcaataaagattaagagagaaagtgagaatattactcaactcacctcagtcttctagtgactctttctctgtgccaaccaatgatgacaagtttgtgattcaattggctatctcccttgcagaaattatcaattgatcaacactttggtttttttcaactttcttttcatttcagtgttttcactatccttctacaagtaattaatgtgcagagaattttaaccacagaaattaattttaatctgactagaaaaacgaattaggaggcagtaaaagagtgccttgatgtgtcttgtcttgatttatgaatacccttctgctcaatctgtattctttgggaaaatagaagccatgaaagaagcacattaaaattaggagtctattgcaggtagatagaattgattgtgtttttttttcttccctaaattgtatgctatttgcagaacatattattctaaagtatgtctggtgtttgtccatgtgaaatggccaatggagactagtaagaaaagtttatcaaatagaagattgtctgattataggggtggcaaagcaggttgaacccgcttaactagccaaaaatggcgggggtgggttaggtttctcaatccaccaacttgcctaacccgcccagcctaacccaccaacccgctgggttgaaggtgaattagctagctgagttgatccaccttaccaacccatctagtcccaccaatatttaaagcatattcgaataaatttatatttttacataattaaaaaagagataatatgtatatgtacataaaaaaataagcgatgtgctaaaaaaatgaattggttgttttaattttttttccctatttttctggtacttcttttgtgggcttggatgggtcaacccatcctgcccctcgcatcataagtcggggtagcttgacccgctatgccaccccctacttgattaaaaggagtgcaagaagattaaagagaactttagaagaaactattagagactgttttggtagaacccaatggtgtttattgatccatggagccaatctcacttagtatgaaaaggcttggttgttgttttgccaccattgtgggacacctgatcatctgatttaacttggctttgttatcctggagatttggaataggcttctttgtttaaatggaaagccaaggtattgcttgggaatttggaaggactgtagttgtttgttaaagaaaaagagttgtgactatgcaatttggtacttttggttttacctgaagaatagcagagctttttaaggatccatagttttcaatgtagctacctgagtaatttggtgcatatgtttttagtttttactttgaagaatagcaaagcgtttaaggattcagggttttctatgtacctatgatataaatgacttcattctgctgctttgctttagtttggttttgttcatctaagaggattccttatctttctttcataatcttgggtgttttttctttatgaaatgtcttgtttaataaaaaatttactcattttaccaccttaggttc

SEQ ID NO: 2794 - DNA, 4732 bp, Glycine max
  Intron number 1 from transcript Glyma18g13110.1 (locus Gly ma18g13110) derived from phytozome v7.0 (chr-ID Gm18; pos 12553237 to 12557968)
gattgaggaggagaatcctagagttgcgtatctttgtgagtatttttaatttcatcaggttttgattattttttttgtttgcttgatcattgttagaaattatggttcaaaagagagatttgagaaataaaaaaagtatagaactgcaaagaagaatgtgttgaaaatgattaacggaattttacaaggagtacaatggggcttatataataaataagaactaattttctaattgaccttactaatttgtaaattacattttacatctctaatagccccttgtaagctgaaagttgaagtggatcagagagtcactagaatggaggttgactactaagacattttctgcacaaaataaaaacagcttatgatttttatgctctaggtgtttcacactttctcacgtaagaagttgtgaggaacaaggaaatgctttctcacgcttgaatactgaatagatagtacagtcatagtttatttatgtattgggaagctagttttccacaactgtttacaacatactatttctaataattattagaagcaacttttctgatacaaattactagtacgctgcttttgaagtctaaaactgatttatattgatttgaaagtttgacattcaattatataacttaaataaaatgtatttctaaaacgaaaactcaataaatcagaatatgagtagcaaacaataacagagaatattccatgtagggatttttatactgatttaccctcaaccttgagatacatctagtccttgtctcctgtaggattttcactgcaatttcacaaaaatacatgagtattcttttcctattcattgaacaaactcattttctctctcttaaatcactcattgtgtggatccatagtgatgtacagatctatgcaaacactctttcagatattccaaatgatggagacagactctggagtgtttgcaaaaggaatctctgtccaaagtagaattttatagaaacacaaatttctgaaatcatatatgttatcttccttccttacattaagctttacgaatgaaggatgcatttttaagtttttaggcaattatctattcatggctcttaagagacattcaaactcaatcaaattaaatggtcataagaagttgtatgtatattgtcttttcaattcaattgtgcattgaatgatctatttatctcttttgctacttatggtgtcctttttcagttttcgaaatcccaactgctatttgaatttaaattcttgataactattgtgagttggatttccataggcatattctctaataggtttagcaatctgtaagaatgatgcttccgaatattgtttcctacaagatgcttcttttaggtgattctgaatattgaagtgcttgtgcatcagtcttctagttttctttttgctttgtttgcatttatatgtaggttcttgcttctaaacacatattagtttagttctaaacaagctgcttctaatattgcacttttatagcttctgaacaatgctggtatgcttgtctcattccttgttcagtttccatattctaatggatcttttgatcatatgtagcttctgatctttctacctttgacaaattcatcttttgagcatgcttctaatcatatgcaacttctgatcttgctgtactttaatattctgaaagtatgttcagcctagtatgcttttgataaacttttcttgtgattaagttgcttttgaagagtagactttgtttctggaggctatgatctttgtgacagatacgtcttaagcttcatctatgctctttgtgatgttatcatcaagttctgtttttataatcacatttcaaagcaatctatttgtaacttatgttcaaacttcaaaagggttagaatttgcttcttttcagtttgttatcatttaaacttcatgacatgaggggcttaacccagcagaaggtgttcacaacactttggaaaggacaattcaagtgcatatcaaatcaaaggaaattccttatgactgcagaattgtcaagcacaaactcatatttctcctttttacaatttgaccacattaattacttagaattttgtttaagggctttcactccttctaatacatatagaattatgtaaaacaacattaatgtgagagtagtgatagttgctcggagctttctttcaaacttctcggtggtgtgcaagtcagcttaccttattggggtattctgtttttatgttaataaggattctttattctccaaactcagtaatttatatatgaacaactcctattagggcacttaatgtgttaatgcttttatttccagcattcttactaagacagtttgtgcatttcttggatgttgatattttatgtatcctctgtataagacattatccaatcttgtattgtttcttgactattattggcgggaataacatacctgatatggcataggggtgttgatgatcgaatagcagtaatttaaactttagctgagataaaggagtagataagaactgacctacaaaatatattgtccataaagggtgggacacaggagaaaaataccctaatgcatgtttgttcaacttattttaaagaaatagtgacttatttttatcagatttctgagatagctttttaaaaataagtgattatttccccacaacaatctataccaaatatgcagagcaatttttgtaaacaccaaagcctcctgtaattcttttgtttgccatctttcttgacacggagtatttagtgaagacaaaaactaaagttgtctttatatgattcatgttactatcatctatcaccatttctaattctttttaccattgattagagaaatattttctgtaaatgtacagatagattttctgtgactgaaatatgtttgtgctgtctgatatatactcaagttttgcatttgctccctcataaatttttccttcatttttactccctgatatttgaaaatttttgttataggttcctgccgttagcttccatcaatatggtgctgacgtgtgttaagctgacatgtcaccatgccacatatgttgtcacatgtgctcaaaggatgaaattataggcagcaaatgcagaaaccccagaaattatagggagctgatgcaaaaaccttgaaattctagagagcaaatgcaaagcactaactccttcgagcacatatcgcagaatacgtggcatgctgacatatcaacttaatggacacgtcagcgccaaattgacaaaagctaacagtagggtcctataacaaaaaatttcaaatatcaaggagcaaaaccaaaggaaaaatttatcacggagtaaatgcaaaactcgagtatatatcaaggagcatgaacatattttagccattttctgctagaaattgttctcatatgctttacttcaaactgcatctgccttttatatgctataaaagtttatttatgaaaaatggtgactttagttgtcacttgtctcagttgtctgaacttgtttcactactgattctactccagtgggttcctatatattcctcaaaaaaccaacatgtggtttctcatacatagacttcaaattctctgattttgcagaaactaacccttttctatctagtccgcatgagggagatgaacctccaactatactcactaaatattattttttctcagggcagttttattgaacttaaatttggtctgtttaacagaactcagaagaaaaagcatataacaaaataaatattagtaaaaatatacccaaaacagcctgtattgtaaagtatcacattgaagctagattctgtttgcagaattgttactctgacagtgaacacaaatttaaagtcaacatctaaaaaatgaaatgaaacaactaaatataattgaaacattctttcagcttgtcaaagatgtttttaagttatatttgcagaagagtatatggtactgaggttttcttgtttaattaggtcacttccatgcatttgagagtccctctacacttcatacaatacagtggcaaacaccacgcccccttaatttaaacttttctgtccctctagactacattcttctctcaactctatcataaaggttttgcaagagtggtggtggagagtccacatgttttaaaaatgaaacgatgtgtagcctgaatttattgtgcatggctaaccccaaaagaatatggtagtaatcatcatgggatgttataaagtctcttacaggagatctgtaaaagaatcccctcaagttacagggaaaaagaaatgaagaaacaatcaaaatggacaaataatcattcaataaaaaccatgtagtaggcaaaaaaaaccaagctgttggtgcttcatatattcatgtattcctcaaaagtcaaaagaccaacacatggtttctcatagatagacttcaaagtctggcagaaactaacccatttctatctggtctccgtgagggagatgaacctccaactatactcacttgacaatccttttttctaagggcagtttcagtaaaactaagtttgctttgtttaacataatccaaacagtacagagaagaaaaaggatataacaaaatgaatattagtaaaagggaaatgaaacaacaaaatggaacggaagcattccttcagcatgtcaaaggtgtttttaccttgtatatttgcggaagagtatataatattgatgtttctttgtttttctaattaggccgcttcc

SEQ ID NO: 2795 - DNA, 2209 bp, Glycine max
  Intron number 1 from transcript Glyma01g01900.4 (locus Gly ma01g01900) derived from phytozome v7.0 (chr-ID Gm01; pos 1493203 to 1495411 reverse strand)
ggtaattctgttgtttttcgtgtttctggactcaggtaatttctaaagcttatctcgatttttccatgtgcttttcgtttcagaattttaacatctgccagtgtttaggactttcctctttttgtgtccgtttgactttgcgatttggggcttagatttagtagatcgggattgggtttgcttgtttttgctgtttggaacgattttctgtttatttgtattttttttaagctgactttgcttttagaagtgatattgatagagttttatttatctattttttttggagtggggagtgttttatttgttgatttttgatacggtgtctttggttgtggttataattatgcagtgtttttttttttaaagaatttttattcagttaaattctgtcatcaggagctgagctgtttccagggaaaagcatgtacagtatgaactctaaatgcagtgctgggtatgcataaatttatttatattcgtgcctttgatcaatttcatggtatttctgaagtttgtttgatttgtgaatttcttgatgtttatctgtttataattggtaaaagaaaaaagtttatccgtatcaacctgttacctaggttaatgtgtgagattgctcaatttatactgtggatgataaagaaattgcccgttgcatactgctttcttaattttccactcggtggcacttcatttttcctaaacttcatcaataaaactacatatagtggctggaatggggactgagtgggaatacccgaccccgaacagggacaaagataggtataaaattatagcccaatcggggatcggggacgggtataatgttggggagcgggacgggggatatcataatcgtccctgccctgccccgttgtcatgccatctcctgcataacttttgctacgagtgtgcagtataaatgaactaaagcttctgtggcaattgtaagcaagacagctcagttgttaggtgtttatttcaaaggcctttcagtgagaataggtagagttgaagccagggatttggttagttagactgctgatgctatagaaaacatgttcagtcatttttatgagtttatttggactgtgttgttgagaattttaaataataaaactgggatcctcttggaattgttattattgctttttattcctcaattatctatttatggtttgttgtacattcaatatattagggttaatattagttttcttgttgttctaattggattttgtgatttagttaaaagcatgcatggtttattggtttatgaaccacttttctggagaaactgctgagttgcaaacttgcaattacaaagaattcatttttgggtctattcatatttcagttcctatttgacatcattagactattgagatgtaaacttcaactgggattggaattactatgttaaaaatctattaatttgaattgcctatctacattttgggtagaactaactctaataagataaacgactttctgcagatatgtaaatttctagaacagtcaatatttatgtcatctgttccattctgttctgttgagtttagaatgtcttctatgtattaccttaagtagtcacatgactagcatgtgaccttttaataggtctagacctcaatgctatttatgctttggtaaagatttggctgatctttgtatgtatgtaaaccaaatataaatagttttggggttttgtattaatcaatctttttgagctatattataacgttttatacatctttcaaacttgcattttccttggggttttgcaatttttggtctcctaaagatccattgacatcaacattaaaaatactggagaaatatttgatttaaaattggataaatttagcttagaatgaattagcattatcttgtaattgaatttgttgatatttaaaaacttttgagtttaattaatatactgtgttttggatgttgaccactcttgtagtatattttataagttcaatgctccatttttcttaatcttgttggagatggtacttttgcagcatgtcacttttgcaactgtttcagaattcagattacttattttgttatgcagggaatgcttttattgattaatcccttattctttatttgttaactttataattatgtgtccattatcctatgtattcattcaatattctcaaaagttttaatatccagggattgccaaatattctgg

SEQ ID NO: 2796 - DNA, 6217 bp, Glycine max
  Intron number 4 from transcript Glyma05g24150.1 (locus Gly ma05g24150) derived from phytozome v7.0 (chr-ID Gm05; pos 30191464 to 30197680 reverse strand)
ttcctgcagtagaagcatattaccaaggcctaaaagtgagttattcgccttagtgatgcatcatatttttttttatgtgctttgaaatattttctcttgatagtgatagtttatatgtaagaagagtgatttactgtgttgtgtgttattaccacacacgatacctttatttataataagaacggatacataagggacacctaataattaagagtaaataaggaaatccctaattttagctatacaatcaaagcatatcaatcatatcctaaacatatatttcacatttcactccccctcaagctggagcatatatgccatatgaaccaagtttgctgcaaataccgtcaacacgagagcccttgagggattttgtgatcatctctactagttgatcattggagttgacaaactaagtggtgatttctcttgagagtaccttctctcacacaaagtggcaatcaatctctatgtgtttagtctactcatgaaagatcgagtttgaagcaatgtggagagcagccttgttgtcacataatagtttggtatgctgaatgtctccaaattttatgtgttggagaagttgcctaagccatgtgatctctcagatgcagctgctgccatggcactgaatttagcaatggtttttcgcttcaggcttctccatgagatcaagtttcctccaataaggacacaatacctagaggtggacttcttgtgtgacggtgatcctgcccaatcagcatcagagtaacaaacaactttagcattgcctttgtcttcatatatcaatccatgacccgatgcattattgatatatcgaagtatgtgcattgcaacattccaatgactattagtcgggtcgttcagaaactaactaagcacaccgactgcaaaagtgatgttgggtctattgacagtaagataatttagtctatattgggaaaaactcaagtcccacatcggcaaaagataaagccaagtaagagtatataagtgaagggcaaccttcacccctagaactagtttttggggttgagttaggcctaaactctcattctaagaatctaagatggtacaagagcatatccaatattatttagaagggccacgcaccaagcccaagaagtgttgggcatgagagggggtgtattgggaaaaattcaaatcccatgtcagctaaagataaagtcaagtaagagtatataagtgaggggcaaccctcacccctagagctagcttttggggttgagttaggcctaaactcacattctaagaatttaagatggtatcagagcatatccaatattattcaaaagggtcacccaccattgttatccatgcaccaagcccaagaagtgatgggcatgaaggggtgtattgggaacgcaccaagtccaagaagtgttgggcatgagggggtgtattgggaaaaacctaagtcccatgtcggctaaagataaagtcaagtaagagtatattagtgaaggacaaccctcacccctagagctagcttttggggttgagttaggcctaaactcacattctaagaatctaagagtctacccaccaaggacgatatcttcctgggtcttccaatggctccccttgacccgagaaaagcttcacatttgaatccataggagtggcaataaagcataccggtctcggttaagatatctagagcatactttcgttgggaaatggcaatgccagaggaggattgggcaacttcaatccctaaaaagtatttgagcagacccatgtctttagtttgaaactaattgtggaaatgagatttgaggtgaagaatacgctcagaatcattgtcagtaatgacactgtcatcaacatagacaaaaggtggatgcaatgaccagatggagaatggatgaaaaacatcgagtgatcagcctcacaacgggtcattccaaattggagcaaggcagagttaaaacagccaaaccatgcatgaggagactgcttcaaactatagagagaacgacagagtcggcatgccaaccgagagtcacctaaaactataaaggtaggaagctgatccatatacacttgcagctcaccatgcaagaaggcaattttgatgtctagctggtgcagaggtcaatgttgaatggcagccataacaagaaagagatgcacaaatgcgattttggccacagggtagtagttgtcccgtagtcaagaccaaaaatatgagtgtatcctttggccaccaagcatgaacctttagaggaatatctccagcgatggaactagagagaaaaaggatattctcaaagaaggtaacatcagtagaacaatataccgttgaagttgaggacaaaaacaacgataacctttttaaagacaagagtacccaagaaaaagacactttagggacttaacagaaagcttatctttacctagtgtaagatcatggacataacaagtgcaaccaaagacacgttgagggacaatgtataaaggttctttagggtacaaaatggagtaagggacctgatttccaaggacagaggaaggcatgcggctgattaggtaacaggctgtaagaagtgcatcaccccaaaaatgatgtggaacattatagtgaaggataagagtacaagctgtttcaactaaatgacaatttttccctttggcaacaccattttgttgtggtgtgtgggcatatgaggtctcatgaagaattcccttcgaggttagaaaagagcaaagctgggaggacaaatattcacatgcattatcactgtgtaaaatcttaatggaaacatcaaattgattttgaatttcaagtgtaaaatcttgaaaatggaaaacacataagaacgtcttttcattaagaaaatccaagtacatctagaaaaatcattaataaaggtaaccaaatagaaatatctccagcgatggaactagagagaaaaaggatattctcaaagaaggtaacatcagtagaacaatataccgttgaagttgaggacaaaaaaagcgataacctttttaaagactagagtacccaagaaaaagacactttagggacttagcagaaaacttatctttacctggtgtaagatcatggacataacaagtgcaacccaagacacggagagggacaatgtataaaggttctttagggtacaaaatggagtaagggacctgatttccaaggacagaggaaggcatgcggctgattaggtaacaggctgtaagaagtgcatcaccccaaaaatgatgtggaacattatagtgaaggataagagtacaagctgtttcaactaaatgacgatttttccctttggcaacaccattttgttgtggtgtgtgggcatatgaggtctcatgaagaattcccttcaaggttagaaaagagcaaaactgggaggacaaatatttgcaggcattatcactgtgtaaaatcttaatggaaacatcaaattgattttgaatttcaagtgtaaaatcttgaaaatggaaaacacataagaacgtcttttcattaagaaaatccaagtacatctagaaaaatcattaataaaggtaacaaaatagaaatactacaaggttgagtagacacgaatgagaccccaaatatcagagtgaactaaagcaaaaggtgacatagcacgtttatcgacacaaggattataagtatgacagacatgtttgcctaaatggcacgactcacattgaagggacttaacggtagaaagacttggaactaaaaggcatactttgtttagactaggatgaccaagatgctgatgagcaagttctatagagatagcggagacacagaccattgacgatgaaagttggtataatcctccagactcatgtcctgctccaatcgtctctctgatgcgtcgatcttgtacaagaacaaaattgttaacaaacaaaacataatagtcaagagtgcgagtgacttgctaattaatattaaattaaaagacaactaggaacaaataagacagaatttagggataagttaggaagagggtgggtttgtttgatgccacgaattgggatccgagagtcatctgcgagtgtaacaggagacaaagaatttgaaaaggacaaatgagagaaaaggttttggttaccattcatatgatcagaggcatcagagtcaaggatccagggtctgagaaaaggggactaggagataaaagctacaagattaccaaaccgagccacaacagtaacatgttatgtaggtggttgggttgctcaaagctgaatcaattcattgtactcagcagcagaaatagtaacatttccaggcaaggcaagagaagcaattgcaggctaggcagggaaggtgactcgagccacattcactaacttcgcttgattgcgagccttgttgtgacagtcggcttcaatatgaccataaatgttgcaataattgcaatatctggaacgtcgttgaccaccacgacctttgtctcgccaccatgattagaagaatgggagacaagagcagaggaatctccagccggtgcagaggatgatccaaaggcatgcagagtggagaggcgaagcagctgttcactaaccgcgtcataggaaggaacaacaggacctgacaaaatctaattgcagactacctcaagttcaggtgtgaggccggcaagggcgggaaccataaagaactagctgtgctgcttataaaacgcctctgcatcactcgtaaaaggaatgagagtgttataatcagcaattaagcgttcaagcttaccaaggtagctctgcatatccatgttctccaattttgtgtttatcaaggtggttatgacgttgtagagactatgaacattgttggaataaacctttttaaacttattccatacctcataacaagtgggaaatgcctgaaattgtggtcgaaagtggggagcaagagtgaactagaggacactgcataatgaagcatcaacttgcttccaacgggtttgttccaaggtgggaatatcctttgcctgagtggtcaagtgatcggcacggccttggccttggaaccaaagctgaacatcggcggtccatgtgctgtaattggctgcccggttaatttttcgcacaggatcaactgtacattggtgaaagtcatagccgtggaagcggaagccatgacaaaaataggaaccaaataaggcccaagaaaaacagtaaaaggtgaccaatcagcaccaaaaagagccaaaatggaccaaacaggggccaaaaaggtgtgctagagtaggggaagggcagtgagtgggattgccggcagtgggtatgtcggaatctgtcacatgccagactggttcaggcgcgtggggctgctgactgcggcgagacttgtggcattgggttcgtcggaggatgatggtcccggtgatgtggtcacaccggcaaaaggagattgtagtagcgatggggagggctcacagctgtggcagtactgttcacatgaggaaaaaaaaatagaaaggggctgctgctgaaaagaaaaagataaaagaagagtagagggggatccaaaaacctaaactactgatgccatgtaagaagagtgatttcctgtgttgtgtgttattaccacacacactacctttatttataataagaatggatacataataagggaaacctaataatgaagagtaaataaggaaatccctaattttagctatacaatgaaagcatatcaatcatatcctaaacgtatatttcacagtatattcatatttgtggtaaaaatatatgaatcgtagttgcagaggttgaaaattctgttatctcaattggagataataattaatgagtttaatttttatccactatcactaacctttttgtactacaatccaatcttgttttgttacattgttttgtttaatttctgatttagtagtgtggtaattcaaggttagatggtgtaattacactacatggatcaaaattaaacgcatatggttggaagtgttccatctttttgcatggaagagtacaataaatttccatttgaccatttctatgttctccaaatgactttatatagtttgaaatgcttgtattgtatttgaatttgaataaataaaaaactaaactctaggatatgaggctcttagtagtggtcaaactatcttcccattgagtgtacccttgatgttcactgctttgtgtgtggaattgcaggatcgagagatacctgaag

SEQ ID NO: 2797 - DNA, 1866 bp, Glycine max
  Intron number 1 from transcript Glyma10g24570.1 (locus Gly ma10g24570) derived from phytozome v7.0 (chr-ID Gm10; pos 32074980 to 32076845)
caacaaaacttccaaaggaatcctttccaatcaaggtatgtcctctctctgttctttgatttgagcatttcactagacatctaaaatattttggcacaagtcaatggaatatgaaaattccatttaattatatgtttacttagtttttttccctcttgttttccttgatgcagtactcactagggaaaattactattattatttatgatttatgatgtctcatcacgagttggttatggtagataatacgtttttctatacttaaaaggtgtattatactacttttgctgtgcatttttaagcttgaatgcttctgatagaagctgatatctgaactcatctatgattgttggtggctagttgtctcttcaagagagtatttctagaaaattatcagaaagctttagagttcaatcataaagactgaagattattttagtctgcatgtagaaatgtcttttcatgattgaattgttatatatatatatatagacagatagatataacttgtcatctaggcattagatagaagttagttacattcttttgcagctaccagtgcctttatacaaataacacacacactttgttaatcttaaagactaatgatatgcttggtaggatgaacatgaaaatattgaagagggaaggagtgaactttgagaatgtatccaaccataaatcataatttggagcattcattctagcccttatccatttcatgtttcacatctatcaagcaagccttaaaattgtggtacgagaagcccaaaaaaagtttttagaaccttcccaagaaaaaatttctaattggatggaaaatgagaactctattttcttggctttctatataaatagaatgaaaggataataaacttgttcacacatgacagtgatgtttaaaaaagaagaattcaactaaaccaagagttcatcaggtctccagaacatagatttcaacatgaatttggcttgagaaatctagacttgctgttgaatgatattagtatgagaacaattaattattatgtattatgatacaatttgcatgtagatggattattttcacaatttccactgtttaggtgtatatgtctgcaattgatagttgtgtgctcaccactaaaagttgcaaatggtgttttgacaccaaaatgagttatttaaaaccttgacatcatgctgtgctaatatttgcgcctaacctgtaattctatcaagctctagtcttatcttctgaaacaaattggatcttaatggtttaggtatttcacagactatgcacaatagaattcttaatgggctaatgggtaaggttacatccctgccagagtattgattcaacagtccaatgttggtagttggcacaatatgtatagatataggaggcatcaacgtacactaatacgagttaaacaaattttttactctatcaataacttttacataaaatgtaatttttattaatctaattgttgaattatatttctatattactttgattatttcagtcaaattttgtcaaaattaaataactatagaaacatgtcaaattgatttttttatatatatattttaaaagtaacaggtcaattttaatgtatgttaataaggtattaaaaaaattgttaatattatattagtagatataatctatatgataagaacttttaatctaaacatgaataataaaaagggaaattttgatagtatttatgatttattttctatctcttccgtgcttgtattagatctttcccttttttcctattctaactttttggttaatatatatgactgtatacccctttcattgactttgcaaattcaggttgccatccctgtggtgtccactgttagagtatt

SEQ ID NO: 2798 - DNA, 5003 bp, Glycine max
  Intron number 4 from transcript Glyma12g33920.1 (locus Gly ma12g33920) derived from phytozome v7.0 (chr-ID Gm12; pos 37093494 to 37098496 reverse strand)
gattgatttccctggcccaactgattcatctgaaggttcgttctttatggttttacatttttttgttacttaatccaatttttaagtcctttgtatctgcatgggaatacattgagtattgaatgtgttgatcccttctttgtttttattttaaagaaaaaaaaaaactagcaagagtgtggcaatttgtgtcttttacttttatacccaaattttgtgatcaagaggcatgacttttaggttttcttcatatgctactgtaacaccaactttaggtctttcatcagtaaactttgcaagagggtgggagtgagtttgtcttatttacctgtaaactcaaatttggagatcaatatcttactggggctggtggaaccttatacctgtaatagaagcctaataataatatgcttatcaaatttggacaggtgagtttttgtgtttttggattgagattggtcacaatgtttctttgtgagagctattggtattgtgccacgtagattagaaagtatgtattctaattgagaactgaactttccataagtagataagttattccactttgtgttgtctcattggtgaagggatgaccaaggctatatatcaatacctcaacagataagctacaaggaattcaatattgcacccaaatgccctttgatgttggatggatttgcaaaaggaatatgagaggggataggtataaataattctggcagataacctagacgttactagcaataagttctagattcaccacaaagcaaggaaaatcttcttgtttcttattttacttacagcaaggccctttgagggtacataagagcttgattagcaaataaacattgttctagaaatttctaattcatatagtatcataatgggatttaaatcctattcatcaactagagatgtgaccaatgaaattcttataagcttttagagaattttctccttacaactcagttttgtgaggttaagttaggctacaagcccaaattgtaagatgatatcaaagtctatcttagatccatcattgggacacttgtatttgtctactacatgtctattcttagccgtgacatgagatgttgttgttattgggccatgctccagattcaagtcttgtgccgattgtgcatgacgcagggtgtgttgagatcccacattgactagagatatgtccaatgtagtccttatatggtttttgtaatccttaccttacaacccggttttgtggtggtgagttaagtccaatgtccaacttcaagcagttagagttagttaattggtgagttaagtccaatgtccaaattctaagaccagctaacttgcttcctttacattccttgcctttgtttacagcaacctaaccaattaactaactctaactgctttactaacaaggtctactctcaactagcaaaacctaactaacagggtgcttgaaacccatccacttcttgctcttgcagcacctgcagggcaacattaattgacactgatgcccagtcattcctgattacaatagcagcaggatcagcttggtcacaaacatagtgaccaatcaggttaacaaccactacaatcagcaaaacttgatgtaagcttaccaaaacattactcactactgcaacacttactagacatgttgcatgttggtctagctcagaccccttttcaccattatcagttcttacgttgctattttcttctttcaaaagcaacttcaagagcaagaaaaactattgcatgtgactgtcaaaatgataagaaaattttgaacccccagaatttataagggatgcatgcctactttggagaatccaaagctgaactagtcaaattaacagcagttttaatttacagcatctttctagtgatctggtgactttcaaacactaataaccttttacagtaaccttcctgcaactttcaaccaccaatggcctcttcccttggttgtcatttccagcaactttctagtgaactctgtcaatttccagccacatcaaatctccggctgatgttaagagtgttccacgatctttttatggtataatttttgccttttagatgttaagagtgttcaacggagtttatatttaaaaaaatggatttatttgtgacaagcttaaagcttagtaatgtttagcttgagggggagtgttagaataatttgcagttcatgtatcttgtgtcaaatgatttcatgcctcacatgcttaatgcatttagtttttgtaggaattagtatttatgaagtagcaccctgcacccatttttattctttgcccaggaaatagtccctactaagtctatttatatagatgttctacatatcataagttctgtacaatcaatccattccatcctatctcctcctctatttctctgttaccctctaacttcagcaggtctgatccattcaatatggaaaagagctcacagctcagtctttgccaatttctctctgccttcatctttaagacccatttctttgcctcacctcattgggtcccattagtgctgggagcctgggaaataattccattttgtggtcatggcctagtccattaagtcagcatttagcagactcgagtaattctactcttgacccttcttctttcctctaatttgtaatagtcttctttgatctccacatgtctgcggcacagactcatctgccaacatcaggtatctttttagcagcgtcaactaggatttcttttgcgatgtttgttgagattattttttggtcgacattgggtaggtttttcgatcgacatcagctaaggtttttttggttgacgtcagacaagactttttcttgttgtcgccggttaggatttttttggccaacatcgaccgaaaaacatcttcgaccgacattggtaaaaaaaaacctagctaacgtcaaccaaaatatttccccaattgacgtcgatcgaaaaaaccctagttgatgttaacaaaaaatatccctagctagcgccggccaaaagaaatagtcatggtcaatgttggccaacaaaccctagctgacgccaacaaaaaaaatagtttcaaccagcatcaacaaaaaaacctagccaacgtcaaccaaaatatagttccgactgatgttggtcaaaaaatatcaatgaccgtcatcggccaaaaaaccttaccgatgtcggccaaaaaaaccctaacctacgttgaccaaaaatcaatcatggtcaacactgatcgaaaagccctagtcgatgtcggccaaaaaacattaccgaccgacattgactgaaaccctagctggcctcaaccataaaataaccctacctaagattgactaaaaacatccttgaccgacatcgaccgaaaatgcattgactgacatcaaccaaaaaatggtcctggttgacgtcggtctaaaattgtttgggccgatgtcaagcccaaattgccctagttgaggtaggccgaaaataccttaaccaagatcgatcgaaaatagtcttgaccaaggtaggttgaaaataatacttaaatggacaaatgctaaattttcactttttatcgtttaattactgaaaataaaaaaaaaaatccttataacatttaagtggatataaattggatatgaccaaatctatatccacttaaatggattggatcttgaatccaaattgtttttaaaaaaaatatggatatagatttaagatccaatccatttaagtagatatggattgaatatggattagattcttaaaattccaatccatgcgcacccctaacctccattgacaaattcacttctgtttgtttcagttgagtagtttattattattattcaaaatctagttatataacctgttcatcttatgttgtcacccttcttttaattacctggatgaaactgtttgtttctccatttgcaacccagaaggtggttataatctcccatatttagtgctctattttgcctttgccctctgctttcaactatttaggcttttcttctgtgctattattgtgatgtttgttcctctctttttttgcttccttcttcactgccatggttttgctttttggtctctaaacctttatcttctcttctattttcttgcactcaagatcttagatgtcccgtttctcaaaaaagtgtttcgattgatgcgattaggtataatacttatgagatcaatgagtttcaaatatttcttcttagaacgtattgatttgatcccataagtggcaccaccgccccatagcatgttgccacctcatcttgggcaaaactgattgatccaagtcatacttgggttggaatggcttgagtggtaccttctcaaaggtccacaaatcacattctggttgcaccatttccaccaaagccatcaattgagagcaccacttctcagcgcctgatagcttctctgacttgggtgttctagtggagttgaaatgctgctcaatgtttatcaatcactatcaaaccttctccatcaaatgttggaatcatctttgaaattctgtactctcggctcccaaatcgaaactctgataccagtcaatacttgatagctattaatccagagatacgaattaataaaatgatttttttttttactgatcagactcctttgaattaggaagtcctagtgcagaggattttttggttgcttattattttagcttgacctggccatggtacctaaattctagatacctttcagcaacaaagttcttgatttagttgtctgatctaggaaaacaggcatttagtccttatttctttatactcccattgcttatgaaatttaaaggcttttatcacctcacagtcttgtttatcatctttctctttcatggtaagtttgattttattaacaccatcttttttaataagattctacctcatttgggaattgataatgattttataaatttggtttttttggccctcaaccaatttgttcttggcagctagagctgcaaagcttgtcaaagataccgag

SEQ ID NO: 2799 - DNA, 915 bp, Glycine max
  Intron number 3 from transcript Glyma06g05210.1 (locus Gly ma06g05210) derived from phytozome v7.0 (chr-ID Gm06; pos 3707564 to 3708478 reverse strand)
gaaagagtggtgagtttttttgttcgttttcttttcttattctctctacttgtgtacttttattgttattattatctaagagcctcgattttgtagttttcaataaattttaaccaaagtagagagtgtgataaaaggagtgtgttagacacttagagattatgttgctagcactcctcttgtcatctttttctttttttttgtaacaagtcctcttgctatctatatggactttgcattttactttacaaatttgagacggaaagatgtgtcatgctatatttttttcagtaggttgaatcactattttgggaagaaaccaaattttaatgcctcacagtgagccagaaagaaatgcaaattttagcttgcgcgaatgttggattggatggttattataggcaccttagcagccaaggtgttgtagaacaataaacctaagctgtggggactcatctagggctgactagagtacttcttctcttgggcaaaagtactcttactgagtttctgatactctgaggttttgaggaaaaagtaaatctcaatattataattatgcagaaaagtcttaataatacaaggcacttaaaatgtgtttataaacaaagatgaattactagataaatctaaatgagatataaaatcctaatcaaatatgaattttctaaaatatgagacttagttgaatcatatctaataagaaatcttaatatgattgtattttcctaagattaagaaacctagaattttttaaagatcaaatccctaaaattgatgaaagatcttctttaataatagaaaattctaaaatttatgtgaatgtcatgataatccttaaatatgcttcttcattctgcatcactcaccactcagtggttttccatctactctttgcaggaacgaataaggcgt

SEQ ID NO: 2800 - DNA, 863 bp, Glycine max
  Intron number 7 from transcript Glyma03g01860.1 (locus Gly ma03g01860) derived from phytozome v7.0 (chr-ID Gm03; pos 1608203 to 1609065 reverse strand)
tcctcagcagcaccctctcgagaccattccggtacaattcaaaactaatcacacattttaatcaactacgtggtttttaataagcttacttcaaagtttaaagaataaaataaaataaagttagaagtaaaacacttcttttaaaaatcacgtgcaaacataacagcagtacttgttaataatttaactaatttttttaattttttataaaccattaaaaatacaatttcttaccagtattttagaatgtgtattacacaagaaaaatcttttttatgattaaaatttataataaataattatttttaaatataaattatattataatttatatttttgtatttcaaagaataattgaattttttttataagattattttaattacaatttttaggataatgagaaaattaaaagttttattatctaaattatatgttctaatttataataaaaaaaagtatatttttattttcttctttatttgtcaaagatttgttaagagagcagactttgtccttactaatatttaaaaacatgtgatttatttaaaaaaaaatagaaacgaaaatttatgtagcagaagctactaaaattcattttgtggttttggatgtgacttgagattcacagtgtgtaactatgattctgagactaatcacttccccaccggcaagggcatacacagaatacactcttggattaaaattataaataaataactaatttttgcattattattattattattattattatttagtattgtatttgtttagatatattttgagaagtaaattaagttaaatgaataataatgtatggtggatgggtggcagcaataacagcagggggaaggaggagc

SEQ ID NO: 2801 - DNA, 2597 bp, Glycine max
  Intron number 2 from transcript Glyma08g36700.1 (locus Gly ma08g36700) derived from phytozome v7.0 (chr-ID Gm08; pos 34898519 to 34901115 reverse strand)
caccgcagtctcggcgtgcacatcagcttcgtgaggcaagtttttgctgattttgtttcaatggtgaatcaatttgttaatttttctgtgcggaaattgtttgtaaccttttgaaatctgattgtgtggctgattctgttattgggagtgttgtgtggtgtgatgttgggtctgaatgtttcatgtgggtgaatttagagcactgcgttgtattgctgcgctgtgtcatttcttttagggatttctccaagtcaattggctaaagcttttgaatagtcagtgaaataagattccgtactctagccttaaatatgtagtttaccacaagaataatgagctttattccactaggtgaggttgggtgtatggatggattacatgatgtcattgaattcagttaaaaattaaaatttcagggatatatattattcaccgtgagatccgtttttttaacaattttttacaatgtcctttgatagccaaaacttttcctttttccttttttaattttctttgcccataaattttgacttctttttcctatgttttgcaaaattattaattctacattttccattcattgttccaagatcttggtaaaactcctcgaaagctttggatccttccttggttgtgccttttcttgtctcatttttacccttccattttgtccaattttcagcattattgcacatgcacatgtgaaaggccttaaatgctcccttttgaacattttcattccaagattctttatctttcttgaacacttctatttcaccactaggatattctatcattcgaggtgctgccacttgattattagatttataatttgtcaagttttctgtttaggactcttaaaatgaatgtcaaggatcaagatcctatgttgttcagtaactctctcgtgcaatcaccttgcaagttcttcaatcaaaactcctaccaaaaacaaatcaatttgtgatcttgagattcatctcttgtaagtgatttgttcctcacttcctcttctcaaaacaaattttcataatctttaatccttaattcatattccattgagaaatcaagaatagactgtcattccttgtttagatctccaaaactcataatcacccatgagaatctttccttttgtggaaagccttgaaccactgtaatacctaagttgttttttcctttaactttcccactgtatcaaagtttaattcctagtgtatagccctttatctttatctccaacatatttagtttcttgaagaaacatgatgttaatccttctctgaatgaaaaaaatccttctctgaatcatgatgtctgtcacatccaatgatatatggcaaagtaccaatatttcaattgccaaaccttattaagcactcttggactagcttctttacctacacccatccgcaaaaatgtgaggacctacttttactcatttaaactacctcccaatgttgttgcagttttgctagctcattttacattgtacttgagccgtataatgtgttaatttctggtaatggcttagcattagtacactgctcatataatctgtcttgagtaattcatgtttgggattctgactagttttacattcttgttgagggcctaacacaaccctacttgggcttgggtccaactttgagacaaaagacagttctcaaatctgtggttttaaaagggctaaatgattatatgctcatgaagtgtagaataaataaatgctggtaggtatttatgtgctgtgttagttttgagagaggcttgacacaggataacatggagtatgatatgggatttatattatttgatttggtgatatcctttttcttttgggggatttcaattttatattcttaacttgtaactcatttttgaatatagctttttaaatttagtaatgatccttgacagactttgtcctcacatacttgaaaaagttacagtggaacctttgggattatccattggcttgcatgagagtttgtgattgtgaggatgaagcctgggcaagtatcatcgttgttgtttctgattccctttttcctttagattattcactcaatggatgactggcttgacaagattggaaggataaatgatgatattattgttttactctaatcattgagttgccatgcggaataaggatttaaagtggagcaactgaatggatacttaatccaaaataaatgaagcaatactggaattatcaaagactagttggtttttcacaaacatgtgtctggaaaaactttgactggaggtatttgtcttataaaatctattataggggaagcaagtattttcttaatttgaagaggctttatgtgtagattcaatgaaatccaaggagctttacttgcttgttatgttattgtgctttccatgagtaatttgaagtacgtagcagttatataactaaattaaaatttcataccctgtgcttctgcatctttatttgatacttgattattctgtgaaacacactatattcagaatgtaggaagttgttgaatagaaagaacagaaatgattgatagctaagtaaatatatgctcttctatatgtaggtctacaaatttagactc

SEQ ID NO: 2802 - DNA, 5083 bp, Glycine max
  Intron number 1 from transcript Glyma14g14970.1 (locus Gly ma14g14970) derived from phytozome v7.0 (chr-ID Gm14; pos 15691708 to 15696790 reverse strand)
ccctccattcttcactgttcttcgttcttcaacgggtaagtttctaaatccgagacttttaattcgtttcttgatttttggctttcatctttatttcgttcaatttcggtttcttttcttccgtttttaacgagctttaaccgatcgtttaagccattttctcgcctagtaaatgatgtaataaatttcaaccgatatttgtgttgtaatctcgtttaatcactgctaaagtaaaatctaaccgatcgttcacgctgtaacctcggttaaaccaaaaaaagcaaaataataataaaataatcaaaatatctttaaataaaataatcaaaaaaatcaatcggacttttttctttggaagtttccttgaatgaattgactaataaccaaagtaaaattaaggctaaaatcaactcacaaatcaagctttgtccgcaaaaatcactgaaaactgttttaaggtccaaagccttaaatggtcctctttgcttttatcggttaacacagaccgttcaaaagcataaaagcaacacatcactttactgccttcgcgagaactacgtaggtctggtttcctcttcgatggaggatacgtaggagcaaaagccccgcttttgtcgacctcgtgagatggttagaggtccaatgccttagctttctcaccaagtaaaatggattattttaaggtccaacgccttaaatgaccaccttccaagtaaaaaagaatcacttgattcaccccttttgaaagaactacgtaggtttgatttcctcttcgatggagggtacgtaggagcaagagccccgcttttgtcaacctcaaaaatagaaaagaaataaaggtttagatacataatttcacaaaattctaatctaatgttgttgtcctttgggacaaacgtgagaggtgctaataccttcctcaaacgtaaagataactcccgaatctggaatattcttcttgaccggtttcctttggtttttctaacgttttcctttcaataaacgttggtggcgactccgcgcattttcctcctatggaagacgcacccatgagcttcgcctcgctcgtccgcaaaagggtaggttgcaacacttttagatatgcaattgcttaagaataaaggcattgaactaaaattacattagatacatcaaagatgagtgagtccaaataggcagttgctattattaagcagattttcctcttcacaccaataaaatatcaatcaaataatttattttttcattataaattgaataagaccaaaatcaattaaatttaacgttgttagcttcacctttctctcaccccttttgctcctactatatgttcgttttagatgctcatcaccctttgattaattatgcttaaactgccacaatagaaaattttaataagcatcaactcaatccaaataagttagtaccttaataagaggagaaattttactaaaaggtgctttacaacaattcataaaaaaaagaacaataacaaaatgaccacattaataggctattttccaacaacacaacaataagagttaaggttaaaataagatacttatcagtaatgtacaacatttgcttcagaatgagatgcaatccttatacggaatagcaaaccaaactcttcctcgagagccataatggtctctactaaatctaaaataaccaatccaaagtcattttgaaagtgaacattaactcataatagtatcaaataacattataaatagcaattttcaaaaccaacaaaacaaaaattatatgccccataaaatggtcaaaagtttcatgcattgggtaacaaattgaaatgaaattattacatgctgaaaacataaacctaacatcctcaatcaaatcttgtagcattattgtaatctatgaaatgataacgagagaaaataaattctagggctcttaccaattgaaaataggacaagatagtgaaattaggcataaccacaaacacaataaacacatatattcattgaaaatccaaaccatatttaggattttaaaatagaactagaaaatgagggagtataagaaccttgaaagtattgactttttggaaatttttgacacaagagataacattatttgtgaccttggacttgttgagaaagcaatcttaccccgttcgtagaattggtgaataagaaagttgagagtgacgtttaagggagagttctaatgaagagtatggacctaaactcttaaatatttgatgagtaatgaaccaatccacacctcactctcttcaatatgcactcctctgaacttgacttctttgctgtccttttccaagctgtctctgtgctgtccatacgaaatgataccatttttatgattttcatggagtgggtcatgattaaatattaacacaactcgttttgaatggacaacaaatgaacaacttagaaatggacaacaaagaagttagattggcactcctctattacgtggataatgagccttcaaatagaatccttttctcttatacttttattgttggggttcatacttaggctggccaaccctttgcctctatcctcattatccaaccatttttacccttgttgaattaaaataaataaatgcttttatattttaaaaataagaaatacattaatcttttataaataaatgataatgttactcttaacaaagagaattagtaagaaaagataatgtttgtctaataaaatagtaagatttttattattgtatcacgtgtctcattcgtgcatgtcatacaatctaataagaagaggaatagagagatgatttgatataacatcttgcatgaagtaaactaggtagttaactatttggtccaacataattatcattagacaatgaattaataatcttcgagaaggcttctccattccttcacttaaacatgttaattgacataacatatgatagtttttttcttttttgtagtttttagtttgacttcttaaccctttgtagtaaaaaagaagagcaaattacaataatatctttaaacttttatcaaattacacataagtttagcctctttatttttatacactaatcaacctttaagtttgaaaaaatcatactacctaacatctctttatatatttaaaaatattacactgacaccccttcaaatcttacactaatacttcctacaaagaagacaaaagtagtgattaaaaaacataagatacttgtgaaattatatgaaaccatatggagtattattgtaatttgctcaaataataattatgatagcttttgttgatatattttttctcttcatactgtttttattagctattagcactttcaaaatgtacttaatgatttgtcatatttcattaagtaattcattaaataattaagtatattttaggatgattaattaattaattttttaacttgaactatttagccaattaatttgattaagtgccattttggtttggtttattttgagaaaaaattgctattttttagggggccttttgaaaataagaaatgatctcattatttgtaacatattaaatatatttgactacaatttttagaaaaatattaagatgtaatttaatattctaaatcaattagaataaaaaatagtaattctaaaaatattttactgacaaattttttaaaataaaaatagttattttatctttagtttttctaaaattatcttctgtcaagtatttaactattttttatgttatgattatgaatgtccaatttaagtttgttttatattattataattatagttcagagtttattttttatttatattagaaacatataatcttacaacataatttactatctccaagttatgaattttatatttccttacgattcgaaataaaatttcgattttaacaacttggaacaacaagagtttaatggaatgaaaaatgctaaaatatactctctaacacattctttaaaatacattcatttttattgattaaaattacaaatctatccctcgttcaaatcctcctaatgagatagttactgtttggatgtttgtgtactagtcgtatacagtgatttttttttttgtatctagccagctgggctatactcagaattaatttcaagtcaggaagaaattttatatttggttaagtttaaataactttgaataatttttagtctgaactaaattttataataaaaatatttaaatataaattttattactttaaaattcattttaaccacaatttattttacaaaagtcaattccattaaaatcaattttctcagctctcgtctaaattcatttcttcaccaactctgttaaattaaatcaaatccacttcaacttgcaacactattctctctgtcgtttatgcctcggtgccccgcgtttcacgttcagcgtattcctaacgttggggactgtagctagggttttagggttccttctcaaatttgacgcaactactgcgttttcgcgccgttgatttcactgttaatgctttgtttgtcctctcctcgaactcgttgtggtttctagacgtgttttgcatgaaccggttcttgttttggtgctaggaagtggaaattatttgctaagagtcttgtgtgatcgatgtgctgtaactttctctcttttaattttagtttagggttgaattgaactatgtaagtgttctaaaatgttttaaataatggttcacgaccgtcattttgatcctcatatgttgtgatgaaaccgtaaacacgacagtaatttaaaacctactgagattggatgtatagtaggatattgatttttctagcaatacaatttaacactaaattttcatggtacattgtttcattagggtccactgtatgcataaaccttacgaagttaacatgaattacgtagaatttgggaaactatgttgtaaaagcttgggagtgcagcagggtagctctgttttgttgctagggtttgtgtttttcttttgttattgaggaattattgtttgctatcagtggataattggtgtttgtgtaatggtattttgttgcttcagatctgttgttcagagggtttaagttttgataatta

SEQ ID NO: 2803 - DNA, 1917 bp, Glycine max
  Intron number 8 from transcript Glyma20g30870.1 (locus Gly ma20g30870) derived from phytozome v7.0 (chr-ID Gm20; pos 39556392 to 39558308)
ctggattccttggagcaaaatctcgtggttttcaagtaagttttaatatttatctaaggtagcaaagcctcaaaaaagttaagtacttgagataagcctttcataggcttacacatgatgtgattgttgtagtcttgtagaccatgagcttttaagtcctgtcgatagcttgaaaggtgatgcttaggtgttttttattcttttgatagatgattgaatattagatttaaaaaaatcatttaataaaacttgaaaaaatagaagtggaagaatgaagtagggaatagggatatgtagttatcgtagaaaataacatctattcctgtgagaatataatatacctgtgaagcaccgacacgaccccaaacaacggtgtccccgtttccgacacgccgacgacaaggacacgtgtcggacacgcatttgccgtgtccaacttttatttttaaatccttcgacatggttctagacacgagaagccaacagacacgacacgacttttgttatttttttcaaaatcatatttttttaaatcttaaaagataaaagattatattttaaattataaaaatagattagattttttattatttcctcttcacatcgtttacgcttcctatttttttttaaatcttaaagataaaacattatattttaaattataataacatattagaatttagattaaaccaaattaaaataacaatgttttcttttcacgtcagtcatgtcactccttcattcatgtacgtcttcactggttccctcgttcatatctattcgttactggtgctcatggaggcaaagttttggtggctagttcatggtgctcatgcaccaacacttcaaaagattgctcttaagttactagggcaaccttgttcatcatcatgctgtgaaagaaactggagtacttactcgttcattcattcaatcaaaagaaacaaggttgctctaatatttgttcatagtaatcttcgtcttctttcaagaaattccccataatatcatcaagaagaaactaaaatgtgggacattgcaagagatgagtttggatcacttgatgagaatgaaattcttgaagttgctaatttatcccttgataaaccagaattagaagttgtgtttttcaatgatgatgatcaagaaggaagaagaagaacttagatagattaggattaacagttttttatttatcttttcaattatgatgatttatcttgatacttttttaggtgagactctttattaaatatattagcaagtttgtttttagattattttttaaagagacaaagtttttgctttgtgaaattttcttttgaatgataattgtgatacttaatataattttttgatgcttataaataatatatatatatatataccgtgttcctgtgtcttatgttttagaatttagccgtgtcgcggtgtcggagttggaatccgtgcttcatagtaatatatccacctttcaccctgggattaagaagcaagtaaaacatgaacattttatattcctaagaatcaacgattcataagaatatttattcaaaacttgtaccaaacacgggaatgtgatattcccaagttcactttcctaggaatcctttttggtttatgtagttatcgtagaaaataacttctattcccgtgagaatccgggtaaccaccctcacttagggctggatttttgtgggttgtatcagttttgatttagtggaatgcttgctccaatgaccatttctttttttttttggggggttggggggggggggatttacacttgtaataatcggaaatagctatagctacatcccttttttttttttttttccttttccttgattattattgattttcaatcaactatatttcctaatgttgggaaaactatgagcaggaggatacttatct

SEQ ID NO: 2804 - DNA, 1405 bp, Glycine max
  Intron number 14 from transcript Glyma07g16510.1 (locus Gl yma07g16510) derived from phytozome v7.0 (chr-ID Gm07; pos 16192376 to 16193780 reverse strand)
gaagtcgccgaagctttcttaagtcaggttgacaggtaaaagtagattttttttttccagcaaccttgtttgatccttttcttccagtgtcaagttccaagagatactaatgtagcaaattggtatggtagtttaattcaaatgcctgaactgcagtaatttgtcctgaaccactaacctcttcactttctaaaatttgaatgtcatttgtattggatattacatttgtcccaacgtctaattcttcatatttgttgctttcattgggttccatctatatattctataaacatttggttaacccatgaggttcatagtgcatatgtagtttgacttaatgaagagaacttcggaactaactaataaaaaaatttcttcaaattaggaggtggaagagaaatcatcttttttgaaacaatggagcttatttttattagaggcagtttagctgtggcttgtaaatattaatgtaataagtatgttatggatatttttacctcactttttctctaatgcttttattttatttggatttagatcatataatgtgcttgatacacttttggagagtgaagtgtgaggtcgataactactgataagaaaaagaagcgaaaccaataatttagaattgtataaaatacaactatgaacataacattttcgcatacatacgaagatgttttgatcatatcaggatggataagatcaagaatgagatcattaggaagaaggctggtgtatagaagagaagaaaattatcctccaaaggtgcatggtaggacgagaaagaaaaccccatggtcagacactgttcaagtaacatgacttcagggagatataaggttggctaggtggtgaagggagaagggaagaagggagaggtcatgtgttcgaatcccccagctaacaaactaacaactagcatttggcgataaaaaaaagtaatgtgacttcaagaatctgttatacatgacagaacataatgctcaaagggggagaaccaagccacttaaggactcccactgaaaaccaattttgataccaattgataagcatccaagcacttaggaagccctcctttaaaagtgtagccgtagggaggagaaccaagtcactaccgagcatcctatactattctatattgaacttagcactgcatgatacccaagtattaccaaataacttgaaaatctttagttctgcttctaacgtgcattgaggtcacttatcatatttcatttggacataattaattcttttaacggtaaatagcactcatgcttcattgtgtttctttgcataactactctatgaaatatgattaagtctaatactagagttgatgttgatgactgaggaatatgcatttttgcttgattctcaaacagtgctgctgtattccaca

SEQ ID NO: 2805 - DNA, 1448 bp, Glycine max
  Intron number 4 from transcript Glyma13g29570.1 (locus Gly ma13g29570) derived from phytozome v7.0 (chr-ID Gm13; pos 32462166 to 32463613 reverse strand)
acatttggctcgtgctattgatctatatctgcagtgtgagttctaatccaattttaatgctgtgaatctaaattttgttgttgcttatgataattattaaaggttaatgaactaaatgagttccatcccatgagtgataaacattctcagaatataaattccaatatcagtcaagatggttttgaaaacagtttgagtcttgtggatttacaatgagactttcttaacaacaaatttttagctgcataaactaaataaaattaaaatacttcgaaactcaacccaaatagaaacgtaaaagaataataaataagataaataaaagaaaaaggtttttggaaagtttgatgaatacagtgcttaatagtggtctgcttccttatagatatttattaaagtcattcaaatctgtctttcttggaaaattattttagggtatgtttgaatttctggtaggaggtgctccaaaagtatgtttgggagtaaaattagtctcggtcatgtttggttatctccaaaagtaggtttgagagtaaaattttgtctgaaaattcagttttagagaagcaagacctgggatgctttgtaaactcaagtttaacccaaacttatgtttgtaaactttaatcaaacatgcacttacccaaatcagcacaggatcatggtgacaattttgtgatattcggatggaaaatgctgatttgcatggaaaggattttgtgaaagttgtaagaattgatatgatttgtttgatacatgtaatgagtgtaggtagtaactcctttggtttacgaccctgtgcattgttatgtgttcttactttttgtagttaactttgtaacaaattttcttgatttaaattgcattaatctattcagattatgtgtctatgtagctgcaagaagagagagcttgacaccacaataattttttggtggtttcttcttttgcctgtatacatgtctgcccctgggatttgttggagatttgaagaatatctgttttttctgttagtttacttttttgagtgcatagatgctggtgttcctagtgacagtataaatttgaagttttttttttttgaggctcaatgaaccagaaaactgagggcaagtcttggcgcaatggtaaggttgttgccttgtgacttggaggttatgggttaaaatcctgaaaacagtctctctgcttgtgggggtaagttgcgtatatttaccctctgcagactccactaagcaagcccttttggtgagccagaaaactaactatgaaattaccaaaattaaaggaaattgaggtagaaagctgggacattaaccctagacatgatgacttctagataagtatgacaactgatactgtagatttatataatatataacctagaatttacctatctgttatatttaccagacaaaccacctatcgaagacctacagtatttcttg

SEQ ID NO: 2806 - DNA, 1379 bp, Glycine max
  Intron number 9 from transcript Glyma13g30780.1 (locus Gly ma13g30780) derived from phytozome v7.0 (chr-ID Gm13; pos 33314208 to 33315586)
ctgcagaaattcctcaaaaaggcatttgaggtattgtatattcaaaattatttgagtgcaattaactgattaaactttatttggtaaaacttatttgcatatcagagtagatataatttttttttagtcaggtatcttacaaatccacaatttagtctgtgattttggatagggaaatgagaaaacagaatagacaaaaagcatgatcatttctgtaatgtttactgaatggaaagcagaaaaaaaagagagaattgaccttccaagggtttccccttcaaatggtttgccctttaacaattgcgcttctagttagctcctcaaatgctaataattcagaatgaaacctcttctactctttcctattactttagctacgcccttattcatacaatgctaaccacaatcaattttgtagctactcttaatcatgcaactaagtttttgtaactgctccaactgctttgcatcatatttcttttattcttctataattctttgtcttgggttatatcagtgccatctccttgaagctcaaccttgtcctaaaagttgaaattgggaattgccccctgtatgaaattttatgttcatcttctcccacttttgtttggataatttccctgttatcaggtacatgtcatcttctagacttctaccattaccaagattgtaataatcttacttttttttgggcatttgtacatgggactaaatgatcggccacattgaaaaatgtcccttcttcctgtcttttggtacactcttgataaggaagcttttgtgctcctgtgtttctctgctgcatcagctccttattgggagcctggcagtgtttctgctagtttgcacttagaatctttaagtaaatatgttttctggttggtgctacataggatcgcttgtgtggtttctgttctaaatagaatatttcatatagggcagataaagttttattttggctatataattgtgttcattagtagtccttctgtttgtattttaattgatataatttggaaaccaagcagttgctcagttttgaaggagaagagacccttggaaggagaattctctcctttcctgtcaattaattactcaatcaaattagatttgttctttcttattggtctgtgacaatcgtttagatttgtttccttttcttattggcaagcatcacgtggtgcttactgcttctgttaaaaatttaaagaattattaaaatgaattctggtttttgacctttgactaacctaactttactataattattacactagttatttttaaggggtatgccatcttttctttttggggagtggcctaatattgtatgttatgcttctattttattgactctggacaggattataagagga

SEQ ID NO: 2807 - DNA, 1690 bp, Glycine max
  Intron number 1 from transcript Glyma08g15370.1 (locus Gly ma08g15370) derived from phytozome v7.0 (chr-ID Gm08; pos 11140567 to 11142256)
gccggtaattggtcttttctttgtgttttgtgcaatttgtttgtgaactagggttaattttttagtttagcgttggttcaattcatcaattgtccttgcaaatggtttgaatggatggtcatgagtatggtgaaataaaaacaaaaaagaaaacagaaataagtgtgcattggcgatgagatctgcatttattcatttgtgctgcgttggtgtttttcttattatgtgctatgtagttgttacttgtcagtactcactagtcagctactagtttacttgaaatccgtttccagatccagaattctttaaagagttgtctatggcggtaaggctaatggtgtggctataattctatgcaaggactgaacttatatacagtgttgtaggcactttcgattctgtaatcagaattgaagttttatgttggtaatctttgtcaacctttaatggaaacctttacgatgtggattaatgcagtgaaagtgtgaaacaccaattttgattggagaacaatcccaaaagcacctgaagaactttaactaatcacaattggagttttgtcctttttttctggtgaaaggggggactgagttgggaatatagctttatttggtttaataaaatgtgactggatttgtattatttgagggtagattttatgcattttagcttcttcgtgttatatatttcttatatgattttgttttgcaatttgcataccattagtgaccttgaggtggcctgagaatgtatatcaatcatatcattgctatgttgccacaaggcattaacataactctgttttctttactaaggtgtatacttttatgttttaagcgcctatcgcctcaaggcattgaaatccctttgtgtcttaagggaacttttcacttttgactactttgcttgagatatgttacattaattctaaaaataaaagattatgatgtgtgcaactcactgtatgctaagttccttgctgctaagagtcccaaaaaatagttattcttttaatatgataactattatacaccctttagtatctcagtgtaaagttagttggctaggctttttctaatgttatgatttatgaataagatataaaggtatttctatttctcttttgaaccagaaagatactcctatggtcccaataggcggtgacacctcttcagacaccttaccttggggccttaggcattcatttggctactctgactcttagatttagccggattcatgatgtaggtattatgttattatatatttccaggtattagtattttatatcattgatttatttaatggatcctgctaggttggtttatgataggttcctggtgcaattttggctttattaattcaaagaataataaagtaaggaaatcctgaccataggtcctgaagtatatgcataatattgtaaggattattaagtgatgatttggtggatgatatgctaacaaaatatactttggattatactgatagaatgagacatcactccctctcaaattaggtgcaattttggactgtaatgttaatggtgtatatttggaattatgctataaattataccttctgatcatcaaaattaattagtatgaacttcttttattatttttttaataacttcattttaatttgagttgcaggagatttagggataaaaaagaggctgcagaacctg

SEQ ID NO: 2808 - DNA, 9233 bp, Glycine max
  Intron number 12 from transcript Glyma04g32990.1 (locus Gl yma04g32990) derived from phytozome v7.0 (chr-ID Gm04; pos 38379673 to 38388905)
ccggtgataaggagaatttggggaggtgtgaaaaggtttgtgaatgatttttttaaccataatattatatagtatttcagaaaagaaaaatgcgagcagagaacttgtatgggatttcttttttggcatatccatagctgattcatgtcttggtgtcttcaagtttacatgaaggatgattgggctgtcttgtaagtacagttttcctagagtgtggtaacgataggataaactactgatactctgatttgatttgagaggagaattaaacgtaacaaagatgaaatatatatggtgctgtttgtgatttgtttggaagtcattgcttaccttattattaagaagtaaggtgaaaataatgaagattaggtagccaaactaccataataagagatgcaggtttattttaaggaaacaattgatggaatgcaaatcgaaactaaataattgcagaacacttcctactgttaggttctcgtgacattcttttggtcacgggtgcaaaccttttactttatctttttctttagtctgtgccaccaatacctcaaattgtggacacatttctctactgttgctggtttctcaaggtggtgagtctttcataatactttaccccaagcatcttccttcaaatatttgaatcaaaacctctgtcaggtcttcccgtgtcaaagttagggtattccttctcaagaatctgaaccattgcactactattccatccatactaatgacagtatattgttccttctttgtggattgcatcttgcacctcagaatttttcatctctagctatccaccccaaaaggtcatgtaccacgaaactgggcaaatccacattcttcttgcatgaagggatgccatttcttccatttttggaagatttgtatcaacttgtctcctccttcctccccctccataccttgcacacttttcttgacctccaaagagtttgacatccaatgaattaagctggggatgataaatgctagccattttcttttttttgtggaattggacagttttccaacacttcaatcactttcacattctctgaattgttgattcggcaagtcagatcataatgctagggccccaaaagtgaataagaaaacctagaagtgggatggtgagataggaatgtagaatagaaaaagtagagtaagagaatgaaggggattcttagaattcatacttaaggcatcactcaaccctacaaaaccgacttgtaaggtgaggactgtccaagccttataaggaccacattggtcatatctctagtcaatgtgggaacacaatataccccttcacttccaggattggacatttggaacgtggaaaaattgttggtggccaaacaacaccacccctcacgcttaggaatagacatctagagtgtagataaatacgggtgatccaataactggatgtttatgtagctctaataccatccaacaaattatgtaacaagctggatagatcaagctctgataccatccagctctaatacaaatgtaacaagcttgatgcactgatatatatatatatgctccaacttcaaggggagtgttaagatatgttgagatattatcttaatgtttcttatttctctattttattttactatccttagataggttgatcatattattaatattattaaaggggtgtattggattaggattttaaaagactattttaacataaaaagtcgtgtgcattttaaaagattatgtaggaaagttatgatttatcagtttcttttaaaagacttttatgattaagattctatagtttggattttagggggggtgtattgattaggattttaaaatactattttagtacaaaaaagtcttgtggattttaaagattatgtaggaatattatgacttattagattttcttacaagacttttatgataatttgaattttaatagatttatatcataaggatttaaacgatttgaaaggaatttatagatttataagatttgtaagtgttaaactcagagaaattggaatgaaaactatgtcctctcctctggagaattctcatttaaataatatgatacaattgatttctagccttgaaatttgctacaaaatactatatatgataacctacaactaggttaactagttaaggatataattacatagttacagctatacaatcatgcaagatatgctggtttaaagggccaacaaatctatagccaaataatctgcctatcaattctattgacatcccccctcaaattgatgttggtgaatttgcaagcatcaatttgctgactaggaaattatgtcgttaatgtgtcaaagatttggcgatgacgtcggctagttgaacagatgttgagacatgaggcagagtgataattctgtggtcataggcttccctgattgaatgacaatcgacctctatgtgctttgttctttcatggtatacaagatttgctgcaatctgtatggcacttgtattattagcatacaacggagttggtgttgcttgtaaataaccaagttctgaaagaaggccccgtaaccaaataatctcagagcatgcggcaaacatggaccgatattctgcttcagtaaaggatttagagaccgattcttgtttcttgcatttccaggagataggggcatctcctaaaaacatacaccaatcagtagtagacttccttgtgtcgggacatccagcccaatcagcatcactgtatgcttgaagttgtattgttgcacctgtaggaaagaagagaccacgactaggagtgatcaacaaatatttaatgatttgttgtactactgtaagatgcaaatgtctaagattttgcataaatttgctgactgtgtggacaacaaaagagatattaggtcttgtgatggttaggtagatgagacttccaaccaactttttatataaagttgggtcttgtaggagttcaccttcatcccgtcttaacttgacattaacttccatgggagtgtcaactgtagttgcagtggtgagaccagctagctgaattagatcctgagtatatttgtgctgagtgacaaagatgtctttttgttggaattgtacttctaatccccagaaataagtgagttgtcaaagatctttcatgtgaaaagttctatgcaacaattgtttgattgtagtgatatcttgatctgagccagtgacgataatgtcatccacataaacaaggaggatcacaattccttttgaggtcctttgtagaaagagagatggatcatagctactttggatgaaggaaaagccaagtagtattgtgctaaacttttcaaaccgcactcttggtgcctgttttaatccatacaaataatgttttggcttgcaaatagtattggataatggtgagggcatactagtaggaagtttgatgtaaacttcttcgttgaggtcaccatgaaggaagacagttttgacatctacctggtgagtttgccaagattcagatgcagcaatgacaataatatttctcacaatagtcatcttagccaccggtgcaaaggtctcttcatattctaggccaaattgttgcttatttccaagaacaaccaatcgagccttgtattgatctattgatccatctgaacgcaactttatagtgaatacaaatttactgccaagaggtttaaccgatggaggaaatggaacaatgtcccatgtctgatattcctttagtgcaagaagttcagtttctatagcatcctgccaacatttatgcttcattgcctgtttatatgaagaaggaataggaacaaatgctaaagttgctatcaaagataaaggttaaaaaaaccatacttttctggtgatttacgaatgcgagtattgcgacgtaaaggggttggttctagttgaagtgctggatcaacaacaagagaatgatcgggaaggggccttggagggattgaaggctgaattggtggaacaatcggatgtctttggtaagccatgaaaggaggacgagcttgttcttctgcaaaactattaggaaacaatggcaaaacaaatttggatgtagaagagtgagtgtcctggttagtagcaaaaaaatatgtatcttcttgaaagatgacatttctagaaacccgaatcctatataaatgaggatcatagcatataaaacctttttgatgggctgagtaacccaaaaaagcacatttaacagattgagctgtgagtttggtgcgttttggtggctgaagatgaacataacagacacaaccaaaggtgcagagagtggaataattggacgacttaccaaataaccttaagaaaggggaatcattgtttaacacttgagaagacagccgattaataaggtggacaacagttgaaagagtttcacaccagaaataggagggcatgaaggagtccaacattaaggtacggacaacatcagaaagatgacaattttttctttcagctatcccgttttgttggggtgtggaagggcatgacctttgagataatatactattttcctgcaagaactcttgaaacaaatgagatgtatattccccctattgtcagaacgcagagttttaatttttgatgaaaattgagtttgaacataggcatgaaagaatttgaatgcagagaatgtttcacctttagaacgcaaaaagtagactcatgtaaaacgactatagtcgtcaataaaagtggtaaaatatatgtaatgtgcatgagatattacaggtgtgattccccataaatcactgtgaattatgtcaaaagattgatttatatttgattgatgaattggaaatggtagaattttacttttatcaagtttacaagaattgcaatcaaattgagcaacactaaaagatgaggaatctttattgccaagaactctggatttcattagttcatgaagtacattggaatttgggtgaccaagacgcttataccatatttgaaattaacagttgtagaattacaagaaataaaaggtagaaaagaacatggtgacaatgatgaataaagaggaaaaagacatccaactttaggcccctttgcgatcatcttccgtgagtgttgatcctgcataagacaactagattttgagaattcaactctacaatattatcaactaattgaccaactgaaataaggttattggtgagatcagggaaaacataaacattggtaacagatgaagaaatatctccaattgctgtgataggtaaattgtttccatctgccgtgtgtatttgcaaattaccaaagtaatttgtaacattgctatgggcagcaacattattggtcatatgattggatgcgccagagtcaaaataccaaggagagctgggtaaagaagctttacctaaaagacccaaaacagaaaatgctgaaacgatcatttgttgaatcatttcaggggttaaagttggcacagaagctggcggattttgatccccagaaacaggagtagtagaagagccaacagttgcagtgaaggatattgcatttctccatggtggtctgatttgacattcttttatgatgtgaccttcttttttgcagtaattgcagaactttttaggacaatgggaagcaaaatgtccatggcctttgtagcagaaacattggacagtattcatgtctcgtcctcgagggtttgccttgtactgcatacatgcaggaaggggggcaaatttctgctattccatgtttgtctgagtgtggagacgttgttcttcacgaagtagttcatttatgcattcatccaaggaggaagcaatagctttattcattaggttggttcgaatgccctcaaaatcaaatctcaatttcataagaaattgatctcgttttgtggtgtcatgaacgttttggattgcaatttgtcctacagttgacaaatctttatagacaatgtcagtatattcagcccaaagattcatgaaatgagaataaagattagaaattgagagtctatcttgttgaaaaatgacaatttcatgttcaagttggaacctgcgagcagtgttgttttggttataaattttcctcaggtagtcccacatctttgctgccgtggtgaagggtctgagattgaggacgatattagactcaacaaagcctatgatccaagtcatggcttgtgcatctttgacctctcatttggcatgtgcctccttgtgcatagttttgtcaggagtagaattagttccgtcaacatgaccccaaagctccttgcctttgataaagatctggaactggaatgcccaggtggagtaattctttccattaagatgaacaaagaggacatcatattttttagtagacatgatgctcttgtgaacagtaccgcgcaaaaggctagaactgggaacttggagactgggagtgcaacgaagaaaaaaatctagtttgggatcaaaacctagactgataccatgttaaacttagaaaaattcggatgaaaattgtgtcctctcctctggagaattctcatttaaataatatgatacaatctgatttgtagccttgaagtttgctaaaaactatatatggtaacctatagctgtgctaactaattaaggatataattacacagttacatctatacaatcatgcaagatatgctggtttaaagggccaacaaatctacacaaataatgtcaaataatttgcctatcaattccacttaaaagataataatttgaatattattgtaattctatctttcaaagagcgaatacaagacttatttataagctatcagtgacctaattaaggaaagaaatgaaatggaacaaaatctgtaaaaataaaaaaaatcaaatttgtactaattacataataaaatctgtgctaattatggaatgtatcataacactccccctcaagcttgtgaatgtatatctatcattcccaacttgcaagtaaggtcttgaagttgctccgtgggaagtccttggtaagggatgtattcggtggctataagaccactgtctaatttttccttaataaaatgtcgattaatctctatgtgctttgttcgatcatgttgaactggattgtgtgcaatgctgatggcaaacttattatcacaaaccagtcccataggaacttcatattttattttgaggtcatcaagtatgatattcatccataacaactcacaaacaccttgagccatagctctgcttttgcacttgatcttgcaaccacattttgcttcttactcctccacgttactaaatttccacccaagaacatgcagtatcctgtggtagatctcccatcaacaattgatcctgcatagtcagcatcagtatatactttcatgataaatatttctcctttttaatcaacaacccctttcctagagaatacttaaagtactgaatgattttatttattgcctgcaaatgtctttctcttgggtgatgcatgaattgaataaccacactaactgcataggctatatcaggcctggtgtgggataagtagataagttttcccacaagtctctggtactatgtcttctctacctttgggctttctttatcattttcaatcttgtgattttgctctatgggcgctccagtggttttacaacccaacttgtcaacttctttgaggagatcaagtatatattttctctgagaaatgaagataccctgcctagagtgtgcaacctctatcccgaggaagtactttagcttctcgagatccttcatctcaaattgggtagctaacctctccctcaaggtttgtttttcaagctcatcatcgcctgcaataattatatcatcgacatagaccaagagcaaagtaagtttaccatcttgggagtgttttataaagagagtatggtcaacttggctttgcttgtaccccaaagattccatagcttgagtgaacctaccaaaccaaacacgaggagactgcttgagaccatatagggcttctttagtttgcaaactttatttcctccattagtggcaccatttccaggtggaatctccatgtacacttcttcttccaagcttccatgtaagaaggcatttttaacatcaaattgatgcatctcccaaccaaagtgcgttgctaaggagatgatgatcctaattgtattcattttttccactggagctaatgtctcctcataatcgattccataggtttgggtgtatccctttgcaaccaaccttgccttataccggtccaatgagccatcagcctgatatttaactgtatatatccatctataacccactacctttttgtctttcggtctctctacaatctcctaagtctcattcctttccaatgcacccatttctttattcatggcttgaacccagttctcatcctttaaggcttcttgtactgatgtagggattttgatagaatcaatagctgaaataaaactccgatgctgaaataaaactccagttctcatttccttagaccgcttggccagaatccccaaacttcaggacttatttagattttgtaattccttccatcccaatatggtatcaaagcattggtatccaacatgagaagaggtttttgctttcttttctttctcaacttttttttttctcttccctcctacaaataaagatcttattctttcctctaataccatctttgaatttggccttagatcctaactcaattccacaaagctagctcgtaaggactatattggccatatctctagtcattgtggtatctcaacagggatctgtattacaaagaaaaagtgaagaatagggagacttcaacacaatttccctgcagtcacgtagtcataaattggaactgtatgatgaagatcgaatgattcgtatgtcagatgcctatttaaagtctagtttatggagataaagtataagacatctgatctttatccaatggttccaattcgctgactacgtgaatgtattaataagcgtataccaattcaattggccatacagagagtgaatcaaaatcatgaaaaaaggaagcatataccatttcaaagttcatgtaatgagacaatgatagattggttgcctgttggcatgtggaagaaaaagtttgtcttactcttgccaatcactactgttgagacttggattataaacaaattcttttggtctttgttaattcaagaatgtgtatgtgtaatcatattgttatatacattggttatgtttcagtattttttggagctg

SEQ ID NO: 2809 - DNA, 1139 bp, Glycine max
  Intron number 3 from transcript Glyma12g04810.1 (locus Gly ma12g04810) derived from phytozome v7.0 (chr-ID Gm12; pos 3179493 to 3180631)
tacttaggtatgttagttgtttgctgaattagtttgaaccaatgtttgttgtttgagtaaattattatctcctcctttgtattttgtgttattatgcctacctaccatctattttgcaaacctacaaaaagaactcatgtgtctttacaaaacaaaactttacaactaactccagaatactggcaagactagcagatttgtcagatcatggatgtttgttttatggtcaaatattattcctacactgtaaacctttcagttgaggggaaaaaaaaaggttaagagtacattcatttggcaatgcagcagatttgaatggtcttagtgttcaatcatgcgtgtctttaccctttctctggtatataagtctgggaaagggtaggattcgaccacaagacattcatgataatgtattagttaaagaatctgatagacatataatagtatattagatttagtttcagcgattctgtaaatttattggaggtatctgcctgctttcataataaagggatgtctgtgttaggagtaggaacccaaagaataactttgttgattgaatgaatttgaactgaaacaaggagaaagaattcccctctagtgaactaactactctatctgtccctaacaaattccccctccccttctgttccaactcctgacaatctgtgcagttgatccttttgcacttagacttgggtaggattttggtaggttgatgcgatgtggattgggttagtgtggcttcatctttctattttatccacattgtacttcagtttgttctgttctgctaagtgagcacctcttatgctctcacttagcttttaataaatactttaatttatcccaaaaaaaaagtgcagttgatgcaaaataaaagggaggcaataataacttacttacttttgttgcttttgatttgttgaataaattaatctgcaaaagaatggccactttagcttcaaaatgcaaagcatatgcataaatttaaaacttcctttctacacaaattatgaaatctggttggtaatcaacatgcttgttaaacaccgtgtttcttttcaatattatttgttagtattgaattttttcttagtaatatattattgctttgtcctcttccagtatctccatta

SEQ ID NO: 2810 - DNA, 2145 bp, Glycine max
  Intron number 9 from transcript Glyma05g37870.1 (locus Gly ma05g37870) derived from phytozome v7.0 (chr-ID Gm05; pos 41372043 to 41374187 reverse strand)
ttgctgctctaatacctctacagaaggattctgaggttagctggtttgaaagtggttcagcataatttattgtctgaggcacaaggatagctggacttaatacttttaaatgaagataaactatagcagaatgcttgaagagctgtacataaataatttagcttttactgattttcttgcttttttttcaatgtcattataaataaggctatatatatacaaggatagcatatagtttatatgcaagataatctatgcaaggatagcatatagaagaatgcttgaagactggtttatatttgcaaggcatatctgtcttagtagttagtaatcaaatcgcaattaaaattctggattgccaacctaattgttgaattgtgaatcatattgaatcataagattcagaaatctgatgaaaaatagcttgaaatatttcacataaaaagcaaaattttaaatgagacgctgaaaaacatcttaattataatctctaaaaagcaaaattcctagccatcactaagtatatgaagcctttattttagaggtatgaaaaaagggcaatggaacaatttgaagaacccagaatagaaaatagagtaaaagagtaattttatttcttgacattaatataacagcgagagagatttcttttccaaggatctcccattcacaaaggatttcccctttctacaatggattatggagctaatgcctaaatctcaattgatacaatacaaagtgccccttccatccttattctctcctacttatgtagttaatcccctttatctaatctaactgatcccctatgactatctgtctctaatttattttcccttccgaccttacaatgcaactcaccctaaaattcaaccttaacctcaaggttgaaatctgaaagctagaaaacatataaaatgctcctctaggcattattgtggctgcaggacaatgaacaagtttaatgatagcaattgagtaatcatttatgttattctatggccatttagacctatgctgctgcaggaaccataagataatgactatgggcactctttgtatgatataggcgaatgacctataacttccaagtcatcctggatgccgttccaaataaagtgcataaaataagtgaatgatgctgtaaaactccagtttcagtagcatgaaaatatagtagtggaataaccaaatagtatgcaatcagtagtactcctttagttcctttttatttaactaggtttaaatggtgcacattttgtaggtgccataagcttctaaatctaatgattacaccaataaaaaaagagcagtttgaaatacatgagaatgtgaaaaaatgagtttctcaacttagagtaacacaactgaatgatggatgtggaactcgaaaggacaatcggacaggaatgaaaatggtcataacttgctcatgtagcaatcaaatatagtaaaattgctaacatgtgtctcaatttagagtaacatgtggaactaagcaaattcctgatgtaagaatcaaatagatatggatgtctcaacaaaggatcagagaaaaaaactaaaactgatgtaatccagtgccagaggctccttgctttgcataagtatgggggagggtcattatacatagcttttccttgcacatgcaaagaagttatttccaaatttgaacccatgaccaaccatcaccaaggcgcaattttatcaatgtgccaggactctgcctccaacaaaggagtggagaatgatcacaaattgatgatatgacaatcaaatagagagtgaagttgcaaacattatcttggcattttgtgcttcaaattttataatttgtaaatggataaataaatgagattatctaactttctaatttctttgttgagaattggtgacagaaatgtaaaaagaaaaataataacgaattgcttagtcatgtgatttgtattggtgatacaaaattgttccattcatccatttattgtgattcatcacatgatattaactgttagctacttgaattgtattgaactgtgagatctgaatagtgaatcataagattctaacacttggaccatatttttggtttgctggaattttgattattgatgttttttttaattattattttgtaggttccttctc

SEQ ID NO: 2811 - DNA, 2162 bp, Glycine max
  Intron number 1 from transcript Glyma15g07450.1 (locus Gly ma15g07450) derived from phytozome v7.0 (chr-ID Gm15; pos 5222513 to 5224674)
gtccaaggacgacaattctccggttacagttgcaggtgaatgttgttttctgaacttggtagtttgctaaagcttttggttctcataattctctgtttttgctctgaattctttgttggtgggggctagttttttaattaagtatgcttgtttttcccaaaacaatgtttttgaagcaaatgggtttaacccaatttgccaagtggatttgtgcattggatactatgctatcttgcaccaactttgaggtaataatgatttttttaacaattgatatttgaagttagtttacaaattaagaagcgtttaataggtgtagaatattaatttatttagtaaaaaatgattttttatttaatataagatgtgaatgtgatttgttgtttgttgaaatgtattttgagtaagttgtatgtgcaatattccttgtaatggtcgtatacatgggaaaaataattaatgaaatttgagatttgataaacatcaatacttttgaaataaaaaaagctgaaacagaaagtggaatcattggcaggagtcaaggatactgaactttagtcaaaatatgtgtttgaaagatagtttatgtgtgttaaataactaaattagcgaggagacttcacattatggcctttgcggctttgcctgagttgtattcatatccaatcaaattatgacaagtggcttgttctttggttcttaaagaccaaaaagggtggaatgcaaaccctgtctctgttgtctgatacacgaggacataaccaaatcaatacttatttcctaaactggttttaagtcaagacaaagtcattggtatggaaagtgacatttgaatttggaggcttcatggattttcaaaggttcacgtttctaatacagggaaataatatggttggtgaaacaaagtgtatttcaaactattttgttatacagtactataaactataaattactgctaaaaaaagggtataaaagtggaaagaacctcagtggtactctttatcttataaagtggttttcaataaggtagagacaaggggaatggaatagtgtaacaagaactaaagtccatatattggtgctaccagctggttgatctgccatattggatgtggcttcctggtagaatagcatatgcttcacttttggtttatattctgctatatttaaatgctgacttcaatggctcatcttgctctacaagcaaaccacttttgacttaactgaattgtttaccctgatacgcgtaaatatattatttttcctcagttttagttgaatcaattcagattcaaggatatatgattttacttatgttgcaaactgatctcttgtcctccaagaaaaatagaaggatatctaaacttacttttccttttgtttacaaaataagaaattctattagaacaaaagaatgaatataaaggaagaggataaatatcatatttaaaatagtccaaagaaaaaaacattggaggaggaaaaaaatgtttttcaagtttttaacagaaaaaacctatataatcccttcagatgtctatcaagaagattcttagaaagaccatatactaggtggaggctataggtccttgttctaataaacaccttgcttgattactttttcaagtgtaactgtatctaggactttggaagcagagcattctgctttagaaagaatagaagttttccaaaagactggtgatattgttctctattgaaaaaaaaaatgtttttcaattgactggttagattagacctttctcggtgtcattttcgctttcaacttcagattctgctattggcattgatttgaattaggcgtaaactaaattggaaatatatttcattaatcatgaattcatgattttcattgtgaagttgatcacataccatattctctttgtaaagttccaatgtatgaataatcataggttacaatgacttaactaaagatctatattctataatcaaatttatgctgcgtctctcaatatatttccttgtaaattgtcatgtgatgattgaagcttgtctggttatggttgtgttttgcagataaaactttctgagcttgattgatacattcatactcacaacaagtttcatttacccttcattttgctatttaaacagattggagtgttcaagcaattgtcagctgg

SEQ ID NO: 2812 - DNA, 384 bp, Glycine max
  Intron number 3 from transcript Glyma15g12770.2 (locus Gly ma15g12770) derived from phytozome v7.0 (chr-ID Gm15; pos 9442909 to 9443292 reverse strand)
tacttgaaggtcaacaatttcccttcacagtgtttttttatcgtgtttcctgatttcaagtagtatttgtttaagaagaggagtgctaacaaaacactctttttaacacactctccactggtggttgaaatttattgagaattataaaatcagaagaatgactcatcaaatgactagtgggacctgctaaatttgtgatttttaagaaatttgagccaacaataaagagtgtgttcaagagaatgtgttagagagagtgttgctagcatttctctgtttaggaatggtcacaagtcacaacatcgtacagtttttgaaaacaagaaaaaaaaagcatggtgtttgtagttattagtgaaaatagaaatagaaaatattttcctt

SEQ ID NO: 2813 - DNA, 4457 bp, Glycine max
  Intron number 3 from transcript Glyma01g03720.2 (locus Gly ma01g03720) derived from phytozome v7.0 (chr-ID Gm01; pos 3174684 to 3179140)
ctgtgttgcacgagcaagattgtctcggtacattattcatttattaaatcatgcttcaactttcatgtctatctttgcttcttttttttttttccataacgtgttggtgagaaaattttcttttgttgttaagtacgtaatgatatagtacacagatagatagaagggggaggtgagggtgtgggtgaggatgtcctagaatcgacccaatgcatatccaagttcaaagaaaatttaaaaaatgaaatttttttaaaccaacaaaactaatttattaattttattataagtttatttaaaatttagtttttattttttttaagacgtaaggtggtatttttattttaaaaactaatttgtagttaaagacaagaattttaaaattaaacttaaaaattgtttaataattttataatgtttttttttttaattttcctctctctcacacacacacacaaacacacacaatataccacgcatttttcttatataacaagagtctacatgctgtcattttcttttcaaatgttactgattaaatttacttaattataatttgtctagttgttaataccaaaacttattatatgcatataaagtgttacaaaaaaataataattatatgcatataagtctatagttcacatggcacacatatgtcaaggccaagggaggcatcaagtcaactactttgaaaattagtagtataaaggatttagatgtagtagagtactttttttacggtatatagtagagtactagaaatgcaaacttatcttgtaaaaaacttacgtttaaatataaacaatttatttgatcaagccaaatttaaagcttgggtttggccagagagctagacttaatttaaagcttaatttaaagcttcagaagccaaacttatcttgtgaagtttaattatcgttgtattcataacaatgacagggatgtataatagttgtcccctaccattattatcgtcccctttcactataatagattactaattagggaggaaagacttaaggatgaagaaaaaaaaaagagaagaaagattatgggataaatctctttactgacattttaaactaagttaacaaagtaatatatttcagaaaattagggaatggatgtaaaaggaaagaaaaaaaaatattgctactagaaaaaaaatgcaatggaaaaataagggctggttattttggttttaaaattaaaatttgatttaatatacaaattttaaaagcatgcaaaatctcatgaatttttttttaaaaaaaattcaaatattataattaaaatttcaaagttcaattttatttttaaacgccaactctaaatttaatctcatgcattaaacaaatacttcaaaactttcaaacgcttacttagtttttgattattggtgtgaaataatatttattatttttttcaacaaaaattctttgcttaaaaattgattggatcacctttaataaatttttatttccaattacatattcttatttataacactcaaatacaactccccttcaattaagagattcgagttgttctactcatacaaataatatgttagtaagaattttatttattatgtataatttattttttgtaaatattatataaattcaactctaattatcatttctatatttttttcattgaaattgaaacctcatacaagctcagtcaatcgtaatagctaattaattgcaattaaattgtcccatcactttctcttttgatgttccttctcaataaagtcaactttagcaaaaaaattgctttagttggtcatcacaacctctcaattcccaccacgccttctatttcgggttataccatagccataccaaactccattccacttcccttgttttttctaattactaatgctaatttgatgttccaacctttccaaacgaagataatgctagtgtttaaagtagcaaatagatgcagtttttatgttgttttctaattaaaattaaatttttataatttaaggatattttaatataatttttaaggcaagactctaattttaattagagaataatatatataccaaaagtattcaaagaaactttctaaatttcttttaaaaatatagcctgcatagtgcacactttttgtaacaacaaaaaattacagcttgcatgcacttgctccttttttagattagaaatattatgtgctaaaatttaattaagatataaattatacatttctcatataaaggattatagtataatactcattttcttaaataaaaataagaaataagtagttaaaagggattttatctcctaaatgtcgttgtcataaaagtaaaaaatataaaatttaagaaaatattgtttggaatataaatacaagtaaatatatttattaaattattccttttgaaactattaaccatttgattgaaaataataaacaaaaaaattaacattttttcatcttgtacattaatatcttctatatatcatattaaaacttttaaatttagtagtttaaaaaataattataaccaaatgtttctaataacttgttcttttttatcaaatattttggttgactaagttatagattaactaaatcaatgtcttatcaaaattaaatacacgcataaactcattcatcaaatgtttttcttctagtgaaataaagttataaattaaacaaatgagctactataagttaatttctagttaattgaaatgacttgttaaatattagtatttttcctgtatttagtgggaaaaaaagtaaaaggaaagaaatgggtgagagagaaagtaacccatgataatgaaatgggtttaatttagccaaaaaagaaattgaaatgtgaggggaaaaattgtgcccacgtattttttcagtctctacttatatggcaagaaaatcgggaagaagagctggctttttcttaccttccacttatgtcacttttggaccactttcaatggaaaagaaaaatactgttcttatgagagcaaaggggtagttcatgtcaacgtgagaaagtggggaacaaaagagaatctttttacactgaagaaaaaaaaaactaaaataaaaataatttatcaataatatattatagttttttatactaaagaaataaggaaatggattgagccttagccctctcctataacaaaatataatattaatataatattacaaatcttataaagacatggttatttatttaagaagatatcatttttttctatctattatttattttactatataaataaataagattttcacttttccttatattttcttttttagacgagtgttcataatattatgttaataataaattattagttaaaacttattaaaaattacaaaatcaaaaaagagatctatcatataagatgtgagattcactaaattttgtgattttaaataaatttcatccaatcaactagaaagggtgcattaaaaaatataagcaaattatgtaattttattaaatgctatcatttctaaaatactcttcatttaattttaatgattcttttttattcatgatattaagtttcaataaatattctatgttaataatattttatattattagttaaattttattaaaaactataaaatcaagaaagaaattcttcatataaaaggtgagattaactaaatttaataattttcaataaattttatttaatcaataagagaaggtgttttaaaaaatgtaagtaactaattttgttttatgtaatattattattcttaaaacattctttattaattctaattttatttttaatcatttttttttatttatgatatcaagtttaataaaaaatattttaaaaataattttatttttttccttgagattaataaaattaaataatatcaattaagttttagttagttatttttttcttatacttccgtaatggagcataacattttttttttaccatttttctattttattttttgaaatcaaatgaaagaaatgtttgtgttgttggcaataaatttagaccagtgttgagtggctaattcccttctttgcctctctacacagccaataaaaactcaaacagtcatagccatatatctgcttatcatatcacaaacacaaacttccttattttcttccaaatctcaccacccagaaagcacaaaagctacacacatatccaatcttttctttttcttcatttcgtccaccagattcatacacaattcacgtatacgtacaattattaagtaattgatttccaccaatctctttctttgatgatcaatcattaattgatccattgttgtttacctgtaaaattcatagagatttcgtacatactagttattgatcgattcatcgattatgaatgatgatttccattatatatatgaagagattgatgatcgtgtgttgtttttgtttggaacccaaatagaaggaagag

SEQ ID NO: 2814 - DNA, 4401 bp, Glycine max
  Intron number 2 from transcript Glyma13g20210.2 (locus Gly ma13g20210) derived from phytozome v7.0 (chr-ID Gm13; pos 23633620 to 23638020 reverse strand)
atttacccttcacggatcttttcaagcattttttggtatatgatctcttatgcctttgggttcatattatagtgatattatcattattggtggtgagaactggttttgtttgccttcgcatttgtactgtacaggttatggaagtgaatgaattccttcatttggtttcttcaattatgttgtctgaatcacagatgacgtatcaggaattttgagtcttgggttaatggggtgactatagaaatgatgactttgtcatgagcatttatgtcaggatttattaacatgatatgccgctgttatggattggtatatgccaactttcatataggaagaagaaagaatgtgacaccaaaaatcctgttaattggaagaattgcataggctttattcaactagaacgtggcctttagatcaagctcgtccatctactgggactgggtgcctttttggtatgaaatgtcctagcagttatgctgaggatgttgttgcaataactctgtcacattccaatgtttggtgaagcaaaatgttggtgttgagtgttactggcaatctagggaatgatgtggcacttaccatattttattgttatagttctaaatgggctctggggtgctgagataagattcttgtaaaccttgatactatttgccccagtgacttgtaaatgcctagtcaaattcgtctcattcttagttttgaatttgacattatgtttcctgttgtggtgatcttacttcgtggggctgtataatgagtgtaacagtgcagtaacagtattcatataaagaattcactgtaaattggtatgcactatggacactgcaatgttggaccaatagtgtatatgattgatgaagactactgttcaatgttcatttgccttgaattgatattaactgtctttaatgctggtgatgattgttattctgccgaaggttggtttttgcaatagtacacctactcattactgggagtcgtgtagtgctggatgatgctttatttggatatgaacctgtaggtttgctgacagagaagctgtttgattaccacaaattggttatcttctcccatggtcctaaattggatactagtgccatgagtatcgatagcatagccagaatgcaggactttctcccttttgcattagctagtttgagagctggaaaaaatcttcttagtttgaacttattcttcctaattttaaattgccgtcccttgttggggacaatggaccttcttaagacaggcttcgttcactttttatacaattatacacaactctcctgtctctggtttgtgaagagagtttattgcaattggatattgggatgtgctttgattgttgatattccggtaaaaggcaattttttttatatggaaagtcattgcattaactttgaactttttcttttaaatattcttattcctatttaatgcaaagccaataagccacgtgattatagtttcaaatatgaacagattcaggaatacgcttgataaaaaggcaatattatttacggtgctatttaatttaacaccgaaaacctatgttttgaaagcataagtattgttatattcagctaattgtttgtcttgatattcgttttttttttctgtaagggtattatttagtatttggattatagtgaaatctgaaactaaacctgaagcttaatgtttcctcataattgaaaaccaaagtgaaatctgtatttttttctgacaactactggttctaattatttaatatattttatatttggattctatcagtgccaacgccagtttttagcagatgttgttggctttaacactctagtttgttaaagaattgcttcataacttttttggaaaaaattctgcacatatagcgacgacgtctttttaattgtgtacactttagacattgccaatatctgaagacatgtaagatatggattgtcaggggcatgccctttgcacagtgctgatttgattctatataagttaattaatgtttttaatattcttgactggttttaatctgttccctttttttcttaaatgaaacggtaactcattgaaagtatgcctcttccttcttattttggctttaaattattagagctaggataatatggatttctattttctttactatttatatttgcctggtctcaaccattgggaatggttctttctgctctcccatattctcactaattatgttacaattttgtgattaggagattaaaagataatgattttggaaaaaatggtgctggttcttaaactatttctgatatataaaaaacacatcatttccttgtagtaaaaactgcagtctagttttgacatttgtctctctttttttccccagactcttgtgctctttataagataaacagggtgaactttttttttttttttttttaacaatgctcgtgtcctttaaattttctgtaagatatacatcgcttttattaaacatttcatttttgttgtttatccaaagtttgcttcaagatgccttttcgattttcgtttttccatttcccccctttataaaaccatatagtcattgtagttcaaatactctgcttttttagttaatacactgtatttacataaattatttgtgtttagttggtcttgtcttgactactgatacttattagaaggcaaatataggagtctctcacttttgtgcctgattgtgcacatagttgattatctttttcaagtgcaggaaaagaatagaaatgctaacatttgctgagtgatcctttgtaaacattgccaggtaagtcttttgcttgagttatcctacttccaatcgctcctctttttaagtcatatctgaactcttgctgctacgcatgataagctagagtgaggaaccatcatccatctaatttaaatgccagctgtcattttttctcccttgtgtatgtacactacttcctttttccctcatctatatttttcttgtgtcaatgaagagaggcatcctatgagtttggtttcaagtgattggacttattggggctcatggtatttgttacggctaaggagtatatgagtggcaactgtgtagtattttacaggctagtttctgccattttatggggaattcccaagccttgatgatctgaagcatatatttcctcctccccttcagaaataattgccagtggcgattctcctcatttggccaaattgtattgtggctggtagtcatgcttctctttttttgcatgcctgttcatggtgttctaattcacctgggctgtggccttcatctatcatgcaattttggtggtaattggaacactaacatagatagtatagctcattctgtgagtattgtcctcttggctgattaaacacataatcttgatatccattgagctcctatatcagttagttacttcttatttaccccttctatatttcttttggtattcttggcagctggacatggagtttcaagctaggtggtcttctgtaggcctagatccttttgccctgtaaaggattgaatggaaaatgatgtaaactgatgaataatatatcaatagtctaagaaatttttctattgactagacatgtggaagtgccagtggtgcttgtatatgctgtaagtggaagaggaaggtcaggatagatttaattgtaggactactttatttctaatactagtaagattgtaaatttatacaaaatgttaagttgtggtttatagagtatatgctcccttgtcttgctagactatctgaattatccttaggtatcaactccatgctacatttaatttacaattatgatagtaattaccttttttcagaaaaaaaggttacattgttgacttgtgacttcttagttctaactctagttcatttcaaatgtatttgtgaatacatatctgttgttttctctctcacttctcccttgcaaatatctcccaatgactggtaaatagttcattcttaagtcttgactatatattgccattaagtcatagttctgcatgccatgcgggattgtcaccattaagtgtttaaattgaattcagcatccaggcaactctttagactactaaccagtttcctttcaaataagtgtttttactggattttgttaaataatatgtatggtttatattgacaatacaatgcagggctctccagattcagtgtttttcaaatagaataaattagataaatcctactaattatttattttgttatttcacatgctgcagtcatggatgaattttgtctcgtacgtaagttgtagttttgaagtggtgtagcttgattgttttgaattaactttgcattttgttactgaattactctgatgctcttgtatcttgcaggttgagttatttgctggtctaacttaaccatactg

SEQ ID NO: 2815 - DNA, 1885 bp, Glycine max
  Intron number 1 from transcript Glyma20g03960.1 (locus Gly ma20g03960) derived from phytozome v7.0 (chr-ID Gm20; pos 3942483 to 3944367)
gcacgcttctacaccccgcggtgtccagctgaaccgtaagctttttcatcctcatcttgccttctttctttctttctttctttctttcttttattatccgatccatatgaatcaaagacttcttttattagtatgaattgaagacatatagataatgaagtgtttacaaccatttatgtattttgcgttcaaacaattgagttagattccttggacatcatctacatcttgtcttcttgcgagttagtagaattggttatgataaaattgattttcaatcataattaatttgtgactaaattgatctgcaggatattggaatacaagtaacaaaagaatttataataatttacatattttatttaattaattgagtttgattagaccatctggacatctgatcatgtcttatattgtgtgtttgtttagaattttataaaattgattttgataaaattgatttttaaccataattaatgtgtgtctaaattgatctcaggggtggttactttacttttgttcactttacagtaaaattccacaattaacatgggatcttactctcttctaaattaagcaacttacttttagagagtagataaaataatatcagtctttactttagaagagaaagtaagtaatcttagttgctggaaaaatcaatggttaatattgtttgtacatgaatgataaattatgaaggtattggaatatttttggttaatatgttaatttttcattaaagatcattaatttattttacttttcctcactttagaattgacagatggtcaaatccattagaatgtgtttttcaaattacacttgatgactatttgaacacatggccatatagtcatttgcgagaaaattaatcaatgtttttacattggtaggtggaaaatatggccatatggtcaattttgtgtgggacctatactttaaaaaataatggttgatcgtgccaagttgctgttgggaaacaatcccttcactctaacgaggatcaaaggatatagaatacacaatatagaaatactgaaaagacacaagtttaactttgttctacatttttttacttaggtttaggagaacacagtatttattcgttatctcaaataagtgacaagttttttagataaacttgaaaaattgtccctttatattaccctctttcacttagacagtgatctctcttcacattgaccgattcttcttatttcaataacgtctatttatagcttcccacattctaattttaaaagagaaaacgaatccctaataaaataacataatatctctctatctaagatctttaaatttaaaaaattattctcccaaaatttggctagattttcagaataattaattcttaatagaacatactaaaatctatggtgaatgttttacaaattaaccagaaaatgatgtataacttaaattccttatacgtctggtcctgattaaaatatcgttttcataagtttgtttgttgttttttgtaagattctttattaatttttagatatattaatcattttttttatacatctttatttaattttttcttttcaaacattaaaaaaaaatttaatagatataaagataaaaaagaataattttaaaataataacacaaataatcaacttttaatgtgattaactaaacttatttattttttaatccacatgaattagttaaaaaaaaatcttattattagtaactaagggagaagtaaattcaattctaatgtttaaactgaatggtggagaagttctcagttgatgtgttgagtgattttccaggtgcacggacaggaagaattccaacactaattgattatatcaaagaggaaggaagtacccatcgtggccattcagaggaa

SEQ ID NO: 2816 - DNA, 9011 bp, Glycine max
  Intron number 1 from transcript Glyma13g33970.2 (locus Gly ma13g33970) derived from phytozome v7.0 (chr-ID Gm13; pos 35630041 to 35639051 reverse strand)
agcgttcgtactttctagaacttggcgtcattcaggtcagattcctctccctctctctcgctgtatatctctgtttgtgtgatattattgggcggtgtttgaatcagagagttagatccgtcgaagtgctagagattgttgcgtttcttaattttctttttaattttttgtgtgatgatcttgctttggttttctgtttgacttgaatgaattctgaactagcaagagaagtttctgttcggttgccgtgaaaatttaacgaaaatcgaaaaggaaagagagaaaacataaacgaaaacgacctctgtttgtttgccgtatctctgttttatttgcaagcgttcttcagtttgattttctcggttcattgaaacgcaattttcatgctctgagctagaaaattctagtttctttttcttttttaatttcatgaatttaacttctcccatgcgtcattatcacttctagaaatgtgataaattcgaacagaaatgtgaattttccaattagaatcagaaacatcgttgacgcgttatttaagcttctgcgaagtgaaggatgaaaaatccagaactcagtttattcacttattgtcaaattgcgtcgaaattgtgtttacacgagcttctccgggtagatatttttggtagatattggaagaaggagtaccaaaaatgacgtcacgtagagggtttgtggtccccaagggtgtttgttagtttgcttctttggcctctgagcgttcgtatccgcgaaaattcgcccacttgttcctggaaatgccctttgagaccttttctcagtttactctgtgaagcttgtttccaaaacttgttttggctgtcctgtgaaggatggaatgggaacttggaaagagaaaaaaagaagaagcaaacaccatattattatgatgctgaggataagcttttaagttaaaaaagatgatggctcttgtaatttctctgtagatcgagcagcacatgtgactcactcagggcacccatgtggtgcagtttgtggatgccaggaatgatggaccctgaaaaagttatagttgaggtttcttccgttttctatttaagatatagattagttacaagtagttttctctcgaggttcaacacactgcctggtcaaatcatatgtgaccatgcataatctgcctgtctattgtttatggtaatgggaatgcttttatagaaaatacttaggaatgtttggatttttgcttgttctaaaagtatgcttgagagtaaaatcattataagagtatgtttggttattctccaagaatatgtttgagaataaaactttgtctaaaaacttaatttttgagaagtatgacttaggattacaaacttgagtttaatccaaatttaaatttataaactttaatccaaacatctagtaacaagattttaaattatggttattgtttcctttcatttttttatattacaggaaattatagacaaatactgttgatgcagtggcaattattgtggttgcatgaaaaaatcttcacattactgtcgaaattacagtcgcagctctttataaaaccctggttagtagcttaatggttttaatacagtaattcagcttcatcctcgtcattagaggctaaagtcttataatataagaataagaattcaacttaggtgatcgataaaggttaggatgaggttagtcatcctcaaagttttagtagtcaaatcaggaagcttagatatgcaagctatcattggaggggaaaatggtcatacttattggagtgctaagcttcgtgtgcttggtactgagatatggataaattttactgggcctctggattttagttcctcccccttcagcttactaattactattggagagatggtacgtactacgtagagatgaactgttccgtttgattttggcttccaccgggggcttagttttcgttattatgctctgctgagttttctttacccaccgtaccaaaaaggctgttccattcgttccaattcatattcgctttgataattaatagggcatgatggtgaaccatactgctagagagaataaaaatcttgagagtcaattatcaatggatcttttagatctgtactgagagtatagacacaagcaagttgactgccactggctcagaagaaaaagtataactgatgaattaatgtaccagcttagtatctcttggtccaggagctgcggggtgaggtatagcactatagcctgtagactcatgaaaaggacatgagctggtgtaacaatcaacagtattttcatacaaactttatacaactttttttaggctattagtatttttgttctcacttttttcattttttaccccaccttattttttcctcgttatattttctccttctgtcaactaatatttaatatttaatatttaataaaatactaacgtgatagtatcatcttcactgtgacataagtatttctattgaatattgaattttatttaaccaatgtaaaaaattacacgattaaaatattgaaaggattaaatttgagaaaaagaaagaaagagatgagttttgtaaaattgagaaaaaattttatatataaataaagcaaaacaaaagtaaaagaaaaatgtgaaataaaatgttccatctgaagaaaaaaatataaaaaacaatattatacaagttgtataattttattatatgagtaatcttttcataactattaattatgcacaactgtggactaaacgtatgtttttacatacacatatttaaatatgttttacaaacgttttaaatatttcatttcacttttttttttaaaaaaatcatttcatattgggtatgattctcctaatattagcatttatttatttatttttaatattttttctcataaaaaagtctcacttagtttttttttgtttttttttaattattaattttatatattttttattttttattttttaaaaaatattacgagtttaatatggaaatattttggtaaaacattttaaaaaaataaaagaattaaggaatcaaatagaaattttatgaatttattaaggaataaaaataattaattattaataataatttcatttcagcatttgagttcacaaatttttattatataataaatacctttctcacaaaaggacataaaaggataatgcgtatgatttttatcactttattttaaatcataaatgagataaaatatatttcaacatccattatctgcttcttattcaaattgggacatagttttttttttacggtaaaattgggacatagttaaagtgtgacatttttatgtataataataatagtaatagtaaaataaataattttcaaaagagaatgtgaatttcttttttattattgtattcatgtgaatcatttgaggattgaatgcttcacaatagatagttctgttcctcttttctttccatttcaatccactgcaaaatgtgacatacatttatcatgactcagtgaggttataagataaaggaagtatttaccaagagttttgattttggaataccttgaacagtataaacaatgcgttgacattttttttcctcccgctcttcttgaggtgtctaagtactaaccttgaaatatttttcttttcaaaaaaggaaaggaagaactttctctttcttggtgttggtcatcatacgtgcaactttctgtgttcgactgttgtgctaaaaactgtcatttaaactcagatgcttcgactaattatcatgttcataaggaagtcaagtcaacttttcccgaggatagaatgcagtcgcattcctatttcgtcagctcattctttctcattatattcattgaccgagggaagcttaattcctgaaattctcttgaaaaaaagctgtaccgtagcttggttgggttaatatccaaaatatatatggaattagaacggtttttccatcgtgaaatgtcctttccagtttccacgacaaaagtgtacttgtgttaagcttgttaaagtgctttatacggttcttaccaaaaaaggaaatgcttaagacggcttgtttttttaatttttactagaaagatataccctattgttcgggtcttgacgcatcctttctacaatttgggatacatataaacatattagtagatatgtttttgttattttgtttgaaagtgagaatgctacagttgctagggggaattgatacaaggacattgatgtattcaacattctgtgttttacacattccgattcgaagcatgtatatcacttaatttggaaatatctaataaaggctcacccgattttaaggtgaatcgtagttgagggtgaagagagtaaaataggatgaaaaaagaaaaagtaaagaaagtgatagctataaattatgtgacaaaaaagacgataataagatggaatagtaggaatccatccattttgtgaaattatcattggatgaaattctgaccctttaataaattttattaatataatatatttttattatagagtagagatttaaaagaattgacagagattttaacacttgagaatctcaaatttgttttttcactttagaggatttttatagcaagagtactttaattgtttggttgaacatcattcaataagaggtgcatccgaacgcacttatatcgatccgaccatcaaacttgtcgtcccaggaattactagtaacctagctagtatgtattgcccattagccccatattagattgtcgagataatgatctcactgggtgatgagatcttcggccatgctgtctacatgtcttttgtatggggccataaaatttgtggtgcctaccctacctgcatatatctatgacaaaaatcagtggtttattggaattccctggtcaccatgtatagcttttacgggtgaccattccttttgaaagtttgatttcacgtatctggctacggcaatttaataatgcgaactccctttgccttcattaggagagaaaaaattgatagccctgcaaatctttctgttaattattactacttttgtcgtttttccctgaaccagtggacctttttcgccctttttgtcacatgtaatatgttttttttttgttaaacatgtaatatgtatttctcaaaaaaaaaaaaatgtaatatggtttgttatcgtggttttcgggttcgttgttttgttaagattctaattttatttctcttggattagtatagctctaatatttacactagcttagtataagacaatgttgcattaagtattaaaaactaatatcgtttggcggtcggtttcacttattatgatgaacattggttgagtcttcccctagaaaaaaagatatttgttcctggaggctcttcctttctggaacatgctcacctttttgttggatatacatgcatttttaataatatgtctgatttgatatgactatatataattcactttttgtttatctgaaatacaaattcattcatacttttatataaaaaaggtacagacttaaattaaatgtgcatgttggtaactatttattggtcggtgtacatagttcccgttatgcttgtgacatcttcctgaccttatcgtggaacgtgtctcccctcaaaacaattcttgttacagctagttaagatatttgagtctttttttttttttttttaccaatcagatatttgagtcttatgcagttatattgcacgttaaaatattaattaacaagtaattgccaaaatttcaaggtttatttttaataaaagaataatatagttgaataaactagttaaattggttaaagatttacaactgcaaaaaacaaaaatatttaatttataggattttgaacatttttaaagtttttattattttgtaattcaagtttgtacttaaaattattgaatttgcatatttaatttctcttgtttcaaattctttagccatccacggaccacggtttctactcatttaaattttctcgtaacacataattctgtcgtagttttgttattagaaaaaagtacaagaatgctgagaaaaggacaggggaaaaaattgttaagtttatatttctagtatatacaaaccaacatagtggaatatgattaataaataactttctctagctcaaacatataattagaagttcaaattcatatatgtgttaattgaaattggttaataccatttttaataagttttataaatagagcaccacttttgtttgcacattattcaatcaattatataatgtttttctgtgatacttctttactttgatttttatggtgtatgcatggtcacatattgatgttacatgtatctttccctaaaattttgtcaaagattatttttaaccttcagccggagtatactcttcatatacccaaaaatatttataaaacccttttaaaattccgctttgacggatactatgtttatgtaccattggtgattattagtattaactgacgtatgtcagtcgtttttcatgtgctggcatgacttgttggtaaatagtagtaacgtagtaacagttttaatttattatatttagtttattaaaagaaaattagaatatatatttttctttgttctaagattttggtatgtcaaaaaaagagggaggaggtttgacgtattctttttctttttaataaataaaaacccctacaggaacctgaaattcattttgggtctgtttaataagcaaagaagaggtaagaaatagagtgaatgttaataggaaagagagaaagagatgaataatataggtaagaaataaagtgaattttgaggggtttggtttaagaaaaagaaaaataatgaaagaaaaaatacaaaagagaaaaaaaatccttttgtgaaaatcgattattatatgcttggggctgttttaaacatcttgtaaattttttatttgtgatgtgtaatttatgatggttttgacctgaaaaaaaatcataaaatatgtaatatgtgtttccccttatccattattgtgcatttcaatacacctttttatatttctttccacttattttcatacaaccaatctcaccttttcatttttcatctatttcttttctttctttcctattttttcacaattctcactttaccaaacaaaaaatataacaacataaagtgaatattaacttttttttctagaattttatttggtgtagatcagtcatattgagatttgaccctataaattcatgtatactatcacaatccttcccgcactagcccaacctagtagatatcttgaatttagtttagatgtttggaagtctatatttttttaaataactattttataacattattattatgtaggataaatttattaatttttataataattattttaaagtcatcttaaatatgatttttaattaattaataataaaaaatatttacatagaaatacatgtcaattaagcttttaacaaaaattaatcagcactatcgacataaattatttcagatcaatatcataataaaaaaatatcaattaagcttttttttctagttaatggagaataagtttgtttaataaacccatagaattttattgcacaatcacagtctaaatacatttttttattaatatatgaataattataattgtactttcttttccactttatttttttttcatctattttcttttttctgtcacatcattattacatttgacattttctctctttatcctcttctctccccaactctcttctttcctcctcaatcaatcccaaacattccattttggggtggataataatcaataccctaacttaatcatcatctaagaaaaaaatcatcctattttttttacagataaggaaaatgattttacatttctgaaaatgaagatactgtattttaaaaaataataataattatctactaaaaaaagtacaataacatatcattaatattttcttttaaaaaaatattattaattaaaaaataataattaaaattgtcattaatgttcattaacttgcaagtgtgagtgtgatttattctttaaagaggatataaaaaaggccagaatacacgtaagtgtgatggggttggaggttaaggggttggttctaggatcattttcacggtgaggaatttatccatttttccgagtgaagtattttctttctgtttgttgggtaatttatctacttttctgagtaaaatattttctttctgttttcaacacaatcttgggtgtcacctgcatggccgtgaggctatatgtgccttataaagcttacacgaggattataccactttctcttttatttcttctctcactttgttatttctttaccatttgattctgcagattgcccactctctacgtacccgcattgtctgacttataagccctttgcccctaagtaacccagctggaaattgacacactaagccagaattgtctgtttgctttcagcgtccgctgatttccgaggcgtctccttagctggccttttgaacttgttcctgtaattttcactattctattaagttttcgcatcagatggacagctcttacttctcgacttttttcgatatactactaccattcgggcaatatatttgttttttttttttttatcaaaaaaactacacggtatttcgacatcctcctctgttcccatttctctgctttgtttgtattccatttccatgaatgtaccaaccccagagattccggtaattcccatttgcatatataaactagtgaatgtgaaaataatttccaactcaacaggccaccctgttgaccccttcttgttgccttctgtaatttcgtgaattctgttttctccttatagtctataattcattttaattttcagtaattagattcttaatttctttcactactgttatacttttattagaggctgaattggggatgttttgtcattttgatatttgcaaacaaaatgcaggggaggaagtttggctacttactacgatattgata

SEQ ID NO: 2817 - DNA, 7712 bp, Glycine max
  Intron number 1 from transcript Glyma13g23300.1 (locus Gly ma13g23300) derived from phytozome v7.0 (chr-ID Gm13; pos 26722482 to 26730193 reverse strand)
caaagaaaccggtaccgacataaaagaattttattagttaactgagggatgtttgatttgattgttttcagttgaaaccagaaatttcattttggataaaattaaaacacggtggtaaagaatataattttaaatatatctaaaaatacattttattttaaaaacgcattttcaatgtttttatttcttgatagcataaaataagaagtcacactaaacatgttttcaaaattttaatattttgaaaatgaaaataattttcagaaaatgaaaacagaaaatgaaaacaaaaaatgaaaatcaaacacaccctaaattttttttccttgaggattgagttggttctgcttttaattttttactttttctctttggactctcttaccaatagaaagacaaaatatttgagctcaatcattctattgtgttgcaacgtgagtcatggcgggacaacgaaataaaattagataaattgtttcttgaaaaaatagaaaaactttatgagtcgccaccaacgtttatttaaagaaaatgttggaaaaacaaaaaaagataagatatgatctacggtttgagaaaaaaaaggattcaggagtaaggtcatgaagacaacaatctttaattaagtgtgttaaaaataaagtgattttttaattatcatcttctcttgaaaacatgaattatgtttatttatttaggaaaaaatgaaaacaattttttttagaaaaaaagaagaaattttatggtttttttagttgttttttttgttttttaggttgacaaaaaggaaatcaaacttacgtaattctttatagaaaaaaagtttgtgtgttggattgattttattttattttattatttttttgaaagatttggattttgtaataaactttgtgaattcaagcaagtcggagaccagcatgacattcacaaaatttactcacactttattgaaacaccgccaagtcagagcccaacatggcattcataaaatttactcacactttattgaaataccgccaagcaagtcgaagacccagaatggagtgtgtggaacttgaaaaaaggggaattgagtgatcatttatttgagaattttaccttctttagaaaagactttaattttgtggtaaactttgtgaagtcaattaagtcggagacccatgatcacattcacaaaatttactcacacgttattgaaacacctcaaacaagccgaagacccagcatggggtgcacaaaatgtaagtgggtactaaaaaatactaatgcaaatttgcaaaaataaataaataattggcatagtgatacaaaatcaaataaatagaatgagaatagaaaataatataacagaagtggggagtacacttagtaattaaggatgcgagattaaaatatggggaaaataagatgaataacgaaatatttataatttcaatacattattaattaaactaactaactagacaagataaaaggaaaatcacattcaaggataaaataaataatagagacaataaagaaataaataaaataaagaattatccactaatatttataattatttttactttccattttttttgtttctcttttgtctttttttgtcaaagtcaaagggttgactttgacttagtcaacactaacggagtgttgacatggcgggtctggtcaccaacctaagtgacaaggatgcatatacaaagaagggggtataaccatagtatttattttatttcaaacttcacaaaaacagactagacccaaaatgaaaaaggatgcatgtagtaaaaaagggggtgtatataatggtttttattttatttaatgagctaggcccaaaagaaaaaaggtgtatatgttaaatgaaaggggtgtacataacgatttttattttatttcagactaaaaaagaaagagactaagcccaaaagaaaaggaggtgtatatgttaaaaaaaaaggtgtacataacaatgttctttttcgggctagggtagaaactgggtcaggacaacccatctcaactcataattagacaacagggttggaaaaccctaggtattctagactccaaactacgtggaaggaggagcaccttcgcaaagggtggcacgcctccttggcatcatcggtacatgccccagttgcgtgaggccgccacgaggtgacgacggtagcgcgacagaggcactgcgaaagcggcatgaggcttcaccaaaaaatggaaaaagaaggaagaaaaagaggaaaagaagaaaatgataatggaatgcggaaaaaaaatcatgaaacaaaataaagcaccaaaaaaaaattgacgatctcagcatgtacagatcttgggggcgaccatggagcttaccaacgagacaaatgacgaagctacagacttaaaacaaaagaaaaaagaagagaagaatgtacaagaagaaaaagaagaagggaggaagggggagaagagggaagaacttgagagagtgaaggaatgagggaattacctgaagacccctctcccttctttgataaagcttgtcaaatgacgctgctggattggtctttttcttcttcttgtgatccgtgtcccctatgtatcattaatgcaaatactttcctccttttctcttatatgcaacgtgctcttctttttaagctaatgggcttttcatgagagcccaataaatcacacaattttttttgtttgttttttcgttttttttatgtcttttctttctttttttatgctgttcttttgtttttctttttttttttcttattatttttttcattgttttaattttcttatttttttattaacatatgttttttttgcgattctcagacaaaattaggatctcacagttattttcctttttgtgacaattttttggaagaataggaacaagtttattcctgacatcatattaatctctgaaagtattttaggtagtggtgttgtttttctcgagtttattcttcttctttttttccttgtaaagatggaaagtgggagatgagaatacattatctttttaacaaaggatcctttgcagatgataggattctagttgtaggtcatgctataagttctagatatcttgaaattcttcaattttgcattactaattattaatagttttctttttattgcaatggaattttgatgaattatgcatcccaggttatgctcgctggattggctgatacatggcctgccaggcgtaaatggacaactgataaactgttgctaaactatggagatgtagcatttaaaatttctcaaaagagttcgcggaagatctccataaagttcaaggattatgtctctgacatgaaagtttagcatgatggagatcccttgtatatttttgatgaaaaggtgcttgttttgagatatttatgtttcaataatactttgctccacctcccggcactatttccattcctatttcttgttctgcagaatttgagagtttgggagttattttaactttttttagaactcatacagtttggcgaaactgcacctagcttattgaaggattattgtgtgcctcatctttttcaagaagacttctttgatatcttagatacagataaacgaccatcctataggtggctcataattggaccagagagatctggtgcctcttggtatgttgatccagctcttaccagtgcatggaattctcttctttgtggccgtaaaaggtaaagatataagcttcttgacatgcaaaatttgcctccattttggctgtgtagcttgtagcctagactgttactatttacatggtgtttgaggaagctatatgtatagtgtgtttccattttgagtttaatccttgaaaacaattagttggttcctccagcttattactattctttcgttttgttttttggagttagggggataggaataaggaaaggtggattaaatgtgagtgtttagacttgttagggattaaactaggcatacttttttcctgaggaaactaggtgccattaggctgcaaggccattggttttcagtttattattgctattaatattactttctattcgctattaatgcacaacaacccaatggttggtctatacaaagatgtttggtttacaagtttcacatttttgaatcatagtagtcaacagcatgctacagtggggtggagtggcccttgcctgtacacgcttcaaaaacccattttattcctgaaagtctgaaacaatgttgtttagaggtttttttgggcaaaattgtgatgtcttcccctttttctaatgcatttcttttttaattcagaaacataataggatttgaaacccttctttcttgaccattccacaaaaaagctactccagttttgacctttgtttcttcacactttacaggatatgtttttccttgtgttcccagttcacattctactaatttttatctaatttgttaagttctttttctattaatttcactatcatttttttggcttcattagcatgttcttatagctcctagattgatgatagtgactgtgtgtgtaaactgtgatttatttatcactaacttcaactcttttttttgagtatttatatcattatatgtgtattataattatttagtttgtaactttgtattataatatttaaaatactggtcactccacttcccactatagtgttttcaaagttagcccctacatgtgggtatctgggattgataattatgttctgaattttaatgcaacttaaactataattcaatgctttctgaactaatgctacttgacagaattttctctctagaatttataaatttagtagcactgagatagtatgtgagaaataagatttgtcacttttagacttagcgtgctatatgtaagctaatattttgctagtactaggttcttaaaaatttacatagacaaaggttgagccggagtcttaaaaacaggaaacctatatccactaaagacatttcggtttttttaatcttatgggtcttacatgcagtagtaggtgccaaatcaaaattaagctttgctgaaaagtgagctaaaattaattctaaaaaggatagtttttcttgacaatctttttatattaattggataaaaaatgagaatcatagtttctcactttaaaatttttaaaaaaataaaaactttttgtcaatcaaacacatcttaaggtcactctttacaattgaatggtggttctaatgaatgaatccaaaatttactgtcataattagtgatgttgaatgaaatcaacttaggaactagataggaaatttaaccaaaaatcatttttttgacaaattatgactgatgaatgagatgggattataaaaactcatgagatggaattataaagttaatttggtgatgaaagaagatgaagagagaagaagtggtggttccaatttttttttgaacaaaaaaataacaactaatgttttttaatggaaaaaatgtgacaaatgatattggagggaggaaaagacgtagccatcacacaggaacaaagtcgagattagtccgttctgatttaattttttattttaaaaataaaaagttaatataatttttaaaataaaatataaatgaatatctcacactaatccaattcaatgattatgaatttaaaaaataattatgacgtagaactatgcacatttttctatattaaaatattaataaaaaatataccttaacaacttttaacttttaaaagaaaagtgcaccctttaaactttaaaaaagggataaaatatggttttagcctcttaattattcaagatttttgtgttaattcctcaactaaatattgactagttttagttgttaaattatttttctattcggattttgattttcatccctcaattaaatgtgtactgtgtaagtattttttttcatttccgacaacacaactaaattatgattctattatattacaaaaattgctccacatcggaagggttatcataaaattgaaaaaaatgatatcacaattccgttgcgttcccaaaaactaagaaaaaaacttgcatgggggagggatttgtgagggaagaagggaaagagaaaaagaagaaaaaaggaagaaaggatggagtggccgtcaatataggatgaaagaaaagaaagaaaaggtatttggatcttttacatatattggtaggggctaaaactaagaaaaaaacttgcatgcggaagggatttgtgagggaagaagggaaagagaaaaagaagaaaaaaggaagaaaggatggagtggccatcaatataggatgaaaggaaagaaagaaaaggtatttgaatcttttgcatatattggtaggggctaaaactaagaaaaaaacttgcatgggggagggatttgtgagggaagaagggaaagagaaaaagaagaaaaaaggaagaaaggatggagtggccatcaatataggatgaaaggaaagaaagaaaaggtatttggatcttttgcatatattggtaggggctaataataaatttggagggaccaatatcaatttcctatttcctagaaatccctgatctttgggccttctctgaaaataaaaacaattgaaattctttaaaaaaatatgtattttatttgcatatttttttttatttttcatattattaatctgtcatgtcgtatttttttttacatttaaggattaaattcaagtttttcatgtttgaggaatcgatctatcttcaggatcatcctaaaaaaataaattctactcaccactttattcaaattattttctaaagaaaatagacataaaattactaatttcacactcatcaactcaacatctataaattagagaagccaaacgtatatcttctttctttttttctttctgttgctctaattaaatcatattaatttggatgttgaagtatgttcatgcggaaatatgcctctcaaccacttaaaacacgattgatccacgccaccacaaagaaccaccgatctttatagttatacaaaaacgaagcatcctaaaatcaccatacacatctcatggaacggactagtatttgcccaaaaagccaagaaacgaaactaaacattgcagacactcagacttttcggtacttccacaaaaataacaaatagtttgaaaggaaggtgcatctcacaaacaccataatataaggaagctcaagacttttgttcccatgccaattggtacacgcgttctcttcaccaaatttaagaaaaagattgtattttaaaaaatcggcaagaaccttaaaacaactataaccgttacattaatttcctcaaaaatacatttatcacaaattgtaatttatttatttactttttacctttattgagaagtcatggcacgtttttgcaagtaggctaaaatggttcgtcgttcgtccacagtgacgacacactttatttctgttctgactctgaaactgattgattctgacggttcttcttcttcattttgtgaagccaagttgagtttttgttattgttgactttggacacaagtgagggaaataatgttgcgagtgaagggagggaagagaccaccttgggtgggacttggagctgcagtgtgggttcagattgcttcaggaaatggctactgtttccctctttattctcattccttgaaatccgttttgggtttcaaccagagccagattaccctgcttggtgttgcca

SEQ ID NO: 2818 - DNA, 9546 bp, Glycine max
  Intron number 1 from transcript Glyma07g28310.1 (locus Gly ma07g28310) derived from phytozome v7.0 (chr-ID Gm07; pos 32379894 to 32389439)
aacacaggcaagtttaatattgcttatatattttgaaaaaacctgtatatgctagtagaggttacatttaaatggttattctttaaatctcaggtttatgatgcttaaacatttttgtgtgtggatagttctagttgtatctagttgtggactctgtatcctatcctatgcattttgaagtctgaacatcatgatatattctgagtctatacacctcaaaaaatttgtttgcagcttttcgtaaatctctctctctcttttttgtcatttatctgtactagttaataagatggcattgcatccaatactccttaaactggtaacagttttaggtgaggatgaagtgataaaaaccagaggaggagaaaagggaatctcgatgttgaactgagttttgattcagttttgcactctgctagttccatctcaacaggcattatgattattaacaattatttcctatgttatcaagatcgagaaactacttagcaacaagaggagggttgcaagattgtaaaatgtaggattgtaagatcttacccaaattgtaaaattacactaataaacacagagagagagagagagagagagagagagagaaacccctctataaataacaacattaagtcaaacataaaactggaatttcctaaccataacattcaaaacaactcataattagtcgcatatataaccaccagcccctgccccactatcaacttgcccagcagaagccttttttcagtgattactaaacaaagacaacaccaaaacaaacttggaagcataccagattttggcctagctgaccaaagcactaaactggcaccagagatggggaagctgtgtgaggatgcccattgaatcagcaagacagcaaaagagagggttgagactcaagagatatcagaaggatggttcaagacagcaaggtcaatgtgtgtgagcgatggcgtagatgaatggtggtgcagaactagatgtgaatgagatgctgtgacctgtgaagggcttgggcacatatgcaaaaggcatgaatgagagatgggatctgttttgttaagcaaaagccactatttagggaaccaaaatgggttaaaatccttgtttatgtgaaccaggttacacaatccggccccaaaatctctaatttgaggattgacaaactcacacaatctcatgatctcacgttcgggacagggcatcaggattgcaagatcgtgtgatcttaccatctagatcctgattttaacagcattggttatttcctttgatgtggtctcttgttgtatcattgtctatatttgtaatatgttgctgcaatacttcatgacaggccattttccatatttgtatcagttatcgtagcgataatttagagtagttatgcctcaaacgtgtctgttctgttgtctgcattgtgttatgttaaattcttaatagcaagcctttcaatttccgactatgctattcttttctttttctattctacactttcctttaccaggacacagaacctaaactgctgaatgagagagtataattattttaatcttcagtgcaacatctttgaagacataaacctataaaagtgaaaacttataatttgaatttaaggatgttccatgaaagtagttctttactgctgcactgatttatgctatttggttcttatttccttcttgatgtatactctgtacttatcttcgttggatgacataaatcatatgtttggatcatgccaatttgttgggcttataacagtttgtcttttatcatagcttcaagaaattattgtttcatctagcaagaagcttacatgttacatcttttacagaaatgctcctacaatcttccatttaacaattgtagtctagatttaacattaatcttatggtcctatcaacagctaattaactacattagagcataagcgggtatgagatcttaaaactgtaaaaggatttgacacttatgcccttgttttgtcaaacttcaactgtgagtagtatcctgcatctgtagatggcaatgagcagtatacgcagattagggttctgttaggcaatggggaaagatagcttaggactcagttgatctatggcttgcaaagtgtattatgttgggattttatttgattttgttcatactagactggaccattttttcgtagtaccttttcataattaagtgctcaagttacagttgtgtatcattagtttatatttgtgggcatgattttgagatgtgtactagaaagaatagattgaccatgagaagaaacatttaggtggccagttaaaccttaaataaattgggttgagttgcaggctgatagaaattggataataatgactgaattttatagaaacactctacaggaattattctttccaaaacagagacagaattacaacaattagaatcagaatattcactcaaacaagccaagatttcgagaacttggttctctccctcccaaggtctaaaccacacatcttcaggataaccagaatatgattctgtttttccttcttattctacacatacccataactgcctaattaaaataactgttcctaataaactggtcctaataatagtaactgctgtcctattaaaactaactgctaactattcctaataaactgctcctaataatagtaactgctgtcctattaaaactaactgctattgacagcacataacaattattttgccccccttctcttataaacattctttttaagaggtctaacacaggcttctctgaaatagaaaaaaattgactaatacggtccctcaagtctttcctaagacaatacatttaaaaacaaaaaggaatttgggctacctgggattattaatatcacacaatagtgggtcagatggccctgggccgatactggaaagccatcaaagagcattttcttggtcatgactgtagtggcagaaatagcaagcaaaattgtggcaaatagaacactgcagtggcactatgccaattggaatcaaaaccccccttttgtccctgttacactgtcgattttgggggtaaaaatgaggattttactcccttcaataaaggccataagggaaagctaggacttcagctcttctctaaccttccatcttgaagagggggggggggggggggtattgatagatgggggaaaggtgtatgttagctgtcagttagttaggataactaactgttagatagttagaactaactgttagttagttaagaaactataaatagtgaattagagggaagttagaatgggggagtaggaagtggagggtggtgagacctcgaaactcactttgtattctgtcttgggtgttggaagcaccaccataataatacaatcttttcctctgtttctggtcctgttctatcagtcactcaaactactgagaagcctactgtaatcattcttgatctgttcctaagtctgtttcacgttgggtcttgggattagggttaaaatcattctttctttcgattttggtactggtttctatcattgatgcaatgtaaatgagactgatgctgggatacttgcatagtcttggagtgtattttggggctcttctggactttgagataaaagataaatcatatagtgaagggcccatttccggataaggagttcttcctcaatctttaatttagcttggtgtttgtgttttttgtacttgttcacaaattcatagatcttgatttaagcttttcttttattgagtgatattgtgtatttaattggtacatactcatattactattttttttcttttttatattgctaaatgtttcattgctataaaagtattagacacattttggatgtttttatacttttaaagaaaaagaaaaaaatggtcaacaaccaactcatcttcttagatcaagaatttatgtgattaattaactcattcttgtgtgctagagaaatcgaatccaatcggatacttcattattagtttttttgtagattttctcaaggtaagaaaatattacacaggtaatagggatatcctaacctaagatttcttaataggtagaatgcaaaactatttcccttgagccaaaattgttgatagagtttgtgtctggtagaatgcttttgaaataaagatcttctagtgagcttcagcagtgttggtcactttacttcccgtgtgcatggcaattatttgtctgttcctataattatggcactgttttgctccttggttcatgccatattgaacagagcttatatgaatgacaaaataagatttatgctttatcatttaatggattggatgggactgggacaaaggagaaaggagtagaaacaataaaatatttttaaaaccatgattatgaaaagacaactgtattttatgtctgggcaccagcaagtaattattaagtcaaccaagaaaaatgagcataagaattcctgattttgttgctgatacaattactgggttagaataacaatgattggtattgacattggaaacaaatttgcaagattcttatggagtttttttcacatcactgagatcaaactggctttgtcatatcaccataaacaatctattgagtgtaaatttttggtccttgttgcatgtttctattttccagtcaggatgtggtgtatctcttctaggtaccttttagggcatgaccttttttagctgatatggtctttctatccaatgctccattctgcacgtgtgactatataaatgtgcattcatgtttgggagatgccatacttgtatgtgtttgatttattatcatgttggaaactgaatacaataaacaataaattcttggtattattgggtagctatgccatggtgtttgtcatcttcatctgcttgtttttagcttattgctttgttattttaactctttgggaggtgaaattatataatgttatttctaaaaatcttccatcattcttttagattccttctgatctgagatagttcagccctgcctgatgtgggaaggtcttttggtttatcattgagatgcttttgtcatttggtgaatcttttgtctattgaatggctaagctcttcaagtgcatgtatcaaatgcacacttgtgttagtaggatttgagggacgagggcttgctaaacatattgtattttgttaaaataggagaaactgagagatgtttgtgtgaaaaccatgtgtcagagtacacagcggatgctttattatatagtggtcattacaataaataatgatgatgagacgatatttagtttcctttaaatcaggtatgtttcctataaatcagatcctaataaatctatacattaaatatttctgattctcaacatatttaattggaatattgaaaatttatgattttggatctaatttgggtaaaaggaagatagtttgattgctccagtttcaaatttgtttgtcagtgttcaaagatgtagcttccatgttgcgttttattttcttcttattaactcttctttcctttgtttttgattaaagttgtgttgtaagtcatggtttatttccttgtactttttgaaatcaaggatacatcttgtgagcagggtttgtgttaaagattttttacgtgtatcaagtctttctttccatgatattttttccttttagttttgatggttaaactttaaactgttaaagtcaaagaatagtaaattcatatgtttgtcaggataaaggactagcatgctaacaaattttgcaacattatccacaagcaagtaattctattcaagctggttttatattcaaggattagggtgatgcttagaccttgtcctatttattttctgtttaagaaaaagcaggattactttttgtgtgttttaaggacagtctggggcataggggaggtcccatcattggggtgagacctatgagatcctccacaaggaggcccaagggagggggaaagggggttggagtatctgcatcaggattgaacctctgagtacatcagaaacaccatatgccactccactaagccaaaggctcttttggtagtgaagtcaatgtttatcccttttttgttgtccagtttatgtttagggtttcaagatccgttataacacactgacaaatgtcgtaagttcatgtttctcagtgtactatgtataacctgagtctcacattggactttctgtgccagctcttttgcaaccctaggtaacttctgttccacagctgtggttggtaagaaattgtgcttatgttgatcctatagtgaatgaagttacagaccttgtaaaataaaatcctttataggttaaattttgggttaattgtacttatgaaccttaagagtggctaattcatggaaattgccttaattatttctctgttttttttggcacatttccttaagaccccattgtttgttttggattttactataaatgtagcacataagcaaaatagattttcttttaacttcaaataagatctgatagagatggtcttggtgctatttcaagccttacatgctttaagtttgtattggacaagcatttgtttgttgtataaacaattttgttattgttaaatccaagattaggatactattatatatctccggagaaaagtagtacaagattcttaaatgaactgttctgctgctgctgccgctgctgccattacatttctggttctttaaaagccacatgtgtgataatatttggtcatattggtagcagctaaatcacaaatctgattgctgtcatcattttgcttttgtgtaagtatatttgatattaggcctacatttgtgtctatagtttaattttgttattcacaattgcttgagttctataagattctgactttgacatataaaattgttcgaaaagggaatctaggattccagagttgggacttattccttagattcttctgattacttagggttaaaaaaactgacaattttcctttcttttgctggctttgagcatctgatttttccaaagtatgctaaaaagttttggtcacttaattttagttggtgttttaagtcacttaaagttatccttcttgtgctcattaaattgttaatgaggttgctatcattcttttgaggtttcaatctaatgccagaaaaagaaagatccactgaaatctcccttcacaaagatcaaagcaatcttatttttttttaagtagaacgattatgttatgacttatgatgtgtttttatattgttgtagctaagttcactactaggcatggaactttaattattactccaggcactatccgttgattgtcctcaaactcagcctctgtttcccttttattgccttatttaaatctatagagcaagttgcgtttatttctcattaaattctcaaatcaaacaatgacttggggatgtttttctaacattaaattagactccattaaggatacgctgtgcaattttagaaaagtatccttatgtcacaatttgattcaagaacttaggcaataatataataaacttgatataagtttttgtcagcatgtgtgtattttgtgtcttattattgtgatgtattgtttttattgtattgtagctaagctcttgagtaggtttggaactttggttattacttattagtcctggcactatctctttattctctttcaacttagcttctgtttcccgtttcttgctggttgccttatgtcaaatctaaagcttgtggcactctttctgcacattctatatccctgcttcatatggcatacttatagacttttaaaatggtcacatagcaaaatctctctgttcatccagcaagtatgttctgaattgtttatcacaattcaatgatatattcttacccctttcaaatttatgcctgacatatcattcctctctattcctcaaaataattccacatgtgaatgtgctaacccagtttctctacactagccagggaatgaactgctgactaagtttccttcctgccaagaactatgtatttttttttatctgatattacctggaaaacgaaaacaaaagaaagaaatatgatcgggaattccagggtgaagctggagattgataggtaatccctatagttagttacatagtggaaaacttagatagtttgggccccgtttggggtggtttttgatttttcgttttaaaatttgtataaactaaaactagttttcagtttataatttgtagttttgtttctaattttcaaaaatctgttttgaatcttcagaaaaataaaatgtttattagaaaaaaatgtgacgccgagagaaaagagagaacggagaatggtaaactcataatcaatgacaatgcaaaagagagaaccaataacagatctgacggaggcacgagagaaaccacggtccacggtgtcaagttcggtggcgccactggtgaggagcatgttgagcggattcgacttgctggcgggcacgagtgcctactgctgcccctccttggccggcacgacggtgtcggggatgtacaacttctttcgaagggccttgcggtgggaaccacctctgtagtcgctggaagagatgagaggatcgtgcaggatcaaggcgctgccgtacatggtggcggcggtcgcggcaacggtgtctagttttctgagagagattgagagtcgtcaagagagagagagagagagggatggggggagggggagagagagagtaggtccctgtggggaaggggactgagatctaaaactaacaaccgaactcaataaatcaatttttattgttttttaaataagggtaaaactgttttgaaaacaagtaaaaaactaactcggtctcaattttgctgaatatgttttcgttttgaaaaggcatttgaaattgaaaatcagaaactcaaccacgccaaacggggccttagttagttggaagcagagataattagaaaaacaaggaatgttgcctataaataagaaaaggggtcgagagggagattttatcttgtgatttgtgagggaattcagatttttgtgttgtgggagagtccagcaggcctctcaaatgtcctgcgaatcacttgtactctcgttaatagaagctttcctttctttctgattcagttccaatcagattaatcctggagtttacatactgtgctgtcagcgtgacatgaggttttcttctgaaacctagagcacttacaatggtgctatgtgttgccttggattacaagtttagaacaggacatttgtaacatttatcaagtgaggttaaacaagcagcaaagctgttactactggtacctctactattcataagctagctgctgactttaatacatgctgtggactgatgctatattgaatttcttcagtactgagttacaatctgaggatcagtgattacaacagtgtgtggattttacagttttattggtactgctattgaatgcttctcttttttggatatcaaatagatgcatccgtatgctaagcttatttcgttttaaaatttcaaattggttgaacaggttatttcttctgggcttggataagt

SEQ ID NO: 2819 - DNA, 1252 bp, Glycine max
  Intron number 2 from transcript Glyma19g41160.1 (locus Gly ma19g41160) derived from phytozome v7.0 (chr-ID Gm19; pos 47475249 to 47476500)
gagagttcaatctattttaattccattcgggaagtgtaagttcatctgtcttttcaatatttggttgttgctgatgtttagtctgagttcctttttctttttcttttttttgttgttgttgttgtatattttggttttgatttgtgtgattaattgttacccgtgatatatgaattacatattgttattctacaccaattgtgacttccaaagcctcagaagtagttatcgtctttccattcagaaacccctttggagttttgctatatcgaactatctcatctggtaccctactctagatagagttcaaaatccaatttcattggatagaaaaatgtgtgtaatccttcaaatagattgatttatcattggagcatatctgaaaacatgttattggggtacttaaatttttaccttgttggtcagtaacttccaagagatatgggaaaaatgggtaaaggctgtttgtgattgcaaagtacctactaagctcaagggcaagctttattgtattgccatacagctattctctggtactgatggtaaatgttgggtttttaaagggataacaggaataaaggcgagcgtagcattagtgagaatgttaaaatgaatgtgtggccacacaaaaaaggaaatgataaaaaatgtttacatacaaggagatattggtgtaacactggctaaggtggtttgtacacatacaaagaagactactggaagcactagtgaggagagtagattggtcttgtgaaaagggggagagaatattgggagaagttaagagggatcttatggtaaataatacctctgaaaatttggtctttaagtgaactgaattacagtttgtgtttcatgtagccaacctcacctggtggctagtggtataataaggcttcttctttcgtcagtaatttccaaacaatgcttaagaaaagtaacattcttccattgttgatgggactgaggtgttataggtggttgccaccactgctgcaggctgctgcagtgcttacatatgcagtcacaagagtgggaaggcaataccccctcccccattttttctatttagtgtggttttattctcttgtacattcttcagtgtactagcctacaacattttagttttgaaatttaagttcaacttgcaaatttttgtggtccgttcaaaaattataatgaattttgctgatttatgtttattagactggtgcaatttcttaatggatttctcttgtctactgtttcagct

SEQ ID NO: 2820 - DNA, 5325 bp, Glycine max
  Intron number 4 from transcript Glyma05g28440.1 (locus Gly ma05g28440) derived from phytozome v7.0 (chr-ID Gm05; pos 34254470 to 34259794 reverse strand)
gaagaaggtatctaaaattagttattttattctatttttgaaactggttttgtttttccatttcttttaacataggaggaagttctaaaaaaatctgctagttaccaaaaaataaaagaaattctccaaaacaaataagactaattcaataaaatgagccaaaagctgggtgaaaggtttattgtcaatttgcaacaaatcatttgcattaatcatgttaagtaccactgtccaaacaaagggcttggcttttgaagagaggtttgaattttaaaatggatttatcaagttgaaacctaggttagggtgtgtgtatgaaattgaaagaaagctctgcaggagaaaatactggaatagtccatgatccaaactcttctatctaacttagttgagggagaaagagactcaagtaaaaagtttaaaaccaaaagggattgtagttcactatatcacccatattcaaatctctaagtaaattaaagtccctatgtaaataatgatcttagattcttagccttagattagaaatggctaatgagcaaacttcacaaagtagatagttgaaacatgcaggaaaagtctctgaaaaaggagcactccccatctcaacttcctctcaaaacttgacaaggataccattataccataccatgacctaaacattagaagtgtattcctgcaaaataatcttccaattccaaaatctaatatgagcagtgttgcttacttggttagcatcccacctgttttggtgggttgtacttgctctcatagttgtcaatatcggcgtagcggagcggtcgaccccaaaattgggatagcgggatagcggatagcgagatgaccgctattctaatgtttttttatatatgctaaataattaataatatgtatatatataagtgaaaaaacagaaaaataactgaaaacatagttacttaaacaaaagttacaaaacataaagtagaaagtcaagcaactaaagggcttaaagccttaatccctctaagctaaagcctaaagtaactataataatagacaagtagacattaaaattcaaatagacaaatgcaagtttcttaatactaaattactaatcagaatcttcatcctcttcaagatccaagtcattgtgttcttgaaatccatccctctcactagcattagaattgtactcttcttccccctcatctccattctcttctacttttaccattttttttcctttttcatttgtaggtgcaagtgcagctgctgtcttgtttatatgtgtttgactccttgtgttttggaaaggttcacttgccctagttgcctcagcaacatctaacccattcaaatcatcatcctcatcaaaaaccaaattagtaccagcttcttctccttccaattctcccaataaccactcattgctatcatcaatatcatttaaagcaataggatcaatcacatcatgacactcaaagtgatctagaagagcttggttatacctaacataaaccaagtcttgaagcttttggtgttcaagcctacttctcttctttgagtgaatctataataatttaaaaaacatgaatgttagttacttagtttcaatctcagcttctaatgtttcataatttaaaaaacatgaatgttagttacttacatgctcaaaggtactccaattacgctcacatcccgatgagctacaagtcaaacttagaactttaatggcaatggtttgcaagtgtggtgttttccctccatacaatttccaccactcagctgtaaaatgcaattcataatcatatgcattagcatttacacagattattaattaataattcaaatttgtaagtgaattttcccacttaccaagagatatttcaatccttgctttcattgctttagtcataccaaacctcactccagcccttttatacactagcaattgtttgtgaacttaaactacaaaatcatcatcttcgctaagtctatcaatacatttgtagaggccatccatcacttcattatcattgtcaatgtttggattggtgtaaaagaacttcggatttagataataacccgctgcatgtaaagggtggtgaagttggcaatcccatcttttatcaatgattgcaaagatatccttgtgtttccttccattgttattgaaagctctttgaattgcctctttggccctatccattgcttcataaatgaaacccattgcaggtttttttttcattatccaccaactctaacacacttacaagaggcccaatagcctttaaagtgtagacaacatcattccaaaatgatggcataaggacaacatcttttgcttgcttccccttggtctctttagctgccttagacttcaaccattcatccaaagtaaacatccttctaagattggccttttgcttatgcaatctttgcaaagttaagaaagtgtagcaaatcttgtaactctgtgtctcaccaattcagttttttgtgtgaatttcctcatggtgttcaaaaccaatgtatggttgtaaatgtagcctacaagcttgatgcctctttgtataaccctttttacttttgggatctttccaatatcttctagcatcaagtcaagacaatgtgcagcacatggagtccaaaatatttttggtctcgtgacttctaaaattttacctaaaaagaccaaaatcaataaacttgtatgagtagtgtaacaattaaaagttataactataaaaaaaaacttcattaagcatgattgaattctcgcccaccaacacataattacttccattgtccgtcaccacttgaataacattcttttctccaatctcctcaacaaagctatccaaaagctcaaagatcttctgaccagtcttcatgtattcagaagcatccgcactcctcacaaactgtgttcccaatgaacaatttaccaaaaagttaatcaaagttctattcttcctatccgttcaaccatctgacataattgaacatccatatttgattcgctcctcctcatgacccctcaataagcctttcgtgtattcgaactcttttttaaggagtggaactctcaattcatgatagcttggaagctttaaatgaggaccattgcttccaatcgcctcaatcatcaacttgaaactttttgatttaggaacattgaatgctattccattcctaaaaaagaaacgagcaatgtactgaactaccttgtttcttgcagccttgttataagactcttttacacttgtttgtctcatggtttttcctaatttgatactttcttcaggttctttggagaacaaaaaatcaagagggcctttttttatttgtgatcctcttattggaagcagttgaggaggctttcatttgatgttgttggacgcttttttccacttttaagtctgcaatctctaggatcccatcttcctcttgctcgtcttcttcttgcattgcctccatgtatgctgcagtttcagctattttcttctcataagcagcaatcatttctaatttaacatcctccagcactttcttacaaggacccacatctccttttatttgaagttgatgtctttttgctctagaaattcctccggtagacgttttgtgacaaaaatcacaggttacactcttcctattatttttatcctttaaactgtttcattttcaaaagacatctaccctatcacccgtaggcttgaacattccagacccctctgaatttaacattttgtaaggagactaaagcactgcaagcaaataaaaaattacattctctttcatgcactcaattatcacaaaagtccccccaaaaaaaataatttgtgattgtatgatagagagctcattttatcatctaacgtaaccaattaaatacaaaaaaagctcctgtcacattttatcatctaacgtaattaaaatgtataaaaattgaaaccaacaaaaattgaaaaaattaaacaaaagttcctatattcatcggaactaagtacaaaaagattaatgagtagtgtaacaattaaatacaaaaaaagttcctgtcattttaatttttttttatcacattaaatcctatcctacttatatttttttcatttttctgttctgttttatgaataaaaacaagtatctacattgtaaaggtcaaaatagcaaaccacctatcttatatggggagcaattaaattttctgtagaaacaaaaattaataagcatatttagataaatttcctgtgaaaggcttcaaacaaattaataaaaaaaatcactaaagcctacgcaggagtgcaggacgcacaaaacaatttaataagcatgtcacaaaaaaaaatcatataacatttttcaaaaaacaaataaaaagaatcacagtcagtgtcacacacaaaaattgctatcggggtcaacagctcatgtcttcctcacctcaagcaaggtggcggcgcagcgcagactcgtcatcggggccgccggacgcaggacgcaggtgtcggggtcgcagcttcgtgggatgtagactcgtcgtcgtcctcgcagcttcgccggtcgcagtggagactagggttttcgagtggtttggacggagagctggccaagtaatacaaaaagcaaaatgccaaaaataccctcactttcccacattaagtgaaggcatttttgaaatttccacggcgtcagtgtagcggcgcgaaaatccggtccagatcccgtgccgctccgccctaccctgctgcgatagcggccccgacgttgaaccgcgccgctacgaccctcttcgtcgtggatgggtgccgctccgctccgccgcgatagcagccgcgacgcccgctattaacaactatgcttgctcttatatgcttggtgagttgttgcctcttttggcattagtctccaaaggaaagcgccaaagtcatttaacctctgaaagcattgtttgtgtgttaagatgccaaattaccaacccctaatcccccttcattttaggcctatgacaaacctcccaagtcccaactaataaaatgttctcttctctgtttacccacagctgatcaatgttttgtgtctttgggtcaatctgaactcacattgcctgtctgatattgagaactggtgaaattagaaagtatgttatttctgtactcttttgtgccttctccaagatgttaattgttgtaaggttattgttacttggtagctaaaaacgttaaagaaataggtattgttttactgtcactaagattttatttgatttgtgcattctgtgttttcttggattttgagtaattaaatcatcatgtttttggtctgaattgcagcctggtt

SEQ ID NO: 2821 - DNA, 1305 bp, Glycine max
  Intron number 3 from transcript Glyma16g17830.1 (locus Gly ma16g17830) derived from phytozome v7.0 (chr-ID Gm16; pos 19545823 to 19547127)
gaactgacgctatccttcaggtaattttttaacatttagttaattaattacagtactaattaattaattaattaattaatggaaaaagtatactacttaataaagattttaggtaggatcttgttaagcaggtattgttgattaaaaaattaaaagaaattgtataaattataagaggttggaaaaatgatcatgatacttttgagttatttaatcaatgtattcagagaaacactaattaacttttgtcaagattttatagctgtaataaaaataattaaaatttttatagttttcttttggtagataaagattttatagtttgacattgatggcgtgtataaaatggattttgaaatttgactcttggatccgtaactgttttaattacgaagaattttgttggttgtaataattttatgcgcataaaataatagttttatttgactctaataatatctctttattatttactaaaaaagagatttaatagttttaaatattttctaaggaattagtgaacaaaaggtttttttttaatcatttatttaacttttaatctcttagtaatactccatcgaaagataatgattagcaaaatcgattcatgaattcagcgcgactttgaaaactttaatggggcgtttaagagtgcggcggattggcgcggtgctctttgttttttttttttttttttcgtttgtcggtgtcggttattggctaccagttatattgtccacttcacacatctattgtcagaatcaaccactaaaaattatttcaccctaaaattgacgtttttattatttttcagccttttgtcaaataacttttatataaagaaagagcttttcattaactataattattttgacaccatagcaacttttttaatgttaaagaagggagttaagttagatatttatgatagtaattttgattaatttagattatcatctggtcacatcatactttagcacattatccgaagagtttgacttctcaggtttagtttagataacgcaacagccacttaattagatgatagtgaaaggctgaaagggatccaaatttaactcaatcttcataacttcatttgatatcaaaattgcatctttaaatcatttttttcttctttttactttaagcagattagtacaattgttttgatgtttgtacgtttcaaaatttagaacatgtgttctatgctaggatgcacttgatacatgatttggttggttaagtctaatgtctgttctgacatttgaaggattttgaatttgaagagctggaagaagtgttgca

SEQ ID NO: 2822 - DNA, 2248 bp, Glycine max
  Intron number 5 from transcript Glyma08g38280.1 (locus Gly ma08g38280) derived from phytozome v7.0 (chr-ID Gm08; pos 37223829 to 37226076)
ttacctccctactaatcagctggtccatcacagaggcaagtctttcatgattgctctttcatgtgacattaaaattatctgtctggctttttgttattctgtttgattttttttttcttgtcaaacaatagcaattagtatgttatgttaatggggggattcgaagccatgacatccttataactccaacccttatgtccctccccccaaccaccaaaccaccttatgttaggatataaggagaagggaaagttagttaagatggttagactaataatgagttagttactatagttaggatattgatcagttagttaaggggttagttagttagttagaggggtttattagatataaataggggaagaaggataggagaaggagatcttatcatttttagattgagcattagctctttgtgcaaggagaaatcctttgtgatggggaaacccttggagaagagttcgctatcctattttttgttcttttcttactagtcaataaaatcctttcttttctttctcatttgaattcttggttcctaacaccttatgactccatgttattctgtttggtgttagctagccataacaaataagttggcactggctgctataggatggttataaattatagagcacttcctgcatgaagatgatattacttgctatatttttccccccaaaaaaatgattaataagtcttaatgagtgttaacacactgagggtgagcattaaaatttacaatatttttgttgtaatttgtacttattcacttgttattacatgccctgtcacaatttgtaatttcaactacaatactaaatggaaaaagcagcaaaaaccactgtatatttattaactgacattaatgattgagtagagtttccattgtagaacccatggtatagaagaaggcaacaacattctagggataaattctcttacaagagttggctattaaagtgaaggaaactatagattgtagactgtgttgggaaacattttttcttaagtccaagtcactagtgcagtaagaaaagaaaaacactgaattattgtcactgcaactgaattatcttcagcttgcttcttttgttatataatgaaatatataggcccagtaaatttttaaagttatctctttatagattttaattagtctatgttaatgtttgagaaaatatgactggtgcgagagacatagtagtcaataacatgctatagaaaagtagcgcagcaaactatggcattcaaataacagagcgtttatcaacagctgccaaaattgtggtttttttcatggtctatagtggtgttaccatgaaataggcttcaaaaattcatatttgcacctgaaacaacattgtttaggattttttgggtaaaattgtcccccaccccccattctaaagcatatttttccttacatgatacaatttgaaacctttcttccttgaccattactagttttgacttctgttccttcacacttttcaagactatttttttgtgtgttccattctttcttcttcctttagacttcccacgtcacattctgctactttttatctgatttgttatgttcttattttattaatttcaccatcatctttcattttttgacttcattagtaagttcatattgctcctagattggtggtgattgtgtgtctaagtgagatttattttagagatataattgcattaagtggttagaaatattgaactgagtatcctggcatatgctatttttactttggctgattataagaaaacgctttttttacgtttgtgaatgcatatatatgtttttgttttctgactgaaacagagttgctggtgtctggtggtctctcattacaattcacaaatccctgtttctactgccaaattgtagaggaaatcttaagatgtcataaaaagcctgctcccaaagcagaacaaatgaaaatggtgcaactggagattgaccgtgccaataatgttacttgagtgtgtctgtcttgcataaaaatattgataatctgaaatttaaagtattggctggaatgacagtaaaccttttggcttcgtgccctattttcctcagtaattgctcttttgtttctggtatcatatccctttgtttccatggtgaagtcagtgattgaaaaggtaagagaaggactaatgaagattaatattcatcttctttgttattgcaattgcagatcattcgctattctttctttggctttaaagagac

SEQ ID NO: 2823 - DNA, 2006 bp, Glycine max
  Intron number 1 from transcript Glyma03g03920.1 (locus Gly ma03g03920) derived from phytozome v7.0 (chr-ID Gm03; pos 3827522 to 3829527 reverse strand)
ccctcagcaaaggcttctctattcgccctttaaccgtaacagtttctctttttctccttttcttttaaattttttcaattttcacttcagtgcttctgtgaaatttggatgaattgagcatgtaatttgatactctgttttgggttctttatccattttgtgaacttcttctcgaaatgttgaaattaaatttggatgaagttacttgttaggaaaaattactttttagtccctatgcttaaaaatcctcttttaggggtgtattccattaagattttaaaagactacactaaaaaatcctgtggatttcaatagacgttttaggaatctaatgacttttaggatttttttaaaaagacttttatgattaggattttgtagtttggatttaaatagatttacaacaaatgaattcttaagatttaaaagggcttcatgaatttacaagattttaaaggattctataaatttttagaaaacattcgaattttaacaaataaatgataagttttgaattttcgcaaacagtcaatttaggggaattttcacaaacagcttgcgggcatagtttaatggagaagttatgaggacgttcataagctgatgaagaaaaagaattcagtacatgcaaactatcactataaaaagagaaaacaaggagaagcttatggctttaaagtgatagagctgtcacaaatttatttgctctatgttatttatgtttagaagtttgatgttgtgtgtccaagctagaagacatcaagctctatgttaatctcatcacttctcaagcagtagaccttgttttccgaaggggtactttttttctttgttttggtggcaagcagggatgaatgtgcacttgagagattactaataagagctgaatttgagacatgggcaaggaaaaagaggaagaaaccagtagaaaaaaaagtttgaaaaatctcaagggtttgggtaagattgtttaatgggtgtgttatttataatttctactaaaaaaatcccatgaaatccatcaaaatctattttagaaaaaatccattgaaatttgtggacttttgaataacaagagactttttatatgttatgaaaaatcttaattgaataccaacggattttattgtactctttgaaaagtcttaatagtgttgattgaatatcacaagatttatttttatcatttaaaagtcttgatcgaatatcataagatatttttaacaaaaaaagtcttttaaattccttcaaaatcctaattgaatacacctctttagtccttgtaaaagtactttcaaatccttttggtcctactgttacgcaaattttaccttttagttcttgccattttgtaaagacagggatcaaaaggatccgaaagtacttgtgcagtagccaaagatgatcttttaagtgtaagaactaaaaggtaaagtttgtataactttatgaatgagttatttttcctttattaagtagtgacatctcaaatagattcctaactcattattataggatatttggattagcttcatggtgaggaaaaaattaattattttttcacggtgaaggtaaagcagcaaatagttgtttctactctttcacggtggcacaatgattttgtgggatagaattgattctgttgtcttatccaaacacactgtaagtgacacgccaagatttaatggaactatgattatggtagggaccaaaggtgcccacgtattaacaaaatatgatgataaaaaatatttaaaaaaaatgaaaataagacatactaatcaaacccagatcatagagggactaaaaccaaagtttagtatacttgtaaggaataaaaacatgtttaaacattaaatttatgggtggagcacatggtactagtgtactacatgtttattactgcaagatcaattacgaattatgttatttgtgtttcatcagccatttataatcctgcagttactataggttttggaactgcgaggacagaagcttgaggttca

SEQ ID NO: 2824 - DNA, 4748 bp, Glycine max
  Intron number 2 from transcript Glyma05g09970.1 (locus Gly ma05g09970) derived from phytozome v7.0 (chr-ID Gm05; pos 9929697 to 9934444)
cctgtcctggtgttcagaaaggtaactcgcttgatttgatttttctggaatttgatgtttaggcattagactgtgtttgtttgggtttaggagttaatgaaatgaaatatgcaatgcatgaaaaaatgttcctttgtggatcactctaaactttcaataatcaatattaataatcttttgtttgccttatttagagatttcttagtagagtgactctggctttactgaaatattttgtttttaagtttaattttcatccattatcagtataattttttttataatgtgaactaattagaaactaaaaatcactataagtatgaattttaaattagttactagaaaagtcatcaatcttactatatattagagataaatatacagtcagtcaagtatgcaattagttcaactgcagttagttagttagagttagcttaactgtttatttttggttagtttgttagagttagttgagatgctaacaacagtgtaactatctatctagagacaaatgtgctatcttattgagtgagcaatgataattaattttcactcaaatcttttgctcctcttttctctcaaacatatctcaaactctaatatggtatccagagcttagttttgatccaaagcttcatcaatggcagaaaataattcttctgcgccctccttttctcatcatttgcatcaatcctttccctcaatctcaaaaaagcttgatgattccaactatctgttctggcaacaagtagaaccagtgataaaatcttacaaacttcatctatttgtggcaaaccctacaattccgatgcagtttctcactgaaaatgatcgtgatgcaggaattgaaaatcctgactatgaaatttgggaacagcaagatcatgttctgttaacctggcttcagtctacattatcgaagacaattctatcgctggtgcttccatgcactcattcctatcaagtctgggagaaaattcttgagtacttccatttgcaaacacgagctcgagctcagcaattgcgcagagaactgcgtcgcacaatgcttgatgataagacgatgaaagagtttcttctgagaatcaaagcgatctgtgattcgcttaatggtgtcagagatccggtgtcacatcacgaacacgtcggcatcatccttgaaggccttccgacggagtatggtcctgtaattgcagtagttgaaagcaagtttgagtctcctctgattgctgatgctgaagcgctttactagcatgtgagtcacgtattctgaagttgtgaaagaggatgattgaatcttctccttcgattaattacactcaagctccttctttgaatcgtaaatcttaccagaactataatttttcttctgattcatattctgtgccaaacaagtcctatgtatttgattcaactagttcagcaacttacctccaaacttaatgctacattctctctcaaacagcttggacatttggattattttctgggtattgaggttaaatatcttcttgatggttctattattctctctcaaagtaaatacattagaaatcttttgcaaaagacaaaaatgactgaagctcagcctatttcctctcctatggcaacaagttgtgagctaaccaagacggggtcagattgcttttctgatcccattttgtatagatcagttgtggaagccttgcaatattccactatcgtccgtcctgaactaagctacgcagttaataaagtgtgtcaattcatgtcacaccctcttgaagctcattggacagctatcaaaaggatattgagatacctaaaaggtactcttcatcatggactacatgatcagcaatgtccactgattctattcctattaaaggcctatgtgatgctgattgggcttcagatccagaagatcgcatatccacatcaggtgcagccatttattttgctacaaacttagtctcttggtggtccaaaaagcagcaaatagtagcaaggtcaagtacagaagctgagtataggagtttagcacaagctactgcagaagtgtcttggattcaaactcttttgacagagttgaatgtttcctttcctacacgaattattttctgtgataatgaaagtgttgtttccttatctcacaatccagtggttcattctcgaactaagcatatggaaattgatgtgttctctgttcctgagagagttctagcaaagcaacttctggtttgccacattccagctattgatcaatgggtagatgcttcgacaaagcctttggcaccttctaggtttatgtttctaagacaaattcactgtggctgagttccaatatggaaatcatccaccttgagtttgaggggggtattagagataaatgtgcagtcagttaagtatgcagttagttggagttagcttaactgtttattttctgttagtttgttagagttagttgagatgctaacaactgtgtaactacctatatatagacagatgtgctatcttgttgagagtgagcaatcataatcagttttcactcaaatcttttgcttcttctcttttctctcaaacctatctcaaactctaatactatacatggtgacaagtgattggatgatagtgaatccattagaatgtctttgtatttaaatttaattattgtctttcctcaaaaacatgtggcaatcaagggagaaaaatatggtcaaacatgaaacagtccgtcagtgtgaatttatactgatacaacaactacaataaccccgaggcctttctttattttagccatcccactcgtattctgtgtgtaatattcttattgttcatcattttgtatgatcgattccaaatatttaaacttagaaacctatggttgtctcttactaaaagtgcaatgcatatactctttcttactcctacttaagcgaaaacccttttgttcctaagttcaagcttaatattaattgcttccttcgattccttaatgaagactatatcatccgctaaaagcatgcaattaggaataatcttttgtatgtctatgataagcacgtccaaaactagattaaacaagtaacaacttaaggctaagccttgatgtaaccctatctcaatatgaaagaccttatttttgcctcttgtagtttgtgcactagtagttaccccttcatacatgtcttgtataacccgatataagacatgcacacaccttttttctcaaaagtcttttacaacacttctcttgacacaaaatcataagctttttccaagttaataaaaataacatgcaagtcactttcctttcttttgtgcctttccatcaacctccgtaaaagataaatggcttatgttgtaaaccttgttgacataaaaccaaattgattgtcaacagtccttgtttcttctcttaatctatgctcaatcaccttttcccataaaaccaaatttatactggtgtttacagttaatcaattgcaacgaattatttctgtttgagattctatagctggaagtttggtgctcaatctcattcttatcaaatcatcaaataaatcgtgaattcgaaaattattatgcaacagagattgctttgatttctttaaaagtctgtaaccttttatttctttgaaaatttggcttcaaaagcaaatagaaaactagggatccttctggattttctcagtccgcttcaataaattccaaatgcttgccttttggaattaactttccaagtcaagcatttcaaaggtctttgtgttagcttgcttctaagtaaaaataggggaaaaatagatataactggttgacattgcttaatatttctgacatctataaccatacatggtgctggtttgttataattttttagattgcatggaatgtttctggggaatatctggttgatagattttcattgcttctactctcttgcagttacagggcaattatattgctaattgtttttgttgtttgtggacattactgtcttctcaaacattgttgttgtaggtcattcatcattctcaaaacatttctgattaaaatatagtagtatgctgtcctatgaagtgtgtatatgttttattaacgtttttttcccttttgttttcatgctcttccgtttttcctgtggtaggctgagtaaaagtaataaccttgaggctatgtaatactatagattagacactgtttcatcagcatttaatgtttcctcattgaatggtcaacctttccagagaaataatgtcaattttgaaaacaaggaaaaactggaggaaggatggtcaagaccagtgtaaattgaggcatttgacatatttaatgtcaattttgaaaacaaggaaaaattgaggcattttgactatgcaaactcactattaattacaactctttgtaaagtatatttttgacagtatatgtttaagatcagtgttcagccttccgactttcaatggttgatgactttagcttgttatgccttgggaagactgctgttatgttgggtcaattgacttacattccatgctttgctaaaatatgccgttgtctaacttctgacatcaacattcatagttcatgaatgctctgaatatcattatttttggaggggggcggttgccaattgttgcaaattcaatttaatataatatcatggggaatttttttgtggttctaatgttctgttctaatgctaatatggttgaaacttttatgccattgcaggaggaattttgaataagatcagacctagtctaaaa

SEQ ID NO: 2825 - DNA, 6183 bp, Glycine max
  Intron number 1 from transcript Glyma15g37280.1 (locus Gly ma15g37280) derived from phytozome v7.0 (chr-ID Gm15; pos 42959243 to 42965425)
cgaagttgtcctcatcctccaagagttcgccaagggtaagggtcgctggattttgccggttttctactacgtggatccgtctcatctcgctgatagtgattcctataaacgggcattggaggatcagaccgagtggtttgactcccagaggatacaaatatggaagactgctttgagtaaattggctaccttttcaggcttacgactcattcggtatcccatcttaccatttttttttgtttaattgatcattccctatcattttccaccttatcttttttatttcttataattattaataattgaattttttaattccaaaagtttatatttttattccgatcaaattctttaactaatatagttaaataaatttaacgaatagaacttattatgaattaaaatgtaaatttcattgtaggaactaaaaatataagtttgaaactacatgaactataattaaacgttttttttatgattctttatttttcaattgtgtcaacgtttcaagtttaaagaaataaatgccttttggcgttgaattaagaatgtattggattgagatttttaaaaactattttggcataaaaaaattatgtaaattttaaattattataaagaatataatgatttataagattttctttcaaaaaaatttataatcatgattttattgtttacattttaatgatcttgtaagatttgaaagaatctcattggaatttaaagttacaagtcaatgaaaaaaataacaacaaaatatatttttaaatcttaatccaatacatttggttggtaaatcattgtatatctatccattcaggtaaacctataaatgtcatccatgagttatttagtgtaatgacttcaccttaactcccagcaggaacgggagtatacttgaataccagtatattgagcttatccttaaagaggtttctagacatgttacttgtccagttggactaagtcatcggatgtcaaaagttaacaagcttttgttctctggatccgatgttggagtccacatggtagggatatgtggagaggctagaataggtaaaacaacagtagctcgtggagtttacaacttcaactctgacactggatttgatcactattgctatttttataacgtgggggatattttaagtcagtctagatttgtcaatgaaggaatggcaatactcaaccagaaaaaggtttttgcaatttttgaagatattaacgattccaagcagttgaaaaacattattgaactagcttatcagtttggttctggcagcaaagtcatcattacagctcggaataaaggtttgcttcaaagtcatgggattgaaagcatatatgaagtagaaaggttcagtaagacagaagcttttcaattgcttattttgaaagcttttaattctataagtgttagtgctgattatgtgaccatctttaaccgtgtcgagacttatgctcttggtcatccgtggactttggaagtaatcggttccaacttgagtggaaaatcagtagaaaattgtgaatctgcattacttaagtacgaatcaataacaaatagagacatccgaaagatactagaagaaagctttaatgctttggagaaatgccagcaggagatgttaattcacattgcattgaaactcaaagaacttgaattgggagtggttgaagacgaactttgtaattattataaagtctgtcccaaaaaagatattagagttttgcttgataaatctcttataaagattaatgagcacggtcaggtgacattgcatccctctacacaggacatgattagagataaaattacacgttttgaggtaagaatgttttggatgttttggttatgtctttgaccttgatatatgtcctttaatagtgaagaaacattgtttggccatgtaactttgtatacgatggaataggaatatggcaagcaagaaatccaacctgtctcaaagaatggaagcatgattgggatttgatggaattggaatataaattaccatatcatcattgtcgttcctcctcttcttaggatgctttatgaggccattttagatccactcccttcttttttgaggtaaacataaacattccatatggtggcaaagtatattaaggttttgaaaaatgatatgattatttttttatgttttgttgaatcaaataattacatcaatatagtgttattgcttgtttagttgtataatttattttttaggctatgtaacatggacacgggcagagtaagtcaaatgaaataaagataagcaacatcacatgctacacaaagttgtattggtattggaaccattcctgtaagttgtctttaaacatcaaaagccaagtgaattttcaaaaaaattattattatgatgatcattttgtattttaagttgttttcataaattgaattttaaaaaatcaatttttttaatgagttgtgtcctattaagtgtcaagccaaattttggtgttggctaagtgcccaagttgatattacaggtctcagtgagcagtgtccgacacgacttttatgggtgttggagtgcgcattttaaatgtttccaacactgcaatcagaagggtcacagcggcagagaaaaatgtttttatactagaattaaggctgcacaaccagaaaaaatcaacaacaatatggacaaaattccaccgtactcaactgtactttcctactgctgtaccagtcgagttaataatctgttgttcctgttagtcactggttaatatttttttccttctctctgtttattgtgctttatcttgaagtttacatttcagtgtgttgacctaaggagtaatttgattttaaaatgctaacatgcaagtgttttgcttcattaggtgagaatatattttatgctattgttaattatagacccggaatgatatgccaatacagttcaattcatgattcataaaatagcccttccaattatgatttggatccctattaaataatcatgcttttgatactccgtgataaaactggtttccttcttatttctcaaattcttcaaatgtttaataattcaaaattacaaatagattaagttttctcctttagtatttacattatttcctgtatatcttctgtgcatcaaatgggtgttactctaattttccttgaggggaaatcaatggtgatatgttagaactatgaggaagggggagttaattactacagttaggatattgattagttagtcaaggggttagttagttagaagaattttctttcctattttctgttcttttacaatgaagaaattccatctttcttttcctttcttctattttctaatttcggttcttaacaggtccccatggagagccactgttagagatgaaggaagtgcaaatttgggctaagaaggtggagctaccagtgttcatggaggagaaacccaattggtttgattgctagggtttaaaaattctgaggtacaagaaattccttcattctataagctgcaatatgcattcataagcttggaaggtgctgtgacacattggttctacatttggaaccaaaagaaccctgattcagattgaagtcattttccatggctttgatcaaaagattcaaagattgctatgataagcacgtctttaaaagattgagtatcttgaagtaagaagagtaaactgagatgaaaacctgcactgaagaaatggagacttccacaatgttcttgaaagggaggacaaacaatgaatctcagcttaagcaaatgttgcagcagttggtgaagaatcaattagtcaaacaagaacttgatgggtcattggaggacaaactatgaatctcagtttaagcgtagttatgagaggcagtcaattcgcataggttgcgacatcatacatgaaaaatatacattacacacacacacacaatctctactaataaattcgtgtttgattgataatcaattgatgcattgaatatatgaatttattgtacttttttatggtcaaattttattataataaattacattaatcatcactttatcaattcaaatttaattcaatcaaataaaattattttatcattatatttattctacatgtgatttatctctccctctcttctattttttagttttatttacatacaacaaaaattgtctataaaatgataagaatatataattgatattttctaattaaatatgcattttaaattctaaattgaaataacttttaaaatttcttattataataaaataaaatatcgattgagtaatataattattaatttaatatataatatttgttaatatttttatttatgtgcaaccatttaattacaaaatttagaaaatatattttatcctttaattaaaatattatgaatatatatatatatatatatatatatatatatatatatatatatatatatatatatatatatatatatatatagtaaattgtttcttagttaaaaatagaatgcataattaagaatgacaaaaaaaaaaaaaatcatacttacatatttgctgataaattttggagtagatactaaatgagtatcacgtggataggtaataaacaatgccatatttccactactgatttgttaatggacaaagggtcatatatcatgttatccgtacttgcatatacgtgttaccattataatattaaaatagttaaatattctttttttattaagcttaaatatgtaaatattttttatttggaatcatattttaatctatttttatttgagttcatattttataaagtaatttttagataattttatttggaattcataaaatttatttatttagaattatttatggacattttcaactatgtagatgatagaatatttgaataattttagttgtaataattaattttttttcaaaaaaatattaagatagataaaaatttaataaaatattttaaaacaatcttttttttgcaaaaatatcaatggatactcagagatatcttgggatattaaaaaaaaattcacatgtatattacctacacttgcccgcccgcccattggtccttgacaaatactagtcccgattttgggagctactttgtatgaatacttgtcaacaaaaaaagtattttccttaaaataaagaactacaatattaataatactagttaaaaaaacgaactataaaattgtggcttttgtaccaaaatggtgcaattttttctataaattaccaaaatggataaattaaaaaaaaaactaagaaaattgtcttttgacgatttcaacatgataaaaatgctttcaaagatgatttcaccttttcaatttttattttttataaaataattttcaatgttttttaacaacacaaattaattataaaaccaccacaaattacataagataccaacctatgttcattttatggcggttaaataagtaatttttttaaataaaataaaaaatgaaaaagtgaaaccgtcattaaaatgcatagtttcttcctgttataattgttttttagacataatttatccatctccgtaattttttttaaaatttacctattttgataatttatgaaaaaattacaaataattttaatatgagacatttatttaatatttgtcttaatttcaaggcgatcgtcccctcacaggtccactttttcatttcatctagtaaaaatggtaataatttagagcatcatttaattcgagtccaagtcactgttcatgaatttcgagatcaaaaggaagggtggaaatgtctttgcaaagtccatttatctgttgacatgcgttcagggagagaaaaaacattcaaaattgcaagagtgagaatctagggttttggtattgttgggttggagctgaatccgcgaaagcttgttggatggcaggttcagaacgcagtagtagtagggtttggcactacgaattcgacgttttcctcagctttagaggagaagacaccaggctcggtttcgttggaaatctctacaaagctctgacggaaaagggattccataccttctttcgcgagaagcttgtgagaggagaagaaatcgcagcatcaccatctgtggtggaaaaagcaattcaacattcaagagtttttgttgtagtgttctctcagaactacgcttcttctacacggtgcttggaggagct

SEQ ID NO: 2826 - DNA, 3287 bp, Glycine max
  Intron number 2 from transcript Glyma19g22720.1 (locus Gly ma19g22720) derived from phytozome v7.0 (chr-ID Gm19; pos 27803620 to 27806906)
aaataagtcgttgcttgagcagttcacatttccaggtttggtaactacagtaatttccatctgtttccactttctctttgttttctgtgataatttctcaaccctcaaaatggatgaaatgatacctatatttgcttcttggttggtgcctgatttttgacacagggtggtagaaatttggtgaagaaaaccactttccatattcaaataatatcctagtgcatgtttggatgggattgtttttggagaaataattgtttttcttttctttttttgaagctttattggaaagtggacaaaaataagtatttgtttctttaaattaagcaaaatcaaacacacctattttttttttttttttcatgtttagacatgaaacatgagcctcacaagacaaattataatgtcaccgaagataatttaatatttggattactatcactagtacaaggagcagttacaaatacatttcacagtttttttaaatgtgtttataatacatgttctcacctttaattcataatatgacctttgattttcacttttgtgaactttaatttggaaaattgatattggttaatgtggctttcttttgctgtttccaatatttatggttttctcttagacttttttgtttttgttttactgacggatttttaggagggtaaatatgttttggtccctctatgatgttcaaagttcggttttagtgccttaagtttttttgtccgtttcccatcctctaattttgaagtttaacactattggtccgcaaagtgctttagataatgctttatagagggacgaaatgtggtttagataatgcttgagggaccaaaaatggtgcatttcaaaattagaagggtgaaaaacagataaaaaaatttagagggactaaaaccgaacttgccatgatgggggttttggtaatctgctagtgaattgttgtttgtacttgtgttaattttttgaggggagattgttgggaatccatgtagactgcactggaaactcaactcagtgaaaatgcaactcgtgaaaatgttgtggtttgggctaccgaaatgatggagcacatatttctccatgagtccatgttgggatacttgttgagaaaggagattcttctatattgcattcaccaaaataaaacatcctagatgttaagcagtcaacttaggatgcatttattatatggagtagtggaaagacaagcgatgttgtgcctgtctgcattttttatcatttggtaaaatgagaagaatgagaacaattaatttataacatatccctacttcataaaggaaaataaaattggaagagggataagcacccaagcacttggggaaccctcttctaaaagctatctgttaagggaggagaaccaaccacttaattactccacgagcatcccattatcccatactactcaatgtggggcttaggcatcccgtaatactcaagtccctatcatagcgcttgccctgagagctaattgtactttacaatgcttcactaagccttttttatcagcccatctgtaggtatagcactttctgagacactagcaaccaactctgataccaattgaaagcacccaagtacttggggaaccctcccttaaaagctagctatcaagggggagaaccaagccgcttaagtgctctaccaagcatcctataatactactaaatgtgggatttcaagcacctcaaaatacccatgtctcactataatgagtgtgcttaaactaatgcaaataaaatttaaaattactacctttcccccctgtacatgtcttcagaggagagtggaaggaggttgtcccaatcaacatatcatgtctgagcaatgacttgtgatttttaactcattttattattgaaattagaaaaatgggtactgcttgggatcctctcctttggtcttgtgctccttttactacatcatcttaaaatagttttgaagattttaagcaattgttgagacaaaaagtgggagtttgctttattaataggataatagaacttccctaattttggggctttgacaaatggacccctgaatgttttattttggttatcataccactcttatattttaaataatgtctccatagctagtctgtgttcttgctggatggtcaagtttaacatattggtttctgagctgccataccccagtgtccttttatttcttttggattttgtttttttaaaaaattatatacacttgaaaatgcatgtttatatttatcttgttaaagtacatgactgggcagatttgcaactagaatctcaactgttggaacattctaatgccttttctgttcaaatttttgtttggatacttgataaaccataagttattttcaagagtaaaactatgattttttttaagttaaacattttttgtacgcaagtatgatgaatattgagacttgagagtgggaaacatcatttggtaacatgatatttttggatgaaaaattctatgaaattcgaagagtggtgtgcctttttgtagataacctaaatggtctctacaaaaaaaatagataacctaaatggttgggcgtattaattctgcaaaccacaaagattgcaccaacttagattttggattttctttccttggtcaagggtacataatttagtgagtttctattattgtttccttgttattaatggtaaaaacagtggtattaggaggcatttgtttcaagatatataattacatcaccacgaatgatattctcaagaatactctgattaggaatgttatttctagagaaatttaaaaacacttgtttagaatttgatgtttttgggaatatttttcaaagagtgtgtatgcatggaaatagaagtagatagttaggttataaagaaacttcaatattcctttggaaaagtaacatacccaaccctcactatgggaagaatattatggcttgtaccaaacttgagaatgtcattcccaaatttactctcctacaaataaattgacaatctttgaaacaaactcccccttagacataaaatcagaagtaatcttactattacacactgttgtgaatgtttttcccaaaaactaggcaaaagtattcccatttatagagttggctttattgttcttagtaggattacttaataatgacacatattactgacattgtgatgcattattctgaatagtggatacttttaccatcactttattcctatgctctttcatatgatctgtttgcttcttaatttgtaggtagctgagagggctttgttctt

SEQ ID NO: 2827 - DNA, 5967 bp, Glycine max
  Intron number 14 from transcript Glyma10g40180.1 (locus Gl yma10g40180) derived from phytozome v7.0 (chr-ID Gm10; pos 47667598 to 47673564)
ttgaagatagccaagagttcaggtctggatcaatgataaatttaaacataaatatatatttatttctaatgttttcaaaattaggctagtcccttgaactggataaattgttggatgggtagttgcagagcaataaggctttatcattctgctctagaaacttaagtttcgtataattacatcatatttggtgtacagcttgattattccacgaaataggaatgaatggatggtcatgcttagttcacttgacagtggtcaagtgatactattgttttgttcatggcatctatgtagaacgactgaatgacatcaaaattgatgtaaataacttaatatccttcactagaaatccaaacaaaggtcaccatattattgtactttttgtattatgttacatatttgctgtaaatctaacttgagtatttaaaatttattgcaggaaatgaagagtagattgaattgttaaaaacaagattagaatataggatttatttaattaaggataattttaattctataaaataaatgagaaatattaggaaaaataaattatatttcatttagtggagcatgaaatcaccatttccactttttggaaaggagtgttgatttgtagttctattgagctaggcctggaatgatcgttccatgcagtttcttatgccaacaaaatttgtaatttctattccatggaattgtaaggatttaagtagcatagggatatttgaatattatttgcaatgtgttagaaaaaaataaaaggctatccttatttataatgttagtgttgcagatatttacatacatgaaattggaaattgcaatcaatcatataagaaataggaaaaacaattaataatagttaaggatgttgatttcagcaagtattttattgcattaatttcttgaatgtccttgttaaactcaaatgagtgcaaagggagtgactagagtttggatactacagtatgaaaacatggtcaaatgaggtgatcgaaacttggaaatttatgacttgcaaacatgatagttctatgtcgttaaatgacatttggatgagagataattgtggtggtcaatggtagggacatatgtcaagttggaaattggtgaggcataacaagcactcgacataggtaactaaatgataatgagtgaaaagtagaggaaagtgagaaataggcacttcagtacctagtaatgtgagacatggccgaaccgcaagaaggtaggatgaagaaacaactccaaacttgtggcaagacatgctagagtaaagctaatacaaggaaagacaaggcaaaacgaaaccattttcataaagacaagcaagaatggagccaacatgataacacattatacatggaaatgtatgctagaaggaagccaatgaggcactgtggaccaagagctaaaaactaaaaactccatacggagattgttgagtgcagactaaaacaaaaaattaagtaatcaagggagaaactattttcgaggtagataacatggcttcaacactattaaccagaatattccttatggcttggaaaatctgctcctttttaagttagattttttggttgagttaagcccaatccatttcttatatggtatctgatcctatctagtcttgatgttagccttcttccgtatgtccgttttcgcaaactactaggtgagagatgtgttaagatttcccatattgactagcaatatgccaacaccaatacaaggaacgataagccaaaatgaaggtattttcataaagacaagcaagcatggagccaacttgttttacgtggaaaggtttgctagaacgaagccaacgaggcacaatgaataagagttagaaacaaaaaactctatatagagaagttcaagcgcaaactaaaacacaaaatacggttttggtggtaatcaagttcccatgaattccaaatattgaaagggagaaattatttttgatgtggataccgtggctttaccactgttaaaatgccccataccgattaggaatatcactagaatattccttataaaggcttggacgatccattcctttttaagttggatattttgatcgagttaagcccaatccatttcttatatggcatttgatcctatctatatgtccagttttgtaaactacatttctcaatgtttagtcttaggtgagaggtgtgttaagatttcccatattgactagcaatatgctaacgccaatgagtaaagataagccaaaatgaagccattttcaaaaagacaagcaagaatggagccaacatgttatacgtggaaatgtatgcgagaaagaaaagaagccaacgagcggcacattggaacaagagctagaaactaaaaagtctaaatagagaagatcgagctcaaactgaaacacaaaatatggttttggtggaaatcaagttccatgaattcaaaatattgagagggagaaactatttttgatgtggatattgtggctttaccactgttaaaatgtcccatatcaattaggaatatcactagactattccttataaggcttgggctatccattcctttttaagttggatattttggtcaagctaagcccaatccatttcttatatggcatctgatcctatctatatgtccctttttgtgatcttcattgctcaattttcagtcttaggtgagaggtttgttaagagtgactagcaatatgccaacgccaatatgaggaaagataagcccaaatgaggccgttttcataaagacaagcaagaatggagccaacatgttatacatggaaatgtatgctgcaatgaagccaacgaggcacaatggaacaagagctagaaactaaaaactctatatagagaagatcgagcgcaaaccgaaacacaaaacatggttctggtggtaatcaagttccatgaattcaaaatattgagagggagaaactatttttgatgtggataccatggctttaccactgttaaaatgctccatatcgattaggaatatcacttgaatattccttataaggcttggacgagccattcctttttaagctggatattttggtctagttaagccctatgaagcaccgacactgacacagacacaaacatgtggacacttgtcaaacacatcaaaattaacccggacacgggtgtcggtgtcgtgtcagacactggacacggcaagagactgggctgtccgtgcttcataggttaagcccaatccatttcttatatggcatctgatcctatctatatgtcctgttttgtaaactacatttttcaatttttagtcttaggtgagagttgtgttaagatttcccgtattgatcagcagtatgccaatgcctatatgaggaaagataagccaaaatgaagccattttcataaagacaaacaagaatggagctaacacgttatatgtggaaatatatgctagaacgaagccaacgaggcacaatgcaacaagagctagaaactaaaaactctatagagaagatcgagcgcaaactgaaacacaaaatatggttttggtggtaatcaagttccatgaattcaaaatattgaaagggagaaactattttttatgttgataccgtggccttaccactgttaagatgtctcatatcgattaggaatatcactagaatattccttataaggcttggatgatccattcctttttaagttagatatttttattgagttatgcacaatccatttcttatattgcatatgatcctatctatatgtccatttttgtaaactatatttctcaatttttagtctttggtaagaggtgtgttaaggtttcccatattgactaggaatatggcaaagcaatctttataaggctgaaacaattctattgagctaacttttggagttgtataaataccatgctaaaattgtgaaaagatattgataaacaattaaggaacccttctttaaaagctagttgttaaggggggagaaccaatcactaaaatactccaccaagcttcccgtactactcaatgtgggacttaggcaccctatcataacaccacctctgagacatcttcacttgtttcatttcactcatcttccttgttgatcaaaaccctccatcgagagccctttccaagatgctgacaatcaactctgatacaaattgatagcacctaagcactttgggaactctcccttaaaagctagccattaaatggggagaaccaaccgcttaaatactccatcaaagcatctcatactattcaatgtgggacttaggcaccccataatacccaagtcaccatcagatttaggcaagggaatatgtgaagtgttacttgtagtgttattaaacacaaagggagcgtactaattatttatgctcctaggtttataaaaataaggaaaataatcaataaatattagagaatgggaaaagacaattaattatgaataatgatgctgattctttaaatgcattaattatgctattacatggaataaatcatgaatgcgctgtagtgtaccgaatgtaaacttagtgtccttttaatagtttgtaaataatggaacttcaccgttagttgtttatgattcttaaaccggctgagtttaggtcatcttactttctctcctttcagaacttgtgttctttaatatttggcaaatagaagctggtgtataaaacaatatgccctattaattgtctgtagatagtggatttggctcttgtaaagtgaggggaacactttagagggtaaaatgtatagttataaccatctacagttgatgttgtgataaaaaatacatgcacatgtataacaaacttgttaaatctcaactgctaattttttaattaacctttagaggatccaaatccttgtatattatagttttaacactttactactgttggttgatacttgatagccaaacttacaataataaacgcagaataatcaattgtgaaaattgtggcatcatagtgctgtagtgtggtatcaccacctctgatccctacaggcttgccataacattctatcttctctcttatgactgtgttgactggggttgtaatagaaaagataatagaagagataaaatgagagaagaaacagttttattaacccactagatcaaggattacaacactgtatttatagactaaagagttaggacaggtaactaaccctaactgtctcttaactaactaaggtaactcccaggactgcagtagaattactgcatgtccagtactccaataggttgcagccatatagtgtctggcactgcatctaggggcgaaatacctgctgtttggctggcatgtcccctttgttatgtgtgaacccaacaaaccgtagttttttccaccaaaaccacccttttccgctaagtctactcttttaccagcaaagcccccccccaagttttttttattttgttttcatgctagtttcaagccttctttcttttgcatatctgacctgtgactagatcaggtacttctttttttgaagttataaactgatccagaatgaataggggctagtgtccttttcttttgatatcgactttgttatcctacttgtaaattttttagtttgcttatttgtctatgctttacttatatgaatgatttcttttttaaaattttgagtattgaaactctatggtcaactattaagattattaattctgagtattattgataaaagtcttaaatcagatgtactttttgagatttgagcattattatgtgatttataaattagttaatattgtttctggtatcttaggtataacaggcactctgatctgctataacatatttggggttgtccactgtgcactgctctttgggatttgctgcttagaattaatttacatatcttgaaactatttcctaacataaaacattcaagttcctatttttacttttattggttatgttttgttaggtccattggag

SEQ ID NO: 2828 - DNA, 930 bp, Glycine max
  Intron number 1 from transcript Glyma10g05100.1 (locus Gly ma10g05100) derived from phytozome v7.0 (chr-ID Gm10; pos 3960831 to 3961760 reverse strand)
tgcaaattttgcagctggaaacgccgtcgtttaaggtatataggctttgaatttcatgaaaataactttgcatatgtgaagatatgtttgtagttaatggaataatacttatgcttattgctgttatatttgctgctttatgtatccagaatattctgagtaactcttctatgcttaatattttaaaattcctatagaatagtatattataaaatcatttatccatttagttaattaaggatgtaatttaatggttaacaaagaattatgtaatgtaatgttaaaattatgtatgagaaatattacttgacataatttttagtttaaaattaagatcattaaattagtagtttaaatatcaaataggcgggtgaagattttagcagagaagtttttggccgtttgaattggataaaaaatgtgtttcttttttcggaaacatggaatcttcttagcgtttacctagtaatttagttctaatttcatggtaatcttgaagattgccaatacatagcacttagtcatgataccaacctaagctgaaaaacattacatgtatcctgtgggactcatgttagttttatgtggaagtctcaaaatgcaattcgtcacccattatcaatatagccttcgagatgcttctatttaattttaatttcactacaagtgctacagctacttcattaccatgattttgattaatcccattttgtagcattttgatttcttcctaatcatgatcataatttatcttatctaatgttgaaatatgcgtggaatagtttacttgtcaatgcttgcgcatgaatgatcttttttttttcatataatattgatttcctcctaatcatgagcataatattttttttttattattcatcaaatattttgttttgtctggttgttgcttgtagtgcctttatacaattg

SEQ ID NO: 2829 - DNA, 4280 bp, Glycine max
  Intron number 1 from transcript Glyma13g08700.1 (locus Gly ma13g08700) derived from phytozome v7.0 (chr-ID Gm13; pos 9232427 to 9236706 reverse strand)
tcgagaacctcgaagaccagctcgagttcttccatgtgagttttttttctttctcttttctcgaatttcctttgtccgtgttgcttttcgattttttgcttataattttctttgcggtttgctgttaattaggcttgagtctgttttaattgaatgcttgttgtgttaaatgttgtaaaatttggtgaagttttggatgttaattagtgtttctttttttcttcctcttttctcgaatttcctttgtccgtgttgcttttcggttttttgcttacaattttctttgcggtttgctgctaattaggcttgagactgttttaattgaatgcttgttgtgttaaacttgtgaaattttggatgttaattcgtgtttccggttcttgaccttttggttctcgcattttgtaacgattaggtatgtgcaatttttttttattttatggaacttaagattgagtttgagtgtttcctttgagccacaaaaaacacagatgcacaagatgagtgtgtgattattactagtttataaatacagatgcatgagacgtgtcccttaagcatatgttagagttcgatctcaggctcatgtgtgtgtgcaagaacaagaacaagaatgtataagaacgtatgttgagagatgtcaatcccttaaatgaattttttagtactatactatgggagattagtctctgacactcgggctagatataccttgagttcacccaaaaaatcgagcgtgattattaatttacttgtatttggtattcagaagccaatttttggagttcaactggttcaagtaaagatggtgatggagctgagctctctgatcagttgtttccttttattcgatgttaagggaacttagctctttattgggttgttagttaggagatagttgtgggggtgtgaatgtgtgccggactgtttcacctttttaaataaatttatatcaatacatagtacatacaccaatgatcttttgttaaatagcattcattgtatggggaattaactttgttaaactgtatctttgagcctttcctttgaattgtgtgtcagttttgatttggattttgaaatacactgtttgtgtattattgtacctttattgagtcagtttagttgtgagttggacactatgactcatatgaacatgaccccaaggtgtaacctgaggaaacaacaggaagaatcatgtttagaatcagatttgattagtgaggttccatttgatgaaaattgtgtcctacttttatgtgttttaatgaaactgtttatggacttttagttcttctgactgcgatgatagtgtttatggatatttatcttcagagcagaaatcatttttaagttgactgaaagtcacttcattttgttgcaagaaaggaagagaactcaaaagtcatgttttcattcaaatttcaagcgttagaaccttgtaacagattgggtcttctgtgaaacctattgtcatggtttcccagttctgaccatttacttcagtgtttcatctgttatttgcctctttacaatttctgttaatgttaactaccaatctttcttttggcccatgaattttctatactcgtcctttttttctgtccttacttgcacattatgtttatgctatccaagtgttagaaaatagcataaaatgaatttgaattttgtttccgataggtcaaatgagctgctagaaaattaaattatgggtaagctatctttttagtccctaaactttttagaatttttgtttttagtccctgaaacttttacttctgtttttagtcccttaactttttttccgtcttgacttttagtcccttaactttattttcatccttacttttagttccttaaaaggattaaatgtaaggacgaaaaaaaagttaaaggactaaaaataaggatgaaaaaaaagataatggactaaaaacagaaatgaaaagtttagggactaaaaatagaaattctaaaaagtttaaggactaaaaagatagttaacccttaaattataccacatggtggttgaattttcatgtgtgtgtatccacatgttcaaatttttttttaatctccggccttattgcatcttcattttctccccaatctaatgagttttggaaaagtaaaagattttcattgtgaaaaatactaattagttgagtggtggttttcatctggttgtagtcttggaggattaagccaagatgaagtctgccttgtttattattgtaatcataaattacatattgttacataattaaggtttgttgcagtatggaatttttgcttgaagtaattgttacatgaataatataatataattgttacattagtatgtttgaattatgcatcataagtatcatcatttcactgatgttaatgtattgaggttgaataatggaccttgtataatctctgtcatatcatacttgttagacaagggcactgcaggattaagtcctgaattcagatccaatggtatatggagcaaatttatgggttatcttccatgttatgaattcatagtgtcaaattgttgcttctgtggcattcaacaaatcaattcagggtaatagggaaaattaagttggttgtctgataagggatatattaataagtgttaagtgataataggaaaagggcaatgttataaatcacaaatgctcctatttatattactaatcttggtctaaggaaaaagcatagcccagtaagacaactaacaccacataacactaatattctaacacttcacattaagctgaatgaattggcttgttacaaatgaacacctctaaagaaaataatataatgtagactacgtaaaccatagctcgacatacaattctgagaaattaggcatcctaaaagaaacaaatgataatgtcattattggaaaatttaaggtaacacaatgagatggattaaatggaaaacagtcataccctaaagagctagttaggatgttgtgtagtgcagtcaaggtgaaactgtgaaaaaaagacatgataggatgaatgacaatcatccacaaggcccaaacctctaactgtatgtgtttgtgtatgcgcatgtgtgtgcgcacacacgcatatgtgcaagcacacacacacacacacacaagcaaacgcagcatcaattttgaatttcacaaacccaaaatctttgaaaacttgctgggaatatataaagttgaattcagctagaacatgtccccaatcggctctaaaagcagcctgtggctgtaagggaagtagagaactcaatcaagcaaagataaacatccaaaatagatggaagcagagccaaaatgaagcaatccacatggaaagcaccaaatagatctaatttaactgtagccagaatacagtatatcccatttaggaataaaactcaaacagtagtaggagcaagaatcccacaccgccaggagtaaaatcaaacatggtgaaaaccagaaaatgaaaacatcgggatataccttgcaaagggtggctgcttggttaaggttttcactagtgagtgtggagatgtgtgctgcttttgggggtggggtcttggtagtaattatgtttcacctgttaagcttaataggcgccctctgaacctgatggcaattttcttttccttaaaaagggactagaaaatggtgaaatgcaggaagactatctggctatgaaactcgcaagattttggtgagaaaatgaatcattttggcctgttgagatttgggaagatcaaatagggatgatgtggacaaaaaggcctggcataaacactcctaacataactaactaacatgatatgacttgaaccacttgaataactggccctaatacgatatcagtcaagatgagatggaaccctcatattcataaaagttgacccaaatgcaggacaagataataaaaagaaatcattgttccatggagaggcaggtttgtataacagttataaggtcgactaattaaaaggcttatgttttttttttttttttggtaatgaaagggcttatggtttggttaatgggcagaaatttaatgcataaaataaaccaacaatacaggaacatgcaataggcattgtctttcctcttgtttcttcaggaaattaagaagttttattaatcagttaattgcaggcttattttttttctagcattttttttcttgctttatattacatgatattttaatgggagtctgttctaatttggaacttattttttgtatggctgcagactattcaaacccagcagcgtgttgagagag

SEQ ID NO: 2830 - DNA, 700 bp, Glycine max
  Intron number 1 from transcript Glyma10g03210.1 (locus Gly ma10g03210) derived from phytozome v7.0 (chr-ID Gm10; pos 2319723 to 2320422 reverse strand)
tcactctttctcttcgcgattgcattctccttcaggtactcaatcccttccctcctttctctctgttcactgtttcttctggataattttttttttcattttaactttctctttctttccgcctgttgcttctgtctgtttggtttacttgtaaattttaagaaaaataaaacaatgctccgtttcatggatttctcccccgaacttgatctttctaatttcatttactgatctttatcctgatgaagtaacagtaatttatcatgaatgctcacctgagatgtcatagatgttcggaaatgctggatctgtaaatttttaggttcgtgctatctcgtggatttcatgtagtttgttccttttgtttttaaatgcaaaaggtcgatgtagtttatgtgatatattttttggattttataccgtagttgttgactttggcaaatgaatgattttcaactttttaggtttttttgtggcaattaataaccgaatttaactacagtgtatcacaatattcatattaggattctttgattttgattttatatggtagttattattattattagtgtttcaaattcaaggttttccttgagcagtttctgtcttctattctattgttttctgggtgtagtgaattgtatggttttgtcagaaaactgtaaaattgctgttatacttgtttgcaggttgctttgta

SEQ ID NO: 2831 - DNA, 984 bp, Glycine max
  Intron number 3 from transcript Glyma19g01280.1 (locus Gly ma19g01280) derived from phytozome v7.0 (chr-ID Gm19; pos 889981 to 890964 reverse strand)
ctaccaacaaaggacgggtgcgtatgttttctctttattttgttatgacattcaattcaattcatttctgcatatatttatggtcccccacttcatgaatacctggttcttctcttgctaactaataatgtaaggtctagaatggcctacacaactctcttttttgactcttgagcagtcatgaatccttttgaagtatcaacctcacatgtttttaatttatttaatcctctacattggaaaatgttatggtaattaatgcaataattttaaacttttccttgcttagtacttaattagtagtagttaatacgaaaacaacttgtaattcttgtcatatttacacataatactcaacttgttgttcctcgtagttatactttttttataaaaatgcatgtatattttcagattactatattgacagatttcatttaactcactttcatatagccataaataaatattctatgaaatggaggttcccaattatatatatatttataaggaaatactagattttgatatactattatttaataattttcctactcgactaaaatgaaaaaaaaacactaaaataatgatatcactaatattattagctggttttttttttttgtttgttgaatctttagttgactgaatttagtatttgactaaaaaaagaatcatatcacaaactaatttgcctgtaactcattgctttaatttgcttttaataattgtcagcaagtctagctttttaatgattagatagatagctaacaaaaataccacactggatacatatgaaatcaatattaagtttaaagagatgcaatacgcaatcgatttgattaatgaatttcaaatgttctgcgttaatttattcaattaccttttaaattgaatgttttcattcctgggctctgccactcactactgtctcttccctaaataacttcagaaaaagctactgatttttcttctcatcgaggttgt

SEQ ID NO: 2832 - DNA, 7040 bp, Glycine max
  Intron number 3 from transcript Glyma09g29490.2 (locus Gly ma09g29490) derived from phytozome v7.0 (chr-ID Gm09; pos 36364405 to 36371444 reverse strand)
gaagatctcgattgagaaccactcgtgttttatatgtaagtttggatgttaccacttgcttttgagtattgaattctggttccattggatggctgggcgttttgcaaattatggtttaggtttttcattgtgctgttgtctgtttctgatggcatcatgattaagataatgaagttactgtggtattttctttgagcttgcagctatggaatatctgtgaaggaaaaattctctcttcatcttcaataatattgtggtttctaaacttacaaattcagctaaattattgtgcagctgctactttatcttctttatgttccctgggttgtgtatgatttggggggagagggggtatgaagtgctttggtgatgttttgttctgttttgttagacacaatcaccttattgatcaatgtccgcaattatggaagttagcatgtgccatcaaaggatgtgagtttggtttctcttttttctgacttgaaaagcaaaagtcttgactaaaataataatttatggccgacttacctctaaggagataaatataaaaattcattgtcacaccagttttaatcttttgtattgttttaatttgagaagttagcaactagtacagcaagcttgagccaccatgattagaactttgctttcataatatataatatatttatataatagtaggacatatacttacagtggttcactatgattctgtgaaccatttgttgcttgaaaaaagatctactcagttgctaatatgaaattaaatgcatgccatgaagtgggtatattttataaaaattatttaacttcttggcggtcaatgactccatactgcattattgttaatttaggaagtagtagattttgttagaatactatgaattgtctgtttggattgtgtacagaagctattgttaagcaggctgatataggcccatgactaagaaatctatgggcctgtttggtttagtgaaatcttttctgtttctattttttgtttccaccagcaattacaaaaagaaaaaaagaaaggttgccacattttcctcttttttctttctaaaattgtgatgcattacttgtcttactcattcatgtaaaaccccttttaatttcaatgtctatctccaaaacccaagtttaaagttagcctcttcccttgattcctcagtcaaagctatatcatctataaaaagcatgcctgtagggataatcttttgtatttctttgataagcatatctaagagactaagactagattaaagaaggactcaagattgagccctgatgtaaacctatccttataggaaagtacttagtttcacctatatcatacatgtcttgactcttgaataacatgaaaggatggatataagctactcgaacagttttcttttccaaagtcttccacagcacttctcttggcactcagtcatatacattttccagtaaatctctttctttgctttggtacctttccattaaacgttgtagaagataaattgcttcttttatccaccttcctggcatgcatctaattgattctctataatcctagccccttctcttaaatctatgttcaatcactttttccccataatttcatggtatagctcacaagttttatcctttgtagtttataatacaccactacactacttataattatggctttccataaattcaaattcaaggtttaagaaggaactattttgtttctcgtgttctggatcagtactcttatgctttgtttggatggggaataaaatagagaagaaagaaataagaggaaaagaaatagaaatgaaatgaagtggataagatatgtttgtttggatgggtgaaattaatgaatgaatgaaataagaggtaataagaaaacaccattttaacctgaaaaaactcttgtaacaacagagaaaacctgcaatgtgtggacaaaatcaaaactgctttcacaacccaatattgtgttttgctgttcaaagtcataacatatgtaagtcagcacatttgtcctgttaacaatttggtgctgcacatgaatgtggtaaagatgttggacctcttaatgaggaccaatgcggatgtgatgagggaggatatgcagaaaagggtgaaagattttctgtgaaaaaatcgatctcatttcatgcctaagattagaggaagaattttatgtgggacccatgaaatgttatcatttctcactcccattttccttcaaacatgattgaaatgttacctatctctctcatttcactcccttctgttttccttcctcatatttcaggcgaaacaatcctagtgttactgcatatctcttaaaaattattggtttgtaaattgaaattcagattaccccgataacaattatttggtggtttactccatactgccggatttttggcagttttacctaacagggtttagacacattcaacggcaaggatcaaaatagaattaaaagtgcatgtgtagggattaaggctgtgtttggtttggtgttaaaccatcttcaacgacaaagcttcatctcacaggaattgcgttgaacatgcctggaaacatgtgttttgagtaaaacaaactcactaaaatgtctagttttagttatagggagtaaaacataaaaatggtgcaaggataaggaccaaacgagtatttaaaccaaaactaaataaagcacatataatataatataataataaattaaataaaaatattaataaaaaaattctgaatagcagctatctcacaatttgccatcccactatagcggttttgggattggccactccataccactatctaggattttgataactatggtaggcctgacagaatattaagacatttattttcttcaagttcagtcattatttgtttgcactatacagagactctcttggggtaatggttcgtcacgtgtacctgacattaaataggtggagtctatttaaagtatttgatgagataaactgagaatttcaacacgacttattgatgttaaaatttgacatgagaattccagtcttttggatctcttattgttatagattctgtttatttattcaattaagttaaatttcataacaaataatgaatgataatttccatggacaatgtcagacctcaagattttccaaactcaattttccaatctgtcttctgttaaaattaaaatttcctttcataggcaacatgatgattctcttgatggcagatgttcagtaataatgtaatatatcaagcttttttgaaagaaaaaaaaattgttattctttttaagtattatggctaaatatgaaggatatgaataaaacttcgtaccccattgctcggaggctcttcgctatgcgaaggtatgggggagggatgttgtacgcagccttacccttgcatatgcaaagagactgtttccggattcgaacccatgaccaacaagtcaccaaggcacaactttaccgctgcaccagggctcgccctcaaatatgaaggatatgaataatgaagcaaatcttttagcactagaaagtgttcacccaagatcttggtttttgttaacaggcggccacactttgctagagaaaccattcaggaagtttgagtaattatattcaaacaagtggaccctattttattttatgcgactatccataaaatctccccaatcagttttatgttttgtcattaagtctagtgatagaagaggaacactaattgataaagtaataaaatataatattgaatactgaaatcacacacaatgcaacaatacacttgctgtcccagagacaaaatagtctcatacaaagagtattctctgttcacaaacagcaaataactacacacttcctagttacacaacctactataagatatattctaatactcctaatacataattacctatgattgtttttttatgcataactgtcatacagtttctagtacaaaactgcttctagtagatttgctatcagatatatacttctaaatcttaatacataattatcagcagttactttctacacataactatcatcctgcagtttctaatacaaaattgcattctaatagatttgctattacagaaccagttattttctcacttatactcctaattattaattacgtccaatctattaatggagctaaacttggatcttagttcccattatctacacgtcaaagccagtagacctagcattttttagggaattaacgagcatgctataaatatatttacaatttacatttaagactagaatctcttgcaccttatctaggctttgaaaagcctattaaatagaattttgactacaggctaccttcattaatttgcttttaagttccaatactgctaaaaagacatgtttgagaaattattggtactgcttgatctggatggcatacttgccctttattgaatttgaattggatttgaccatgccttttactttggcaagtagctatatttgatgatggataatgtacagggtgctttaaaacttctcttatttcagtgctaagggtcatggcttcatatgcttctgttttttttttttttttcaaatctgaaggaccatatagatatcaattatcaacgacaaaaaagtatggttcatatattcattgaatgatcattattgaagtaatgttattttcatttttcctgcacttcctcttattcttgaaagatttcaactcttgaatttgttttagttattgatggactttctatgttcattgttgaaacttgtagaagtcatgcttgctttctttagggccttcttggttccttggaagatttcaattgtagaaattgtttgtatgtttctttctactatctttggcttttgatgctttctgtgtttctcatctgctgactcaaacaaaagtcaccaaatttctaatgaaactatgatgctagatgaaacattggccatctctgccactaaatgtggtatgcgatttatccatgccaaaattctatcttcacaagtgaaataaaacttcaatcttcttgccaggaacattaattgtaaaatgtaaaggaagtcaaatcttgtggtgtattacaatttgataagatatttatccctgataattttgaaatttcaaagagcaaggcttgttgtattgtttgtggaatgtgtgttccactgtttctgcacttgatagcttgttcttaagttggagtttaatttagaaatctttgtccatgtatgaggcattctttttctttttgttcttttttaaaaagaaatatattgccacttccaaatgtcctggaagttacttctattttcttttcgtgaccttttgctggagctacaatatagttagcatctgctatatgatattacttatcagacgccatacacttgagcatgctttcatttatttatttttaatgttcttgcaggtatgaagagttttttcaaaattgcagcattttgttgaatagaaatgatgttaaatatcaattaatgttttgtgacagttgaaaatgttatatttgattataatgaacttacgcaactgtccatcaccattttttagagttctttatataattatatgtacattattgcttcaatatttcctgaattttgtttttattgactgtgactcgttcccttcgtctcttctacgccatatcctacttcgttgtgttagcctaatccttctgctgcatcggtagcaaagctacaatgcacttggtcttcaccctagttggtagaaacactcttctgtaagttaaaatttattgaaaattaaaattttacggatttcatgttttatttaatgaattcttcatgattatgtacttttcaatcaattctaacatagtaaagaatgtgttagagggtgcattgtgagtattccttatgcaatctgaaaaattggaacagaagacacctacatcaccccgaccattactttcgtagatgggactcattctattctttttctcctaagaaattcgttagttttccttgttccaatggaagcgaggggtagtcttcagtcctgtgctgaatcagtaggttcaggacacgttagtttccctcacgcttaatgccatttgttaactttacaaagcacttgtctaatggttagtttgactagaaaggtcaacttgttcacccccaaaatggtggcattaactttgccatcactataggaccttaggttctgaatgaatataggtcataggtggtgtctaatcctttgttgaaaagtttcaatgtttccttaagtcgtggcacgcactttgccatcaactgaggatactcatcctgtgtagagaaatctttgtggagttatttggccaataccaatatagtattgactcagtttgttcaaagatgatgtcatgtcttggaagtgatagatattatgaaggtgcttataacatacaataattaataagttcctcgttgcgtaccagttaatataaaccttggatatgtttattaaaaaaaatcaataaacagataaatgacacctgatacttgatagagatggaaagatgaagttctgaattttgtggattagtccccatataaaattcttcaggggttagaaggaaccaaatactaataatttaaagaaaaaagcggtctaattctaagatcatgataaaagtttttaactaatcattgaattaaatgttttaaacttaaattataaatactaattaagtattaataatagtaagttatattttattaaataaagacttaaatatattttgatctattatgtttaaatttatcatttgatttctgataaaaaaaaaatttcacatttattctttgatagttaaaaagttttattttagatattttgtggtgatttaaaaatgataagtaattatttcaaaatcaaatacaattttttttttgcaattaaaaattgctagaatcaattaacgtaaaaaaaaaaaaaatcaaaacaatctaatggtccatgatgacctactaaaactttctctgcttctccctttttggtgcttctgccaggac

SEQ ID NO: 2833 - DNA, 1366 bp, Glycine max
  Intron number 7 from transcript Glyma13g44400.1 (locus Gly ma13g44400) derived from phytozome v7.0 (chr-ID Gm13; pos 43837671 to 43839036)
taaggtcacagattttgggatcagttttctgaaaggtattgtaccttgcattgtcttattctggtgtttcagagcattaggaaatatatgatcatcttttgatttttgtttctcttaaagctttttgtcttcataaaggtttatatcgttctgtaactaaaaaatgtaccatttgatatttcctgtcctgtaaagtgaggcttgaaattgataagttcaaactagctttttcatcttcattatttgtagctttttcatctctcagatgtatgatttaaaagatcaacttaattctttttttaaaaaagttgagtttgatattctatttggaatttgaccaaaatgtttttttttaactaaatactattttggggtggtcttcaaacaatttatcagatgagtgattcctgtcacgtaggtaattgatggcgccaatcaacacaattccacttggtgacgctattctaaaaagtgttaccacttcaaatgtgtgaatgacttggtggtgccaccttaggtggcttcacctatagtcaaacaggtatttcaaccaaatgtagtctttcatgcattttgggaagtgcatctaatgaaaaatgtgtttgattgggtgaagccattaagggtgacacgactaagtcattcacacacttgagttggtgacactcttcggagaggtgccactagtaggactgacctaatgataaatgaggcctaaagtaaattttggaagagattttttacattaaatgtgttgggcctttttactaacatatttaacattttttttatcaacacatgagacctttgttactttataaatactaataagaaatatttttttgcttgtgggcctaaaacataagctttagttactttacccttgggcctgtcctggccaccaggttgagctgtgttgattgaggccatcaattgcctatgtggatcctgtctaatgaattgtttaaagatcaccccaaagtagtatttacttttaaaaaaaacctatattggtcaattcccttttatcttcattgtttttttaacatgtagtttctagttatttaaaagctagagttcactagggaaaagggaaaagacattcttgaaatttatttctttaatgatatgaaatttgactacttatccttctaagttgaaattatgaagatggttagcaacaagttgcagtctttaactctggcaatgttaaaatactcatgttgaatgccatgagttccaaaatgcagggattttgattttacagtgtgttaatggttgatattcatcttcctttcttccattttcaataatttctctgttgatttcaggattacaaaagcttaatttgttaaatttggaaggc

SEQ ID NO: 2834 - DNA, 2537 bp, Glycine max
  Intron number 7 from transcript Glyma10g12560.1 (locus Gly ma10g12560) derived from phytozome v7.0 (chr-ID Gm10; pos 13734873 to 13737409 reverse strand)
ttttgattccaagaactaaggtggaatataaatatattctgattttttttgtttgtcgtttttctttcccttgctgttctttccactgtttggagctgttattcatgactcttgtctagctaattatcaggctcaaccaatccatgttaacatattcttggtgggattttctatgaaatcatattactgttcttctgcctataattagttgataccaatctacttgtcaagggtggctaaagggtttgaatcaattttgagatttaaagtgaagggctggttctctttgtgatgattcagactggtgatcctttgtggatagtacatctttgaactatgtgctaggttaatatggacaattgatcattgctttatctaatattttgaggattatgataattttgactttcatgtgtagcccgaacataagttatttagattcccccgaatgtataaccctcttattcatctctgtggaaaatgccttaacagtttattcaacaaagttgatttaatcctattgcaaatcttattagggtgtctgcatttcaaactctgtttcaccttgtattgttggttgtcctgacatcttgactcttcttgtaaattatgtttgtcttctaaactagatgatatagggcacaaaaatagttagggagaaggattggaagcggaagccatgaaaaaactagggatcgaaacaaagctctgataccataaacgaatctcaagtgagagaatatagaaaactgaattgaggtgaaaagttgatattattcaacccaaagaatgaatagtttacacctcagtttatataggcagttacataactgtaactgtcaactaactatgaactcactactaactatagtttatcctttacacaatagctgagaaaagaaaactatctatcgagtaagtatactcctatagggggttctaactagacatgtttatttgggttttcttgaaccattcgatcatagaaaaacaggaaaattgaaaggtcactggtttttgaaggtagggaaatttgcgtgctatttgatgggggcttaggcccatttggtagtggatatttatttgtgtatttaggatccatttcagtgacaatattcgagttatggttctgaatttatttttacacttctttcagtgttggaattggtttacaatcatgattctatgtttgggctgtggtactatgccaagaattagggtgtaaaattagacttctaagtttgattccaattctattgcttgggtgttagagctagaaattaaaaaacaaaatgcaagtctcaaattaaaaattatttaatatactaataattagacatttttaatataataatataattaatataaaataccaaggaattgattaaggaactaaaaagagtagtatttatcgtggaaatcataggagagcacaaaaaaagtcatgggaagcacaattttgcacctctcaataaaaacctttctctttttagttccttaaacaatgtcttaaggacattggttagcatttgccatataaaaattaggcttattgggcccacttccaattccagacgttaaacatacacatgatgatttttctagaaatgaacaattgggggtttgatgggttggattgttatttgtatcttccatggaaaataggttagggtagtctacagtatttttattaaaaacaaaagttgaagagaagaaatctaggcatcacatttaggtggaaggactatacattcacataaattaattttagctgttagatttgaaggaaaaaatttgaagcagggagtggaaggaatcaataaagaacgaggggaagagaaggacagagaacgaagagttacatattagagatttcttccccttgttaaaaatttaaaatcctccaaaatcttccctattggggaaatataaacatgttcataaaattgaaacagggagggttttggattgtcactcattcattttcctttcttcagattctcaaacaaggagatggtttaattaaataagaatttgtgaaattacctgagagtaatcgtcttagccctttgatttgcattaacagaataccataaccaaattacttaactgtagggcttgatgaaagctatttacagtaactttgtttttttttccagtaaatgttagctcccaacttgttatatatatgtcagtttatcattagagttaacagatgagataattgtttctctagaaagaatattttgtttcattacttgttctacaaagtgttgaaatagtttaagctactcggtacagtaagttcacatgattttaatttaatttcaaaatagatagactttatctttgtattttactttcatgctttggcttctttgttcttttaaatttacataacacattcaatcttacatatattacctaataggcagtgctaaccattatattaggttttattgttcttttctgttggttgctctgaaatatttactccgctatgttgctttcagggttttgtttcagcagtaaaccat

SEQ ID NO: 2835 - DNA, 2586 bp, Glycine max
  Intron number 9 from transcript Glyma20g08930.1 (locus Gly ma20g08930) derived from phytozome v7.0 (chr-ID Gm20; pos 12663781 to 12666366 reverse strand)
tcaggaaggtgataacactggaaaacctattattctttaatatctagactggcatttctgtgcaactcatatatacttgctagagctcctgggcacaaacatactatgtgttggtttcctatagtttcccgactccctttgggtgtgagattaatcccttctgctacaagtagtgtctcctggaacacagttcacttaccactgtgcccaaccccttgtgggtatatatttatacatgttaatatccattttcgtagtgtgtctctgttttctttctcagtatgcattctgctcatgcttagcaatgcaggactaaacataacccaaatttcagtgctactaatctgatatataatgctaatattctttaattaacttaccctgtatgaagacaattatttaaaacttaatatgattatatccttaagcacttgcaatgtaaacttagtacatgagtggttaggtcatccaggaaatctaatccatttgattatagattgttaaaatagataaagtgagctgtcaaatattgagggatatcagtaatcagaatttttgtataatcaccaatttcaacgaccatctttaatgatatagtgtgtcctgctattaattcttttcatcttttgtttatgtcacatagatcaggttaacacaaccatctacccaacaaaactacttaagaaacatataatgctatagaggcatgcagaaacattaaatgctaatgctataggggaagagggccccaaagagaaactcagataataactttatagaaattagcacttgttaagtgattgtccaataatctaaccaagttgcggcatgatgtttggatattgttgaccacctaaaaccatgagtcaccccacctgcttatcaaagtttatttgccaagactcttaaaacatgtacttcctctttgtccataaaactgtataaactacaagagaactcagatccaaagcaagttactcgagtagccttttggaaagagattattaaaacctcaatggggattgatacgtaactacttcctggttgtgttaggaaaatccctctagaagtttaggctagtagaaaacacattatgttgatgttgctcaacaaataaggattggagtctggaatgacccggaattgaaaaatagaattaaatcagagaaaaataaaaataaaagccaaaacaataaacaacattagtgacaattaatctcaaggtagcaagtaactaagcactggtaacacattgaagatagtacgatactaaaacagttattaacttataatttattagtgaaaattgagtctgttctgcaattgtttagcctttgatatttatatctactgaacagagtaaccaagtctgtctttagcttgattcaaatgacaagatatcttattatttcaaacgatttgtaaaattgctataaaattgtatctttcttcttattgtacttctttttttccctagaaaaatacaataattttaattgtagcatctcattgatggttacacaaatgattgcctttaatgtggactgcacatctggtttgtaaaattggtcatgagttttctgtgatcttgaactatggtgattgaacaatttagaaaatagcactaaatttattataatcctttctttctgtcttgagaaccttttaaatcaaactcaaccatcaaatttcagacagatagccttctgaataatacaagccatcagttatccatgtctgttgtttgagtctattcttcataggttgaaactgtcttctgtggaagggaaaccctaagaaagagctttctttctttttctgttaaggtttcattttccaagaacagattcattctttgttctttctatctttcattctgttcttcaattctggtttgttggttcatagcaagcatctctcttttactgtctttctttgactttgaggaagatcccacgaatcatcttctatcgacatcgtctgcttactgttaccgtacgctcttcttacccaacccaaatcatctggtactttgtccgctctccctttcctggtgaaggagagagagttttacaggctgatgcagctaagaaagtcttgttgaaagcaggaacgaagactgtgacgactatttgaactagtttcaaaggattgattgacccttgggagtgaatctggctagggcaccctcgtaaggcgtagggtagggatttgaaaccggaggcctctcctcatctagttctttcgttacgccgagaagaagcagaaagaagcttggaagaaggatggtcaatcttctcagtaatgaattttccagaaatacccttgtagtttgaatttattcctttataattctagttctatcaagggttatataataacttaataagcaaaagtaaactgaggtttacacttccctgttctgaatgatactatttattctgaagtagtccaatgtttattttgctcttctttcctttttctgtgatataaagtcttgattttaaaagttgcaatcatcttatatgctgtcttaatacacatcctgcagtggaagcaccattgttggaattggttctcctgatc

SEQ ID NO: 2836 - DNA, 2714 bp, Glycine max
  Intron number 1 from transcript Glyma06g03720.1 (locus Gly ma06g03720) derived from phytozome v7.0 (chr-ID Gm06; pos 2616278 to 2618991)
gcattggctggtaagttctatttctctactcttcataatgacaattcgtattatgaatagcttgattctaattttgggttgcttaatttcatttatttgcattattgtggttcttctaaccaatgtctttgtgtcagtcaattttggtatttttctgttttattaattcgtcacgcgtctaattctaatcaaatttaattgctctgatgcccctggttgttgtgggtgtcttgttttttgaaatactctaaacctaactgcgtgaattgttatccgaatcattcactcagctattttaatttagattttcacatgcgggtttcttcgtggtgtgggttgaataggtttaattcgtttgcactttttgaggaataattctgaactgttacttgtgggcatccattgcatgtctttcttcatggctggatctggtgttttatgaggtgcactatgaggatcagttgttaattgggtcttttatttgctctcatttattgatggaagtaaattaattgatccttgctctgggttttggtattggtaatttgaggtctgagctctgaattatgattgtgttattaatgttgtaattgaatcagaattagggcaagaagctaatatttattttactccaatcagaatctgggctattctttgaaggtttaactataccatatttgtttattttttccccaatttcccttctctgtttttttttttttttttttaaagtaaaattatactgactgattatacatcttatatgaaaaattcgcattgaaatcaaactagtcttggggctttcttttgggagatttgaatttgaatattatttataagtataagctgtatttcaaactaggttagcattagtgatagcaataagtagggtcttgctaaagtactataatacgtgtctccataaccattcaacattagaaacataaccttaaatcatccaaacataattctaacaacaaacttctagaactaatttttaaacttttttttttttttacggtaacgactggaattcattcaacggaaaaaagagttatttacatcacttaacaaagaaggataaatgcggataaatactggtaatttttaaacttatacttactctccaaaacctacctaaaaatgatacattaacactaattagtgtatatacatttttaaacttatactaaatacattccatatataatagatattacgtaaaactactagtgtgtgtctgttttttaaattgtcaattattttaaattctgcctttatattaagtttaagatttttttatgcaaagttttatttgctatagaattttaaatttattttatatattaattatttgttttaaatcctgattacgtttaatgtaaaattacttcatttcttcaattcttttttgtaggcttggtgaaatatttttaagtttaattgaaaaaatattcatatagaatattgatatacttgctttgtttatatataaaagtttaaacatatattgaaatgttttgattgtaataatcaatgtttaaaaatattataacaataaaaaattaagatggctaatattgacatttttatcataataatcatatttatcttatgtattgaatgcttatcttataaatggtacgtgattcaaatttatatatgaacatgtgtctgtagtgtgaatgatattgtcacaatccactcttggatcatgaccgacacatagactatataatttccttagtttggctagtctagtatctccctccaaatcacaattaaaagatcaacaaaaagggattaccaaaaatctagcggagttttccctaaaaacaagacaaaatccacattgaataacttgggaaaacatatcatatattcatacaaattatttttatatacatatatccagatccaatcgtcagatatcaatgccacacattacaaaataggcccttgacatattatccaaaatatcaactaatagtgacgttgatcatacatactaatcatcaaagtgtctcaaaatatcataattacaccataaacatatctataagataggattatttacatctcaaaaaagggattttctttatatctattcctaccgttttccctatagttgaattatattggagtaaaaaaaaaaaaactttccatcaaatgcaatggaggactatcaaaaagatggatgattgttatatatatatataaacaaatcataggaagtcaactactctactatctgtgtatctcaaagaataaatttcactcaagtgaaaataaatattttacttcattctcaagtactcctagaatttcaaagacaagaatgcaataaacttggtaaactttggaacaatggaggaaaatgagtggaaggttgacaaaaaaaaaattgtatttaaataattaatgtgtattaattaaatcactatattttatatacatgtgggaatggggcctgttgggtactataatgcccatacctgcacctatccccattgaattttgcgggtttttcattgccttcagtttcatctcttttgagcggttatttactctacatgtggtgattttttttttttttgggggggggggggtacgcacaaggtcctggtagaattgcactccctagttagcttttgttgttagactattattttacattgttcttaattggtataaacaaatgcaggttcttacaa

SEQ ID NO: 2837 - DNA, 2551 bp, Glycine max
  Intron number 6 from transcript Glyma16g06470.1 (locus Gly ma16g06470) derived from phytozome v7.0 (chr-ID Gm16; pos 5834821 to 5837371 reverse strand)
gcactgagggatttgggttgttttctcacgagaaggtatgctttccataataattttaagccttacctgaataatgtttcttccattttatctatgcaagtattttttgtttttgtttatcttcagctcttcactaatatatgccaaatcaacttctgtctaataaatgctctttctcttcactaatatctgtttgtattagttggattctagaaataaacattgaattctgaataaattgtagaaataatttagtttttagtatgaaaatcaacaaatacagggtttcttcctaagcaggatttccctccaaaacaccaaaaaacaacaatctgaaaccttaattgccttctgcaattgtcacacaatgcagatatcactataactgagaaacaccattacagaattctaactttctaatttagaacttggcctatcaatgccttttggtacaaaagcagccttgccctccggactgaaaaaatgtttgaatttggtccctacaactcaaccctttcatcttcatcttcatctcccaaaataagcttccttaacttcctttcaagatacccatgatgtggccctcatgttttttgccacattgaaaacaattaacttcgcccaacatactcttaagtaaatggctagtgccgcagcttttgaacaatgatttttttgtgaattactagttgtagaacttgttccactgtatttctatctggtttcatccttacaaaagaaacaaaatgctgttctagagcttgattaggactcatattccatgggttatacccagaaatagccaagaccccgtgttctcatgttcaacaccgcaccaagcagaaagacgaggatttcaattttttcctctaaacccaatcataactaagttaattgttcaaaaggggtaataatcaacttttttggtcagatttgagtacaaacataattgtttgggtaaaatattccccaaaagttaccttcgttttgacctctattaattcactccgtataagagtatttttatcccctatttctttctttcttcttcctttagacttccaaattcacattctcctaactattttttatctaatttgttctgttctttctctattatttcaccatcgtctttcatctttttatttcattgctatattcttatttcttctattttgatggtgattgtgagtttaaattgtgatgtattattttatttaaaataaaatttaatatttctttagaatatcctgctatagcattttcagagttagccactgtgtgctgctgtcccagactgataactattcaaacatcaacaaaatggggtttcctcctaataaagagcttttaccttaaaaatttcaaaatgatgatgtaactccttaattgtcttcttcaggtgtatcacacaacctatatatcactctaactatcatgcaattgcatataacaaacgataaaaaattagtttcctaataacataatacaaaactctaattaatttaaaaattgacctattagtatctttcattgattgccacttgtatgctggttaataagtactttcacttatggaggtcctctgtagagattttagttgattgtgtagcaagcaatgcgtaacttacatgccagatactattttgcttggactccgcctgaaagcttaaactttcaggtgaattagtcctttgcattcatatgtgacagttatcttgtttttttttttgttatattcaatgtctttctgtttttgtttttcattttcatatttcttgttatagattttctcctgataatattaaagtggaaatcaatgcagataagatttaatgatatctttttgaaacaactatagagtaaaaatgggaaatagatttgtaccaaatatactggagcttatccttaccaactgagttaattgatggaatatgatggtaactaataagtttgtacaataactgtagactatatagtcatatatgtttggaataatatgcaggataggggttgcaaagtgggttcatccaccaaaatattttttgtattgagggaaattatagtatattatactatatataaggaataactcttatatacgtataatgtttatagacataattaattaaaaatgtaattgaattaaattaataatataaaaaggcaataacatgcttattgaaattatataatgatcatcttgcatttttaattaattatgctggtcaacaatttagttattcaagaattgctaaatactttggacgtgcctttggtgggttgagtctcccaatctattctgccagttttggcaggtttacctgtcaagttcaaccttgatgatagaccaggtgacttggttaaattgaattttgtcttaattggtagccatcatatgttataggcttattgattgaggacattttcatattctagatagttccgaatttacttaaaatagaaagagcaaacccttgtgttattttcttgattctgcacatcctaaacatcttgttttttttttttactttgcagtttgaggaatttg

SEQ ID NO: 2838 - DNA, 2489 bp, Glycine max
  Intron number 15 from transcript Glyma02g09420.1 (locus Gl yma02g09420) derived from phytozome v7.0 (chr-ID Gm02; pos 7386225 to 7388713)
ttcaagttgggaggagagaggtatgagtctatctttttgttaaatttttgcaaatagatccaatccaatttccaactctttcccttaaggtgttttttaaatggttaaaagaatgataaattctgattttgttgggtctgcacaagttcacttatgttccaacatgtctgttgggtctgaaaaatttgctaaacagtgtcgtaatcttaacaaacaaaaaatgatttgagcttttgtatatgtcatggagaatgtttaacaaatgctggatataatgaatctaatatcacaaattcacaatgatgtttgatgaactcttcaaagttttctgataaagacagttaacttggaatgaaatggtctaaaagttgatgataaaattgatttcacttgtttgttttgttcatttgttcgcaattgctcaatcatcaattgttagggtaatgaaatttgactttcatgtaatctataacttctattttcagcttttgttggtctaagtctcctactctgtcagtccttactaaatctttcttcttgtgctataattgttcttttttttccccaacaagtctaaaagtgataatgaaaaatattatatatctgttacttttatggaatacctacgtcctccattgagctgcaatggaaaacatcttggtggtgatcttgggacaaacatctaagagtattaagtgggttgtctttggctgttatctgcattgcctaggttaagctaactaacaccatgtaacctgcatgtcaagcttatacaacaacaacaaagctttattatcccactaggtgaggctatcaagcttatctatcaccaaagtatatacagaaaagttatattccaaaacaaattgtactttcagatttgcaaaatatttgatttttccttatatctttaacatcccaaaataataaatacatgctgaaaatatatataacacctaccagaaataaataggaaacaatggctttcgatttttaaaattagaatatttaatacatctcaagatatttctgaatcaatctcgtatagctacaaaatgccaatgtcacaaaaataaataaaaaatgccacctatacaaaggaaggagctagcataccaaaataatgctgagaaagaacatcgaatccaagcagcctacacaaataaaaaataaggaaatttataatgtaatgtaaagatgaaatttacaacatatatataataaagttatgggttttaacgttttagggtcacgcacgtgagaaccaaaatttgaaggctccatctcgttaatagccctcttttctccttggattaattctttactatgagtgattccatctgaaggaaaccctttcatctgttgaatcaaaacacatatattatttcatctcacagattcctctggtgttaagaagtcccacatcttctgttttagttctcaaggtacaatttatatatttattggacaacttcaagttaattgattttaacttgaaatctaattggtatcggagcatatcgcctccattccattctagtgactttaattacgatttatgtgtccctttatatttttcctattggcctattcccactcctacttatcaataaacaaacaaagctcttaatagtcaataccaattattcattcaagctaaaactgatactttttttattgataagatatttgagtattctctagaactaaatcagttgtactctttttcccatatccttcttttaccaccccatatgttgatagttcctcgtgtaaacatcacgagagatgaaaaaaatcaacaaggcccttcactatttctatacatcaaaaagtccgaatggcaaatcccaattcatgttcatcaagccatcgtaagtatctcttagcacttggtttttggatatattaacacgacacatgcatgtgtgtgaagctaatgaactgagagcacggatggggataatatttaactttcaatcatatgtgaatggccaacattagctataacaaaaatcaaatcagctatccctcaccctcaacaacattgctactgcatcaatgatactgtgagccacccgtaaaactggttttcaacattattggcgagaccaaacatgttattttattgaacttacaacttcatgctcattacacctactgcatctccacaagatcaataatagtgacttgagtctggataagtatgattgatgatgccatgttaatgtcgagaaggttcttttcgcagaatccactattaaattattcagtgatggaattatctgttttagtagtcaaatttgagttagaatatttatatacaatacttatctgttattttttagaacatacgattttcttttatgcttcactttactggactctcaagtgctttgtagtgaaataccacttttgacaaccttggtcacaaggttaaagcaaaattgtgctgtgtatgcagaaggatcaattgggggctttgttgg

SEQ ID NO: 2839 - DNA, 8608 bp, Glycine max
  Intron number 3 from transcript Glyma08g36030.1 (locus Gly ma08g36030) derived from phytozome v7.0 (chr-ID Gm08; pos 33505045 to 33513652 reverse strand)
gcaaaacttgcaggtatatttattcatgcctcgattcagaatactatcttttcattttgtttgaatcaggtaaaacatgattataaggtacctcaatttttgttgattttttttttcatctattgcaaacaatagttttgttccttgcatttttttttttataattagtgaattattccttactcaccctattatcctttatttttttaaaggaaacaaacttatgttatttcatataaaataagagaatcaatacaatccggacttaaaaaaacacatgtggactagcaaaagatctagatgcccatgctaagcaatgagcaacaagattagctagtctacgaactaactgtgtattatagttgactagggtattttgaatatgagtgcaacatctaagagtatctccaacttcattattcgaaaagttcttgttgtggactccatcaacgattgatttaattgcaatccatctctacaatgatattatttaagtgcaaaacaaatattggtagaagagctgtgaggagagccactgcctccacctcttggggtgtggggtctccttgataactttgagttcttgcagcaatataaacaccattagagtccctcatacaagctgagatgccaaaagagttggtgctcttgaatagcgttgtgtcaatattgcacttcatataaggggtagatggtggtatccatgtgttatttttggaattgttggtgatgagagattgatgtactcttagggaggggattttaccacaaatttgcttccaatcagatagatgttgaagagcgagatgaactgaaagcttcgttggtattttgtttaccttccaacaactttttattactttgccttcaaatacaccaaaataaagccacaaacttatcaatgttgacctggctaaagttcccagtatatggaatatgagtgcctctatgtcctccatgctatgggataatggtctcgcgtggggggctgtccacaaatgtatgccattcattttccaagctattctcatagaaaggacatgctaaagggaagctaactcctttggatgagagacgccatctggttgagagtacatttcaagctaatctccaaaggaaaagtttcattttgtgtggaacatgcagctgccgtagtctcttccattatccaccaacatgcagatcatcattgtttgtcatcttctccattatatgatagtaggcatatttcaaagaaaactcaccattcttactaagcttccgggtaataaaatctttggtgtttggaagacaaatgggcattgataggatgttgttcacgtcacttggcaagaaaatttcatggatgtaagagtgattgttgaaattgctacaaatttctagaatattcttaaatatagtgtgtatgaatatggtagaacaatctagaactataatgtgtatgaatatgatagaacaatctagaactataagtgtatatataagatagaagaatctagaactattatgatactaatctatcatgaaaactctagaaagacctaaagtaatgtagaaacattcaccaccattgagaggttggtgacttgagcctataaataggcaattggtatgttgtaattgatcatccaagaaatcaatgacatagccttctttctaaagcatttttctaaaactatcaactatcaaccatcatctaatcaactatcaacagtggtatcagagttatgttcggtcatacattgggcgtagttatattacctacctaccattccaaaatcctcccaactacttcaaaaatttcctttgtactattaacccactacaataatattttttctaagctatgcataacattactcaatcattaactatttctgtccctatcttcaatagtgaaaattatgatttctggcatattaaaatgaaaacatatttttcatctcaagatttaagggacatagtagaagaagacttcaccgttcccgtggatacttcagctcttaatgcatctcaagaaaaagagttgaagaaaaataaacagaaaaatttaaaggcgttgtttaccttgcaacaagcggtgactgatccaattttcccaagaattatgggagctaagactgccaaagaagcgtggaacacattgcaggaggagtttcaaggaagtgttaaggtacgtgctgttaaacttcaatctctaagaagagattttgaactattgaagatgaaggagtctgagatagttaaagattactattctaaagttaaagaaatagttaatcaaatgagagcttttgggaaatatattcttgacaagaaaattgtagagaaaattctaattattatgccccaaaagtttgacccaatcgtgacaacgattgaggaaaccaatgatctgtccactctatcagagacaaaacttgtgggctctcttgaagcatatgagcaaagactgtataggcataaagaagatacacttgaaaatgccttccagtcaaagtttaaatttcagccacaaaacaaagaaaatggaggaaagaaaaattatggagaaacttccagaagaagagaaggttctaggaatttccttaagaacaaaacagataaaaatcctccatgcaatatatgcaaaaggcaaggccacacagagaaaaattgttggtttcgtaatatgccacaatgcaaccatagcaagaagtttgggcacgtagagaaaaattgtcgcaacaaaaataggcatcaagccaatatcgcagaggagcatgatcaagaacaatgtatgttctatgccactcaagactcaataaaagaaaagggaggaaggtggtacttgaatagtggatgtagcaatcacattggccaaatgatggagagaggctacacacttcactttgaaggaggtgtatgcaaaatcttagacaacaaaaataaaaggtctgagatagcccaagtaaagatgaataagagcaatagaagattccttctaaatttaaaatatgcaacaaacattgccatgaaggtacaagttgatgattcatggctatggcattgaagatttggccacttcaacacacatgccttgaagttgttacatgagaagaacatgatgagatatcttccaagcataaaggagaacaatgaagggtgtgaaggatgtctccttggtaagcaacaccgatttcctttctcaacaagcggagcatggagagcgaaagatctattggagttgatacatacagacgtctgtggaccaatgaggacgccatcacatgagaacaacaggtacttcatactcttcattgatgacttctctagaatgacatgggtatattttttaaaagaaaaatcagaagtctttggagtattcaaaaagttcaaggcccttgttgaaaatcaaagtggaaaacgaataaaagtactaagaagtgatcacgacaaagagtacatctctcgtgagtttgaaagattttgtgaggatgaaggcattgagcgacaacttacagtcgcatattctcctcaacaaaatgaagtgtccgagagaaagaatcgcacagttatggaaatggctagatgaatgctcaaggagaagggactacctaacacattttgggctgaagcagtctacaatgttgtttacatactcaacagatgtccaactaagtctgtaaaagacaagactccaattgaagcttggaacgagaagaagccatcaacaaagcacctaagggtctttggatctatatgctacattcatattccagacgtgaggaggcacaagcttgaagacaagactatacgaggtatcttccttgggtataacaatatctctaagggctaccatgtttacaacttgcaaactaagaaactcgtcatcagtcaagatgttgaagttgatgagtacgcttcttggaattgggatgaagaaaaattggagaagaacgttcttatacccgcttaactacctcaagaagaagctgaggaagaagaccgaggtgaaccaccttcacctccaccacaacaacaagatcaagaactatcatcaccagagtctactccaagacgagtaagatctttggtggacatatatgaaacctgtaacttggccatacttgaacctggaagctttgaagaagcgtcaaagcaggaagtatgggtcaaggcaatggaagaagagatacagatgatcgagaaaaacaacacatgggagttagtaaatcgtccccatggaaaagatatcattggggttaagtgggtctataagacgaagctcaaccttgatggaaccatacataaacacaaggcgaggctagtagctaagggttactcatagcaacccggaattgactacaatgagacatttgcaccagtagctcgccttgataccataagagctctaatagttcttgcgtcacaaaaaggatggagtatccattaactagatgttaaatctaccttccttaacggcgtacttgaagaagagatctatgtggagcagccataaggattcgtgtctgaaggcaaagaaagcaaagtgttaagactaagaaaaacactctacggtttgaagcaagcacctcgagcatggtatagttgaatcgatcagtatttcatggatcgaggattcaggaggagcaagagtgagcctacactttacatcaagtttcaaggtcagtacactctcttactctctctatatgtagatgatcttatctacacgggaattaatactaagatgatgatggagtttaaagaagacatgttgaagacctttgagatgaccgaccttggtttgatgagttacttcctcggcatagaggtaagtcagagaaatgaagggatattcatatcgcaaaagaaatacacagaaggcttacttaagaaattcaagatgtatggttgcaaacctgttgctactccactcataacaaatgagaaactacagaagaatgacggagcatcagaagctgatgcatccaaaaactgaagtctaattggaagcctcctatatttgacagctacacgacctgacataatgtatgctgcaagtcttgtatcaagattcatgcaaagcccaagtcaaatacactttggatcaagaaaaagaattttgaggtatctacaaggaacaaaagagtttggtatatggtatactaccgaaaccaactcagaattacttggctacatcgacagtgattgggtaggttcggcagatgacatgaagagtacctctgactatgctttctcactaggatcgggaatgttctcttgggcgtcgaagaagcaagctacagtagcacaatgaacagcagaagcagagtacgtagcaaccgctaaagcaacgagtcaagctatatggctttgtaggatacttgaagacatgggagaaaaacaagataagcctactaaaatcaactgcgacaacaaatcagcaattgcaatggcgaataatccagttcatcacagcagaacaaaacacatagcaatcaagtatcactttatcagagaagctgaagcaactaaaaagatcaaactcgactactgcaaaacagaagatcaaattgcagacatattcatgaaggcgttgccgagaccaagatttgaagaattacgagctatgctcggagtcacagaaatttgcatcaaggaggagtgttgaaattgctacaaatttctagaatattcttaaatatagtgtgtatgaatatggtagaacaatctagaactataatgtgtatgaatatggtagaaaaatctagaactataagtgtatgtataagatagaagaatctagaactatcatgatactaatctatcatgaaaactctagaaagacctaaagtaatgtagaaacattcaccaccattgagaggttggtgacttgagcctataaataggcaattggtatgttgtaattgatcatccaagaaattaatgacatagtcttctttctaaaacaattttctaaaactatcaactatcaaccatcatctaatcaactatcaacagtgattccacaaggttagtgaggcatccatcaagagccaaactgttaaattttttagcccatgtggtggaagagtttgaacaaatgaattctcaactgagaaaatccaagggtcattatattctagatatttattgaatttccatctcacaatcccatctaatgcctgctttgactagtacccgtgaaaagtggatgctacaccatgtataatttgggttatgtcatacattggaaccccaaaaatccacctttgaaaaatatttagttttgaaaacttgtgtaacaatagcatcaaggtcagacataaaattccaatcttgcttccctagcgtaacaaaactataagcataaagatatctaaatctcatgcattcgagttcctttattattattaattgatcccaactgagccaatttatgcctttactatcatttccgtttgaaccccactaaaaagaattcatcattctctagatctcttcttgaagggtggaagggagaagaaaagtgctcatgcaatatgatgggattgcttgagcaactgatttgatgagaatctccctactagccttaaatagatgtttccttgtctagtgttggatccttttccagatttgtccctgagatagttgaaaaattatttcttctttctccaaatcatggatggcattcaaagatatttgccaatccctatgcattttatgaatcccagtgcttgtgatatgttctcctttataggctgaggtttatttctattgaaaaatctaagacttctagaaatttactgcaaaaccataaaagccctaaaaaataccaataatattatgaattttatcaacctttttcttcagatgccctacaaaataaaaaataatcgccagcaagaaacaggtgtgtgaggagaggagctcctcttcacactttcactccattaatctcacctctcccctcataattttttaatattttttagagtccctccatacacaatatcaataggtaaggttacagtgagtcatcttgcctcaagcctctccctggcaaaaaagttcatacgtcctccccattcacaatcacattatactccacagattcaacacacatatgcatccaagagatccatttttcatcaaaagcccatcttgtagagaatagaaatcatgtatctccaatagattttatcaaaggcattgctaatatcaaattttcctctaatttgcatttcttgtgctgaatagtttcaattgccaccaaaacattatcaataatagaacacccttctacaaaagtaggttgttcctcagaaatacactttagaagaatactgggtctctttccttaatgatgctgagaatgagaagaaattttccaaaaaaaccaaggcccatctttcattacatactacatatcattttgatggtaaaattgaaagataaagactcattttcctgtttttgtgatagaaattgcttgctttggctgccatacttctgccatcctctctttgatgatgagagtgtatattgtcatatttgtgagaaaccttccaaccagacagaatgaaaggtttcttgtttccttcacaatagccttttttgcaaaaatcaactcttgttagtcatcatccagtgaaagcttttcgatctctggatactacatgttcaaaaagaaagaaaatatgaaacaaaactctgataacttctcacctcaaaggttgaaaccaggaaggagaggaggaccttctcatagggacctactcactctagtatcctaaattccataaaaatggatgaaattcattaattgtaaaaatataaatacgaggatcaaaactattattttgtaagtataatgattaatatcaattttaactgaaaattgaaaaacttaaaatgcatttttcccataaaatattgatttagccaaatagcttcagtcccacagtctaactaatttctatttaaagtagctggttgcttagttaaatatctttgttctttacgtaactgaatagcagattgagataactgaaatggatcaaactagggtcggaaccagaaaaacataatagggggccaaaatttattacatggtaagaaaaaaaaacaatgattgttacgttttactattaataattgttttaaatttagttcaataaaaaataaaatatcatgtgcatgaaagtaaatataagtacttttgtaacttcttttgtaactacttttgatacaaagaaaacaataaaagcaaaaaagatttctttcaagtcatcaaaatcatgatattatttgaaatcttgatttgataaactcttccataatttctttaagttaagccaaagttaattttttgttcacatgtgtgataatgatctatttgtcaaaagaactcatattcaattatcaccttgtacaaaatttcttaaataatgtgtttagttaaccataccaatctttcagggttaagcttataatgaataagctttttatcttaagctcttattgaatgagtattatttatcaaaatttatccataatgttatttagttatgcttgtgtaatatgtggtgtttgacatgttgtgatgtgaatttgacaggaa

SEQ ID NO: 2840 - DNA, 1122 bp, Glycine max
  Intron number 1 from transcript Glyma11g13020.1 (locus Gly ma11g13020) derived from phytozome v7.0 (chr-ID Gm11; pos 9291949 to 9293070 reverse strand)
ctgggggttgaattctacagctacacggctttctggtacctttttctttctcctttctccccgccattctgcagtgttttagccgctctaatgcttctttttcctccatatatatatgttattcatagatcatctcatctagcattgagtttattcagctcaaaaacaggaaaaagaataattaattttatgccaagggtgattttggtcattgagttcattcagctcaaaaacaggaaaaggagtaattaattttatgccaaagatgatattggtggatgatatatttcttagcaagtttcctcttcgagtagacttttcaactttttagcgtcaggttgcttaatcttagagcagtcaacttattctctatggagtggcggaagagaattaattcagttgtttacctttaacttttcctccaccctttggctattgttttgcacccagcgatgagacagaaggattttgaatttcgttattctattgatatttctttactatgatcaaattgctactaaaatcagtattttatataatgatccaatctacttaagcaccaaatctctgtttgcatatatagtgttaagaactggtcggtataatgaaatggcatcacagtgatcttgatcgatcctatttgtgataagtgacaaaagaatatatatatatatacgcacacacacactcatctaaatttattatgaaatcattataaattcttctcctagagagcaaagaattatatcagcaagaaagccgttgttattagttcttaagagaagctttatgaaactattgaattctaaaacaaaagcttgatttgtattattaaattgtcaagcacattttgtgaatttcaacggaaattactttttctcccatctcaccatttactcaacaaagccgcagttcaggttgtcagcacatttgaatcttttattgataatcttctctatcacttgttaaatatgcttaaaattctgcttctgttatttgcatcacataaatggcaggagctgagcaggcatcattagcataattgaatttgttgatttttctgttaattaattatcttatttttgtctccactatccatgtcctagctatttggtgacaatt

SEQ ID NO: 2841 - DNA, 1280 bp, Glycine max
  Intron number 4 from transcript Glyma11g06620.1 (locus Gly ma11g06620) derived from phytozome v7.0 (chr-ID Gm11; pos 4660534 to 4661813)
caaatagcgctgaatcagtagagcttctaaaggaggtacaatgtgattttgactaccaattcattacaactagcatatttttgctcacaaagatgataacagtataaaagaatagaaaatgaaaagcttaaaatttgagtaggcagagtagctaaaggatgtctctgattttttcgcttgtgttatcttgctccctttctttcattaagtgcttttgatgaaacgacattcaagctcagctgattgcccagtccataacccataatggagttaacagaaatagatctagaaatttggcattaaaaggttttgatcatagccaaaaaaaggttttcatgattatttgtttttgttgacattttgaatttggtagtattttgacctccctttactgccgctataaaccaaaatgaggcattttttatcaaataaggatccactgtgattggttgtaggtcccactaattttatttgataaaaattgtcttttttactctagcatgatttattcctcttcaggagaggatccaaatccaaacttagtgagccatccttctgcttcatttctgctgaaaataaaaagtttttcattactgtagagtatgcctaggtcattgtcctctgtttgttttgtttatattacactaaattatctaacttctaactgataagttataacaaataaagaaaagaaaattgaagtcttcaacctaaagaacccaataggctgacgccctataaaaaaataacgtaatcaaataataagaaaaatacacttttcataatgttttgtctcccaggtttcagcaaatctccataaaatatactgtttcaaaatatccatcattttgcagaataaattatgtttgattttatttgttgatatagaaagccaaactaattatttttttccaactttatcctaccctcttgttatctccattaaatggaatgcgaaaacattaatgaagtgattttgttgtgttgagtatttcaatagaggctaattctgtcagatacatttaataacttcaaatactgtacttagctgatatagcctaatttatttttagtgctttgtaataatatatgacatagctattgtggtgcttctttcaaggtgcttagattgaaatcacatgtcaatttttgaatacatgcaatgcaacaatgaatgcacatgccctgttacaaacaatgatcacaatcttttggctcaatatgtttggttgattttattccttttctttttcaggaattatttgattctattttgtgga

SEQ ID NO: 2842 - DNA, 904 bp, Glycine max
  Intron number 12 from transcript Glyma05g33910.1 (locus Gl yma05g33910) derived from phytozome v7.0 (chr-ID Gm05; pos 38422782 to 38423685)
aaaagtaagttttgttattctcggtatttgttaatttgcttgagggacaggaagttgtggttgtttcccttgttgctactcttcctttatttaacattaccatgaagtgtatgactggcacattgtgcgtgcaaatattttatgtagatttgattagtttaataagtaggcagggaaaactggtacttattatcatattctagaatatcaatacacttttatgaatttatattaagtgcatgtttggtttagcttatattaatactgatgtatgttatagcagatccataggcctcaaatagctagttcttctattatttatggtgtgtaagccaatttgagtgtcaagttctattttttaaaaaaaaattattattatttcattcttctttattgcaatttctcatgatatgaggctactcaagaaaaaggaatctgaaatttagtagcattgcatggttatgaggactgcttgcatttgcaaggatgtttctttgtcctttgatatgttgtaggctgaggctttgtttatgatcactccgactctttgccattctccttttatgatcacaccttgggaagctctgttttttgcaacttttgagctctttaggctcaccatttttccttggaggattattgtaatcccgttttgttctctgtgattaagttttttgttttatcaaccaaaaaggaagcttggttacttactgaatcctcttgaatctatagttttagggaaaacaaaacaaggatttttcttttcatgtctaataaatattgcttaataactggcttccttatctcaaacctatctactcattggctctaccactttttaaaacccaattggcttttatgataataagttgggattcattttctaggtgtgacgtttttagct

SEQ ID NO: 2843 - DNA, 2887 bp, Glycine max
  Intron number 1 from transcript Glyma10g08370.1 (locus Gly ma10g08370) derived from phytozome v7.0 (chr-ID Gm10; pos 7206765 to 7209651)
ttactagcatttttgggtgaaggtgttgttttcaggtatctctttttctctgttttttattttattttattttattgtgaaatgtaattgtatatgtatacctgttgatcctgtgtttttcattgcaccttggttggtttctttctatcttttggtttgaataataagatacagatttaacaaagacacaggatgcatgttcggtccttaagttggtagctgatgtttttggtttgattttgtgggatttaattctctttatttgaatgttcttgcaactgtgcaagcattaggatttggtagtagctagcatgcatattttacattttctaatacactctatattgtggattgaaatttaataaaaaaatttaattagggtgtcatttcttatttattgagttttactaatgattttatacttttttttataaaatttaaattaataatagaaagtgtagagagagtattacaatgattaattaattgttgactggatcagctatttttttattggatcagctggtttggtataccttaatctcgtttttcattatgtttttcttcttctttcgagtattccatgtcaagttttttttaacatgtgtgtttttttcaataaaaatgtattctcattcaatcactatacttttttatttttaataagtttcttaatttttataataattactaaaattcatataacagttttttttactaattgatgactgtgctgaaaaataaacttttgtcaatatcatatcaatatttgagccacttggtattttcggtgcctaatgtgaacatgatatttaagggatgacatgtttttgaattgtttattattattattgttattactataaccttcgtaaggcacctaaagagtgaaatactgaaatttgtctataaacttgtataagaaaaaaaagtaagcttaatttataacttatagtattaaacttcatagattattttcaaacgtattgcattttatctttttcttttcttattagcatttacagagaagtttacgcaaaaattaccctaattttctaaagcttctgaaaatcatagcatgtttgaaaatcaagtagaaaatgacttttgaggagaatttttttttttttttgcaaatgatcaaaatcattgctgttgtttttgtgacttttgaggtaaaaaaacttttgcaaaatgattaaaatcattatttttgtttttattattcgatggatctgtatttggagtgcacatcacaataagttgaaaactgtaaatcaaatatgcactcaaacatgatcttaataattaagaaattctagtttaattgattaaacagaatgttgattaagtagaatgtgtaagatcttgtttaattcttgcgggaaaaaaaaatataacaaggttgtagatctatatctttagctctccatttggtgcaacagtaatggttatggaggtccatacctattacctactgcacttctctgttatatgccaataaaaccggtagttgcttcgatatttataggcactagacaaagggtagcggtgcaggttccaactttccgtgctactcgatactcataatattcttgactttgtagtaatttgtaagtgggattcagtggagaaaaaaaaaatttctcctcagtggaacaagaatcaagatcaacatttgtatctccatcatctagttttggataatagtaaatgttacgcaaaatattttcatatgctttgttgcacccgacaaaggaaaaaggagttgattctctgggaaaggcacaactctccaactcaattttatattatttcaaagttttctttgtttctttctttttttatttcattgaatactaaccgttgatattgttgcgctcaccagaatgcagtgctgttttcattattcatagaagtgtagagcatttagctgtaaaatataatcactcataaaattaaggtgcaatttgtttatgagaaaatatgttatgttcggacaaatacatggtaaatttattaatttttatgatgatttttttttatttattttaaaagtcatggatattgtacaattgtcactacagtggcattagtgatagacctaagaaatggaaaatatctgtgtgtaattctcgcgcaacatccacaagcgaaactggcgttgttgtcttgaagcagctcatcactgatgattgacacgtttccgtcattttgattgtgctatttgtatttatatctagactctagtaacacaatgacaaaataagaattaacaaaaaatatctataaactggtatgttttttcttactaacttgtgttcttacatttgaacaaaattgggtatgcttcgtcataaagctaaaatgaatgactaaaaagaaaaagtgaaaaaatttatttgtaaccataaaactaaaataaatatattaaattatcttcacagtttactttaatgaatttattatttctttttatttctctctgttacgtcatgtgtattttattccacaattctctctcttctttataagaattttatagtatacctaataatatgctggtatcatataagaaaagagtagatttgtagatatccaaatatagttactgagaataaatttagtgttagtagctccattgactttgtgggaaaagttgaatatgacacagagtttactacttccatcacaagaaagatcaccatcataataatgttgctatattattatcttttctataaagggatttaactcaatatgattgaatagtatgggggtgagttattatcatcttttgacctttcacaaacaacacttaagaggttgtgtttgacttgaactctttgcagcaaagagaaaaaagagagaaatcaagaagagcata

SEQ ID NO: 2844 - DNA, 771 bp, Glycine max
  Intron number 8 from transcript Glyma20g10020.1 (locus Gly ma20g10020) derived from phytozome v7.0 (chr-ID Gm20; pos 13781909 to 13782679 reverse strand)
atgtatggatatgattttgtaaaattgggagagtgggactgtttcttatatgtaagtatggcataggagattcaaaataggtacccaaatgcaattccgagtttaggaacccaaacttgtagcttcaatgcaaggaaacatgcttatggctaggaatccaaaatttggttttagaattagaaaaacatgaaaattaggacttgcttgtgagagtttttgctcgagcttgggctgccccatgtttgatactttacatagaggtagcgtggaaaaagccttgcaatagtatgtatacataggtaaatataaggagcatgaaattcctaacaaagtgtgaatgattgtcttcctaaataaatggtatgatagcacagaattcccttttgaatgcaagtgtgtgcataatgtaaatagcttgccaatatgaataaatgtgaatgaaacaataaatttttttttatatttcaaaaatatgtaggtagtttgtaaatagcaaatgtttaggatataaattaggtgtaaagtttgacgcaacactttgagcatgaaagtgtgttttctttttcaaaatgtatataggtgtatggcagttagaatatgttggatgttctttcatgttgacatgagtaataggatattttctatacatacacgtgtgcataaatggattacatgagtttggtctaaatcagagggattagcacgacctttttgcgttaagataaccgttatcttgtaaaactaacttctaaatgtttgttctcgcaggaa

SEQ ID NO: 2845 - DNA, 4907 bp, Glycine max
  Intron number 4 from transcript Glyma08g35830.1 (locus Gly ma08g35830) derived from phytozome v7.0 (chr-ID Gm08; pos 33383978 to 33388884)
gcctaatctagaggtatgattaaatttattaatttgataatctctgattcatagtgatgccttgaacatgtttgtgagggttgattgcattgtatttatagtttatagagttttgaacttcactttgtccacttccttgtattgtttcatggagtttttaaattctcaatgacctgtgaaatggatcaaaaccataattgtattttaagatagatttgatctctatctcgaagggaagattttaatgtactactttaggttccatatattccttcacaatttctttgctactcaacctggatatcaattttagtagttgccttatttgagagtcttagttgttttagggaaattttagtcactctttccttctttgtaatacacaaaccatatagatattaaagtttgtattgtagatgaaagtcatgcaaattcaacaaatacagaattcagaaatgagagttgaaaaataagtgaaataaatgaggttctatacttgaaggcttgtctgaaacccaaacctcacttttgaaatgctagttttttttagacttctgccttgtgttgttttgttttatccattgaatttctcaaatttgctgctgcccaaaattctattgctaatattgtagaatctgatacagtaacccgtccagattcataggagcaaactttggagaaattaatctgaaaaagaaaattcagatatgtttagaaagttctgtatctttatggttttgtttccttatttctctcttgattggtggtaggagatttttttctctatttatttgcatatttgtagcagaattagtcatctgattcagcataaataccctatatataattcttcagaacagtgaggaataaaatattttctctaaacctagaaacatagatattgattctgtcaccttgtcagcttctaaaccttttcaatctttaacctcagaacctttaatcctagaataatgatttactgctgaattagatttgctattaagaatgagtttaattttgatctattgtcaatgtgaaaatttttccacaatcatggaatttggtgctgacattgtgacacatcactaagagtttgactttttcaagtagttgttttcatgatcaaactcatttaaatatttaataatgtgtcaatctatgatttgatctacacaaaattgttgcattgacagtcgatcaaaatcaaacctataaaatatataggaataataagatgtatttattatttagaatggtcattgttgctactgcattcaaaagtttggtcttacatattttatcttcccttactttgaaggaccatgacatgatagccaattgtttagcacaatacctaatccacttgtttcaaattcgatcattgaaatattttgcatcccttatgttctctgaatgtaataaatttaatctctgtctctaaatctatagctccttgttagaagtaaacctatgcatgagcttccacctaacagcttatgcttttaggagagttggtctttgatgtggtgaacgaacctctatgacatcaagtggattttaggaattcaattcttgctgcatcatttcttctaactaataaaagaaaataattttggttctaggttgagtgggtctatgtattgttcacactttgcgcttaatatgctatttttattgttagaatatatgaacaaatccatcatccaatattatcttgatcatcttagattatctcataggattagtttccctatttccttattttatgatttgtttcctatttagtttgaattatgattaatataaaattagggttaatgctctaggtttgacgaacatatcatcacatagtaatacatcactttatatcaaattaatatcaatatcaatttcatagtattttgtctctattctttgtattttgtccctgtataaactacataattacagcacatatcataactttggaaggggagcataaactcatgctggttatcaagggaagtgtactcgccaacatattaggctatctagggatgcaaacaaatatgaaattttccctgcctcctttattgttaaaccaaaatatgaactgttggatattcaaggggggtaaatacccaaaagatttacaccaattggtcatgagcaactatacaagtgaacctgataccacactttaacacaaaaccctagggtattcaatcttttcatttctatccgttgtgtaactttccctcacatttgtattctaacaatttgtccctccacacggtagtctccccctcaagcggaagtcatttttaatccacaagtatctaatggtgacccttagagcttaattctggttgtctcgacttgcctagccattgttaccaacatgctctagtaccttgaaccgccacaccttgcaccaccgcactctccactgagccacagccacactgcctgacctcaatgcatggactaacctactaggaagacttttgatacaagggatcctgatgtccatagatcccgccatctccattattcttgtcccagccggtcaccaagttgaatcatcgactctgataccaattattgtgcataggagtggggtaaacatcaggagatttgcttcaatgggccttgagcaatcacacaactgaatccgacaccacacttttaacccacaacctgaaggctcaggtttatgggtcttaactttcgatacaagggatccctaagtccacaattcaccgccgccatcttactcattcgtgctggttgaaccaagtcgaaccatcgactctgttaccaattgttcgaaatccaatgagggtaaacatcggagagatttacaccaatgagccatgaacaaccgtacaagtgaacatgtcaccacattttaagcaaaaaccttaagactaaggtttatgggtctttacttcacttatatggtgtttaacctttcaatttctatttgatgtgtgacttcacctcccatttgtactccaacaattcctaaatcaaatttggaataaacattgagtcaataacaatatgaagattcatcctttaatgtattaataatcagagaatgaaaacaagttgctcccatgtccctatatacctaaatttgttcattttcctgttgtcaaacattattatgtcagcacttggactggctgcttgctggaccttgacatttatcttactgaaaaacatttacgaggggtgcatggttcaatattgtacatatgaattcctttcactttttggtgattgcacttaatatgatgatgtggatcattaattaggattatcatatcttttcatttaaatcttatttattttagtttatcttgtctctttatcactttttggtttccgattcatattttattaattaggataattgttagttatgatactatcaattaggtttccctttatttttattttatcaattagaataattgttagggatatctttgtagactattcaaaggtcagacttgattgaaatttaatcaaggagaaataatgatattcagaaaaacttgtgttagtttaggagctgctctgtcaaggatgagtcatctacctcttgctttcactataggtcgaaagaaggatgaagttgtacctgtcttacaacaatctaatcaaaataaagagagaatacagctgccagaaaactaaacaatcaagctaaaggagaaatagtattctcttacacccccacaagctcaatgaggctgagaaaccaagggatgctcagagtgtgaagaaaagaaatatcagcccattggctaacccctttacatggacttctactggtctcacatgaccctcccacctcaatgagattgtattatttttacctcaaaaggtgctaatactttcttgctaatgtattcattcttgattgtgtcttgtatgacctctcatccaccttgacattcttgtctctacaacacttagattatgccttgttgacactttgctgctgaacattcagtaacttaagcattgtgggtcttatgattttgtagtaaatttttccttaatattgagagacactttttgaatgtgagtaattcttgaaacatttctccatttcttcaacttagcttgaatcctattactttgatctctcgatctctatatatccatcaatcttttttctttaaaatttaaatactatgttgtgtacgaatttttttcctgtcttttgtatctgttttctctgacatgaattttggcagtgctaactgctaatgaaacttttgcttttcattcgttgcagttcctgtttggtcttaaaccacaaactcctcttccaaataaaatggaagtagagaattgagtgtatttatctccatgttaaatactattgtttgtaacaagtccattctttatgaagttttaattgtatgtttgcactatcctttgcaaaggttgtgagtgtttgatatattttttactcttgctggcctagtgttgaataccaatgcatgcttgctctatcctttgcaaagggtgagagtgtttgtgatttttttaattttgttcctagcctagtgttgaatatcaaattcaggtcaatttccatgaaatttgcaaaaactattttgatatagtaaacaaatgctttctgactatctttcttctattcttttatatgtttgaaatatttgatttttgttgtggaattatttagagatttcttacactatgtaattccaaagtgaaacttcaaactgtcattttttcctgaactaacattcatttcctctgatataatgcatagttgtattagtaccatcagatatttgcatcgatgatactatcctttgaaaatgaacattatatcaattattactactatttcttattttttaattttaaaaattgatagg

SEQ ID NO: 2846 - DNA, 742 bp, Glycine max
  Intron number 5 from transcript Glyma06g02010.1 (locus Gly ma06g02010) derived from phytozome v7.0 (chr-ID Gm06; pos 1287295 to 1288036)
gctacaggtaccatgcaatttgcttcccctcttttctcacacaaagacatagtaatgtgtgtgtttgtcgttgcatgcgcaagtgtctctgtgtgcgtgcatttttctctctgcgtgcaagtttgtgtatgaattcatgagtgtacacgcgtgctggccggcgtgcgagatttttgatatattacttgattaaaagtttaatatgatgtatcatgtaccaagtaacaattcttcttattatgaggtaagagatactataaattcaagtcaaacaacatatgaatgataaagattaaaatttaattaaggatcacataataagttttaaaagttatgtatattcttttaattttcatctttcatatacgatttaacgatttatatttgtagtttttatttcttataataagaaaattttcatttgatatgctctcatgtgttagagtcttaattaaagaataataattttaaattgtcaaaaactagtgtttaagttcgtatgttttttatttttatttttaaagctattgttcgtatttgttttactatttttatcgatgtcaactaacttggaatggaatgattagaaaagtgaacttgattattaggaattgggattttaaaacaaattttctaaaatcataatttgttcatgtttgttcctccacaataacaattttcaaaaaaatcactatatattatgatgagaaatttatacattcaaaattgacaggtcatctct

SEQ ID NO: 2847 - DNA, 3115 bp, Glycine max
  Intron number 2 from transcript Glyma14g10660.1 (locus Gly ma14g10660) derived from phytozome v7.0 (chr-ID Gm14; pos 8863652 to 8866766 reverse strand)
aagaccattctccggttttgattcccaatttcattttgattctctgaagttgaataatatttttttattattcccattatgtaaacaaattttgttgttgatggtttgatttcacaaaatttgattgattttgttcatggtttatgcactgcatctgttttaccctctctatctgtgtccaatgtcgatggcagtggagatataactgatgcaaagatccataaaggttgacttaccagcccattgcaccgattttgaaatttgccatgggtcaaatggacctaccgaaatccccaaatatataagtttttaatgcaattgtgttatttgtatgtgtagagtgaattggcaagtgatgatttattgttaaaccgcttattgatatactgaaaagctgtgatgacatcaaactccacttatctgacgccatttaacttttattttggttttatgttttgtttttgattgcttcgttctgtagtgaaccttactatagtggtaaaagggttggcaaatgatgttaaaatttcttatcctacacactgaatttatacagtgaagattaaaaactccgcttattatctgatgccttccaagtcttaacttacttttttgtcttttggttgttctatctctgagtgattgtgtgtgtttattttggggtttgaaaaaaatgtatctgatttggcataattgttcaacttctctatgatgaagaaatgcagacgggcggactgaactgatgccatgttgattgtctgccacttccaaatttggaatttctctgagattatattttatgtgattggtggtgttttttttattatttttattctggcaggtagtgtttttgtatttcaaaccaggaaactgcttccaaatatgtatttgatacttttgcaatgatgcagttgcataaaaatatgtctggacatatgaaaatttcttatgatataatataattgcttcttctgagcaaaggtatcagtccatgattttgcattcttttacccgtcacttctgtacactgaagtagtttatgcctttgatatttatatcaacaattggctatttgttattttaatttagtgctgctatagttttaattttactttatggattttctccacggacagaattttcaggatatgtttttccctaactggccttgaaatatgtatttggaaaattgctattcgtttttgtcttgtttttctataatgggattatggtatacaacatcaaataagagcctatgcatctagacaccacaatcacaagaataagaataagcaccgaagacagaacagagttggaaaagagctgagtcatgttcatgtaaaatctaaccagatcagaaggcaaaggattaatagtggcagtgttgataaagacataaaaaattaacttgaatgagaaaaatcagaagataaaaactcaggaaactgagtcctgtatgtcagtgagtgataccagagttaaattcggagatggtgggtaatcccaaacattaaggcaatagtagcttttgatgacagtgcatcaattttaaactgcgatgatgggtagctgatgacgcgttttgggtaactactccacatcaaccgaaggttgaaacttgtaaagtttgcaaattaattaatctagttgtttcataattgtattattggtacaaggtttggaagaattgtgactgacagataaataattttgatacatgttctattggtctatatttaaaatattatatgtaatttactctctcaattcgtaattataactttttaagaaattttgtctctttttaaagacttcttttttaatttttagatatattaattaatttttaatgtatcattaattattctttttttaatacttttcaaatattaaagaaaaataataaagtgctttaaaagataagaaaagaatattcttttttcaaatattaaagaaaaataattaagtaaattaaaagataagaaaagaataatttaagaatgattggataaataattgacatatttaatataattaatcaaattaattctgttttttttaagggatatatgtattgttaattgaaaaagtcttgttagggatggagggagtataaaattatataagatttttaataaaaacaaatccaaaatatcattgttacgtttacttcgaagaacatgaaatgtaacgatcactaatggacaccacaaaaattagaatgacgagtgatgaaaacgaggtcgacgtggaaaaattcatagtatagtttatgcttctaattacacatgattgtgacacgtggacgttcaagatttcaaacaatctcatcaactcattataaattcgggttacgattagttgaaactcattccactgagtgtagtaatcaatcatcttttgtttgttcttcagtactttagtgtgtgatttaattccaagattttgagaatgtctagctgtgggtgtggaagtagctgcaactgtggcagcaactgcgggtatagatgcttcttcttttctaatatgcttgcttgattaacctttaaaactattgattagtattggaaattaattttaacatgactttcaaatctgttaatgggattttcgtgtgaatcttattaatttttcttattgcacaagtttctaagggataggatttgctatgactattttgattggattttttagtatcctttattttatgaaattagatgctttgttttccgccgaccaaaaaaaaagatgcttttgtcttcctacctagatacatgggtttctagggatatacaattttcctatattttttgggtacgtagtttgattcgctttgtgggtgcctattttggttgaaatttatgaaattcgaggctttattcttttttcaacatcagtaattaagagggtagaactattctctttgttattttgattactttttctttggaatgttcttcataaaattgttcaaaaaacaaaattgctactttcagtttttttttatatatatttcttggataccttttttgttttcccacatgttttcacgaaccttacgtttgttgatttttcttgtgtttcagttgcaacaagtactcttttgacttgagct

SEQ ID NO: 2848 - DNA, 1354 bp, Glycine max
  Intron number 1 from transcript Glyma17g35720.1 (locus Gly ma17g35720) derived from phytozome v7.0 (chr-ID Gm17; pos 39728350 to 39729703 reverse strand)
gtgctgttcctcctgtcaaagaccaaggaggctgtggtaagcacactatgactctctaagttttaagtcttaactcttacgttcctactttacccctttctttatcaatttaaaaaaaaaagttaaattctttacttgttttttaatttatcatcgtggatcgatttttaatttatgtttcttaagtttaaaatgttttctgtaattgtggagtttatctgcgatttgatgtttgattaatcatccacatgaacatgatctattaatatctgaaaaaatatattatatatctctgtagtatagctactactacttgtatactttacttgccccttgaaagttaaatacttcttttttgagtgataatcgtcaatcgttttttagtttatgcttttgaaattaattttgtgtcaataattgtttgtgatttttttgtggttttatgcgatttgttgctttgctgtttgatcatccacttgatctattaatatctgaaaaaaaaagctatccacacaatacctcctactttacccctttttcaataaaaaagaaaaaaaagttgaattgtttacttcctttttaattaatcatcgtgaatcaatttttagtttatgcttttaaaaattaatttcgtgttcaataattgtttatttattgttttgctggtgcttgaacatccacatgatctattaatatccggaataaaaatatctaaggaataaatttaatattttattttggtttgtggttggaaaaaaagtagttgtgtttcttagatttgaaactttaatgtaaggttcattttgagacccccacccctacccttttgtccctatgattaaataattaggtcaggattacaaaaagtagcatgatggcccgtgatagttgatatatctctcacgtttaacgtcatcaggattctgggtgtgttctatttatagtttggaaaacacctagatattcaaatggtttgtgcctatgtgcaccttttgcttaacataccaatcactaatatagttctgtctttgtttaccttaccatttttttttttaccttttgctgtcccagaataatgaatattctttatttttgaacctaagtgaacagataatagtaaaaaagttcctttagtctaggatgaagtgagtcttgacttatagcagagtgaggagcaggatagtgcttcagtttttgtagttatattgttacaatttaatgagtttctggcagtgatctgaatctttttataacctatagttttttttaacaaactttgcttatcttgagatttgtttaatgttttttttcttaatttagggagctgttgggcattctcagcaatcggtgcagt

SEQ ID NO: 2849 - DNA, 3644 bp, Glycine max
  Intron number 7 from transcript Glyma11g33970.2 (locus Gly ma11g33970) derived from phytozome v7.0 (chr-ID Gm11; pos 35815071 to 35818714)
cagctgggccttcaaaggtttgcttttattgttgtatgttgaaaaatacccttcttatttgggatccttgaaacctcttggtctaacctttctcctttcaacataggctgttgtactggtcatgacttttcccttctgatctgtgtatggaaactgtttattactgtagtcaagggcatctgttttgaccaattagtcacaaatgttttatagtttttcaagttatgcaaattgatttctttattaagtttaaaaccatgtattcagatgttttgactccgatagtaaagaaaagattcaccaattggatttgtcggaaagtgtctccttaacatttttttgatattaactccttaacattttctattcagtggccctgtatattgggctttaacctatttatttttgcaaataatcagggtttgacttgtattgttttcctaatttcctagtttctttattttcctagtattttaatattagagactgtgaatcatgtacatataattaatcgcgctgaggatttcccaaagcaactcagaaatcctttgatcggtctccagtagatactgttgaagtttcactttaataatttgaatatgggcctgtgttattttatggaaaaccctgatatggtatacataatcaaattggaagtttggaactagtgaactactattatattctgcagattggatgtccaattggtcttcaaaagatatatgtgatgtcacactgttctccatttataaagattggtccttcaagatatatgcaacattgaaaattagtccttcgatgtcacatttttgctatcaatttggcccttaaaatgacatcaaaatggagggccaatgtgatgttatgtatatctctggaggaccaaaataagtttttactctatttcagtatttcttgacagctaaaatatttagtagtgctgcagttacacaaatttcattcttcattgtcatatagcccttcagatagatggaaccaaatcactttatcctgtcttctatcatgttcattcttttactgaatggtataacatggcatatggatacttggcattttggattgctttaattttttttaagcttaattgtaatttttttcagttatgattctggttttaataatccttatatctctttttttgtgtgtgaataaattagctcttatctcccatcccctcctctcagtgcaagttggctatttgtttattctgctaataaaattccaccagattcttcactaccttaaaattttggattttagtacatacaaacaccagtagaggggttggatccttgtatctagcaatgtcctaaagtggcacacttctagtgtacagacaacctgcaatcaactcacaaaagcttgaatctaagtttgtaaattgcatatgtgaattccatgcttgggtctgtagatttttaactccttttcttagtgttcttttttaatgccaataaattgtatgcatctgatgtcacaactcacaataactctttgatgattttccaaagtgtagatttgggtctgttactcaatcatttagctgatgtatatgctcttcaggtcataattacaagtataaatatagacgggattcttctcctcattggcagtcatcaaaaagaaaaggtgaaataaatgcggcttataatggtttttaattgtgttgaatggcttgtgtgatccatgtagccgacctcacctagtgggataaggctttgttgttgttgttgttgttgttgttgttgttgtaatatgagagataatggagataaaaattactaaattttcatagttttcttgcataatattgtttgcttatggcttgagcattgacagtgatttgtaaaatttattttccacaattccacaattttctgaaaaccacatttgttaaaccaaaaattggtgaattggttagctgcatggttcagttagtacctcacttgttataaacaaatgatgccgagtattgccagtctagagacaaacgaatgaatcagttgaggtagctcacaaaatggtggtgagtggtgacagttagtgcgtgtttggtttaccgttgggagacccccaaacttccatttaatcaaaagctccaaattcctacttctcacaaaacatgcatgggattgtgtacctgttcaacctaatgttaaaccaaacacacccttagtggacaaaccacatcattatcacgttgcagcttgcaacaatgtgctgaagtaaaattcaatgtacatgcatattggacctgttcctcaaatgtatacatactttgagagtaatacactattcaagtaggaatataatatgtgcctctgcataatcatacaaactattgaattgaatttaaaatattattaatgtgtgtacatgtcatttcatcaactaataatccagcatatgtattttaacaacaatccaactagagattatgttatcacattcttaaaatctcttatctcttataaaagaaattgaaaattaatatttgtttcctaattgtccctgacttcaatttctgatataatttaattattgggcatttgtattttgtatatataaaatagtatttataactacttattttatcataggaagcgtatcaagtgagaacaattctgtttttaagaatgcatgaaaaactgttttgtctttcgttgttattgtttaattgttttattatatacattcagtggttaagtctatacatttctccatctttcatccactttttaaattctatatagcttgatactcagtgatgattttgttctctacacactgtgctctcatggtaacaacctaacttgtattatctttgtctgatagggagagcctcctagacaatttaggatcgtgattccaaaaataccagcttattttacggtatgaatattccataaatacttctgtttatatatggttttgccaatattgatctttacaattttaatttttttgggaagtgaaaggcaaaaatttatttggagtcgaatatggataatttcagcttgaactattctatgatattacatctgtaatctgtggagtatcaaagaatgtatcactttatttccctaaatagatctgagctgtgcatgatctcctgttcattagcatttagagctccaataatcaccttggctttgttttcattgtgtaaaattttaaaaatcaccatgtatttcattttaaaaaacttcatcttcattgcagtagctatatgctccttggaaaaatagagaagaatgcaatggtttagggtgaatcttcagcataaacaccaatgccaccaaaatttttcacccttttatcatcattgccatgtaaagccttgtttgactgccacatgtttctgcatgcaaaaattcagcacagctaacaggacatattactttaattgctcttaatccgtttaacctggtgcttcttagacagtaagaagtttatccaaagcccaaaggataaataggaaaaagtttcattcaagaaaattttcaaaaaaccaacgtataaatttattcaataaagttcttcaatccattctgtttagattcaaacattcaataactagaaccttaactattttcttatgtttgtagggaacgggagatctc

SEQ ID NO: 2850 - DNA, 823 bp, Glycine max
  Intron number 3 from transcript Glyma13g29180.1 (locus Gly ma13g29180) derived from phytozome v7.0 (chr-ID Gm13; pos 32104790 to 32105612)
tgctatatttatacatcagtgaggtggttggccaggtattctgtgctcttcaatttagtgtgtcttgtgataaatggtcatgtttttctttttaaactaactgcaactggatgtttgatacttaatatcgtgttcgcctgtctaaaatacacttttgatgctagcttgaggctactaatagcccttgtggcccttgtaaagttttcaaaatgaatgtcgtgtatttaaaattagcagtgactttcttaattggttcagacttcggaatgaaccttttctgaaatatgaggtttctctgttgaattgatttgttgctagttacttgtaatgttgtttttatagaaatggatgtatagagaaagaatagagtgttttattgcagtatatggggatgtaataacttgatacaattagtccccatatgcatgtgcttacactagtaatttttgtagaaacctggtggcaaacatttggttgcagtgttaaatccttaattctttattgcatttcgttggagtgaaaaactcacattattgacgttgtctctttatgcttaagcctgctaatggataaggttgtctttacgaattttctttattgctctgctcaagtttgttttgcatttacagtttgattgggcatttttgctgcatcattgagctcttcctccttgttttttccccctatcccttcattggatgctttcttcccccctacttgtatttcccctcacttaaaaccgtcgtgaattttttttcttactgaaaaagttgtggtatctctttttgggttcaggttttgtttggaatactattgcttgtgt

SEQ ID NO: 2851 - DNA, 1973 bp, Glycine max
  Intron number 1 from transcript Glyma13g27650.4 (locus Gly ma13g27650) derived from phytozome v7.0 (chr-ID Gm13; pos 30808377 to 30810349 reverse strand)
ttgcaaaactgctccttctgccatcatccgaggatgtgagtaaattctcccatttgtgatctttaattttcagcattattttttaaagtctaatagctttacttttgtactttaaaaaaaaatctttttgtctttatttttcttagcatcaccctatatatacaaatacaaagtaaatacatgagaagatcatggtcgtacatgagatagcctgagtttttctttctgtgtgtagatttgattttcaacgttgatcttaattttacaatcacctttttacttaaggagtttccccactttcccgattcgactttgatttttttagtgtcggaaacgcctatagtatgtctctcatttaccatactactccttttctactttatgctatttaatttacaagtcttgataagtagtttcgtgttcaatttcctttcaaatgacaaagggggtcacgtgctttgtttttttttttttcagttccttaattaaacttaaataaataagaaccatgtttgatcttgttgtcagcttcttcttttgctgtcgataatttgaattaaataataattatattatagttatggtcttgtggtagtgtttcttatgcaatggatagttataaagataaacttattgttaaaatcctctaatttaattttgaaaaacaagtattaacattttactagctctggtctttttcttttttttttttttacaagaaacaagtgatagtgttgtgttttacactataatttctttttcttataaaaagaatcccaagtaaaatttactttgtatttttttatgaagatgttagttaagaagttaacaacaaatatcttaaagatattagttaagaagttaacaattaatttttttattaaaaattaaaagtatttgaaaattaaagtatggtatattaataatattttatcatcaaatttttaaaggtgttaaataatttattttacagaaatttttataaaacaaatatattattgtgtttcttataatttttttatttcttatttatatcttcaaattatttgctaaattccttattattttaaaattaataattaagtaactaataaaggcttttcataatacatttataagtcgcaatgttgcaagtataagttttattacttaaaataagtattttaaaagttatattaaaataaatgtttgatcaattagcaatcatgcacgcctattaaatgttatgtttatgattttgatatcttagaataattttttttacttggtacaaaaaaaatttaagaaactcataatcataattcaacataacgtgacagttaacggataatttttttcatgtgatcatgcctttaatccttagtttgtgtgtatgaaaaaaatatatgttaaaaataattaactctttaaatagatctaatagattaatatttgactttggattaaagatactttgttttacatcaaaaactcataatcataatattaagtgatggtactattcaggacctaaatataatcaataaaaataaaattgaatctaaatataaataaatattaactattttttatcttatttaataattgtattcctattatgttttttatttaataaaactttattttccataaattatttatttttattctacaagctctactataaaacatattttaggaattttttttgaataaaatggtatgaacggattccttaatctatattcttggtagttaaatttacttggagggagtatatccgtggcttatttatgttttattagagagaaattaaaaaaaaataaaaatagagacgggacattgagaatcaaaaggcagtggcgctatcggttggcgtgagccatatacataagcaaccaaacccaccgtttttgtctttcagttacattcattcattcactccttaacatagcattttctaccatttaccaaagcaaagagaaaaacaagag

SEQ ID NO: 2852 - DNA, 3314 bp, Glycine max
  Intron number 2 from transcript Glyma14g10850.1 (locus Gly ma14g10850) derived from phytozome v7.0 (chr-ID Gm14; pos 9048298 to 9051611 reverse strand)
gtgccttgtgtagttgcccaaccgcgtcaccacaggttttccatctaaagctttttcttcttagaatgtttgcttttatactttctgtggtatgatatgtatcaatgtcgttgtatgctttttcagtctgtttttgttttgtctttcgataggatacgatatgatgtttcttcaactgattccgctctaagattcactgtcaataactttctttcaattaggatccaattcatgcccctctaggcacataaacagtttttttttattttttatttttaggatttttttcaatgagataaacctaagcatatgcagagcagtagttcacctgtgcatctccacaaaatatgcaaagaatttgataatcatccttctagtgttaattgaaaacaaagaattatcaattaactaaaaacaaagaatttaaaatttcttgttatttaaagttcagaaaaatttagtgagaattatcaattaactaaaaacaaagaatttaaaattctaaataaaaaaaggagagtttggacatttttctctgctggagctctcaggcatctcactcttgttcgtctattgtcttctctagttcctctcttgttcagctcccattacttattctcaaatctcaggttcatctccctctctgatgctctaatattaatattctctcatccccttgttagatttaggatttcttctcttgatctattgctaataatttgttctcttgtttgaatttgtggtttcataagattttgtcggtctaatttgtagttggtttcaatgtttgtttctatcattcttgtgttcaaagaattttgaatgcttttgcctatgcaattgttgtttcacatggattttatttaaaaaaacaaatcaattttagatttgaaccgggctggcattctctttgttttttttttttttttctttttcttcagtcaagtttgctttccatcacagcaatatgaaccttgctgtggtgtttgaatttttttaactaattggtcttgttcacttgtcctactattgaagtgatgttcacaatatgtttagtgcaaagactaaacatgcagtccccgtttgagtagtcttgataatatttatttgtgacttgtgcttctcacttattattattttactggtctgaaaaatgagacttgataatattagtttgtattgatggtcgagtctccctacaatacatcatgttgaatgattgtggatgccttgtgttgggctggttgtgaggactttggggattaagtgtttaaccaacttgcatacttgcctatgacctattcgatgaaatgcctgagctaacatgaagtataaatcgttgattatcatcttattttttatctgttctggtttctatggcaaggaggttcctaattggctgctaatctttccttcactattttatttccatttgtttttgtaactatttaactggtctcttcaatgtgatttatagaaggtagtatcttacccaattgtgtttctaaagcatcaagtaatttcaaacgtgcaattatcaatgctgttgtccctcagatttgtgtcccccagatccttctttacctcccacaaacagctgttgcatttaaagccagcaccaaagcttatcatctgtaacttgccacccttcttgagcctttcttggcctccatgtatcatagcacataccacaggctggtagctgatgtgttatatccaaaaaaaaaaaagaatttaaagcactaggaatttaaattgctttacctaaactaagtgttttaaaaattcaaggaatttaattgatgcatttaaatttctatgcatttgagttctttagaattttaaaattctctatccaaattccaaacacaaccttagttactttgtccgaacaagaaattttgtaaatgagagaaatctaattactttttctgaatgaatcaatgaatttttttacaaaggtagggtattcaattgttaacaattgagttccatagtattttaaattcctcagatttttcataaacatcacctacagaaatatcacattttttttatacaatcaacttataacccatccttttactgttctggggattcttaacctaatccatctgaattgccagaacagggcaaaaatgtcctaaacttgattacaatgccaacttaaatcagagctagttttattgtttaatacactggtttgacaaactcattttgtttgagtttgacctgtcctttgattctgtgaccttactctttgcttgtcattgcaagtttgttgtttgccaagaaacccttacaccgcccatcagtgttgtcaatagtgtggatcatggaaaattgcgaaaagctgaaaatctgctatagaatatagtggatagcattgcaggcaaatagcggaagccgcatagcggttgaaatagaatatatataacaattgaaaatgtataaagaagcatgctatcaaataagaataagctggacaaagattagcataatattatctcaaaagttaaattggtcaagacaaatatgttcattctcctctgtcccttcctcaatataattaaaaaaaagctaaaaacagctaaaaagctaattactaaacaagtcctattgaggcacatgatcaaaataagctaaaagttaattagctaaacaagtctcagtaagccatataataataaaaagttacatgaagtagaagtgaaaatgccaagagattctaaaatgatcctgaaaactgaaaatttgcatgaagtagaagtgaaaattttactgtcgggcctattagaagagagcccaagtccataagtaaaaagtaaaaagaatagaataaaaacataaaatttgactctgatgttttaaaaaccaatagagtaaaattttaaaaccccacaggactactgcacatgagtcttaacaaagcaaaaaaaaacattgtactcaagcccaaaactactataaagtgtcgtgaagacgcgatccaaatccgcagtccgcacttgacctggtttcatttctttcagaataatgaaccaaagaaccgtaaatgccgtcgacacaatttctctttagattcaagcttgtcgtaaaccaacgacgcaacatccgcgacacaatatgattccgtgacgcgtaaggcaccgcgattgcgatttttgcagagtccgcaatgcaacgccattgcaattgcattttcactaaaacccgctatgctatttgacagcactgccgcctttgcccatctttatttgtgacacgttctttcttcagatagttacacttttttcttcaacacaacagaggag

SEQ ID NO: 2853 - DNA, 2451 bp, Glycine max
  Intron number 9 from transcript Glyma08g23320.1 (locus Gly ma08g23320) derived from phytozome v7.0 (chr-ID Gm08; pos 17794788 to 17797238 reverse strand)
ccaggaaaataccgcgatcagttcgtggaatcaaagtaaacacttaatctattgtgtgcatgcattaaaatacatttctagttataatttaatttaagtgatgtgatgttggcctacttaggatattgatataataaaatcaatggatacgtgaggccttccagattacaataggtgattcaatagtatggctacttcgttcacaatgttctgcactacaattttaattgtctttgtctaatattaatgtccttatctgaccagttgactttcatatatcatatatgcttgttgttgctggttttaatgtccttatctgacccatttactttcatatcttattgtccctgctagatagggtccaccttactttttccctaacaatttaagatgtccttatctaaggattaaaaaataataacacattaaagcacaagaaaaaagtccaaagattattatcttttaagaaccgacatcttttactttattaattccttggacggcgtgatttaggtgggaacctcaaggtttaaatatcacttagagtatgtttagatggagaaatttaaaattttgagaaattttaaattctaagaatttcaaatacttcaattgaaattcttttattttcaaaattttgtatttggataaaaaaaattaaaattatgaggatgaaaaaaaagagaagatatgattggtgtgttagttatacgtgtttcttgaagaagacggtaaaaaaagaataatttcaatttctcaaattttagaaggagattgaaattccagatttttagttgcttaaaattctgttttaaaatttcaaaattttaaattcttcataaaaagcatccaaacaatgaattctaaattacaaaaattcaaattctctgataaattaccttcttaaattaaaattctctatccaaacacactcttaagtaatttattcttgttaatgtgaaactcctaacatatacactaaaaaaaagaataatacacacttacacacaactagtttttagtttttataaagatgacattcagacacaactaacttttctttaaaaatgtaaaataaaataaaatgaacaacacatgcacaatgatgggttttagggggctagcaggagcttcagcccctcccaaaagctttaataataataataataatatataaactacttataatattaataaaaatactaattaataaatctaataatatgtgttagtattgattttatactaaattttttaatagtatctttttaataatatttgttactcctaactataatctaatctaaagagatatgtatattaataaatagatataataataataatgatatttttatgactttttttatcaattgttattatcttagctaattacattttgtttattattataagtcttatttatgtatctatatatctaattattaaaattaattattattaagattatattatatatacttgttataaaatttgatgactttatttattattatatttaatgaatttgttattcttttttattgagactgaaattattatctatttaattgatattgtaattgtgtgaccaaaaagtctttcaaaacttgaaataaaaaaaaatatatgaattatacgtacatgtgtttccttcttataaaaaatcaattttagttttatgtgtaaaactaataaataagtttataaaatccattatttattaaatatttattagttagaagttaaatatttaagtaattaattaaggtagtgtttgattgatttatacttaattgtatttgagatgaaaatttaaaaaattgatgtgggtcacacgcttctaaactctattttaatttaaatatttcacctctatcattccttcaaaccaaattcaccattaaaaaaaaaaaaaaaatcagccctcccttgggtcatttcctggatccttccctgcacatgcacacatatacacataaatataagagaaagataaactctaatgtttcaacatataatgtcacatgcttttaaaagagaaaatattgttcaatttgtaaaaatccatgatttttatctttttcattgttaggtcagagagtattgtgaaagaataaacttgtaggagacagcacaaacaatggtaaagctgtaacttgttaatactattgaaattttctgaagtcctatgctatattctgattgtgtatttattttatgcttactgcaatagtgaagtctttaagacaaaagtaaaagtattagactttgtatttatgatggatagatgagcgattggtagacttaacttgaactttgtgagtgctggacaatctcttttgagagcattctaagattttctgtttttttgtcaatctcttgtgccaacataactgatgtcattgactcttaattcatttttttttacaggaggcttgcagattttat

SEQ ID NO: 2854 - DNA, 1864 bp, Glycine max
  Intron number 2 from transcript Glyma05g04530.1 (locus Gly ma05g04530) derived from phytozome v7.0 (chr-ID Gm05; pos 3674891 to 3676754)
gaagtatcgcgaagaagaaattcaacagtaagggtcttccatactattcaacaatgaacaatcaatttcattgtccagagtctattaaaatttttgaaaattgcttccaaagcaaatgttaaaaaaaaaaaaaagataactaggagatgttttctcatgtcttcttctgttttcatcttgttcaattgcacattttgttttgtgccttataccactctccaccagctagcaaccttgtttagttgcattttgaaaactaaaaacagtttttaagaatagaaaccaaacgcatcctaagctattttgttttgcactctttctttctttcttttttttgcgcagcttcggtgtgattgtctttcattcatgtgtattgagtttttgttttttgaggataggggtaactgcgttgaatgaatttcccgttgagcattgagaattatgtttgtttttggacgaatggtcgagtggcgactaaactgaatgtagtggaagtataagtgtgagacgctctcggctcctgttttccataccaaacactatccaattggttggtgtatttgagaaattgacctatgtctgggcacctgttttccatagcaaacactatcctgttttccatatcaaacacttgttgtaattgacaattttattgaagggattttcaggtagttggttaaggaggcttccctgctaaataagagtatgattctgtgaagccatgaaggagaaatgttttacatgagttgggtgggataggctagtatgtgtttgcaacagtttattgtgtagattttgtcaacttattaaaagtttaaaataaaacctaactgctatccttgtttcctaattcctactaacactcctcaaggcaactggcttctccttctcatgctatctcagatttactctcccctggtgctgcaacccaattcttaattcagttattaaaataaattagtatattgaaactgggtcaagtactcagaatcaaggaaaaccttgaaaaaacttggatgtgatgtgagagaggacgtgtcatcgaccaaagctgagtattgtaaaatggtaaatgtgattgaaatagtgtttgagaattggatggtctcaatgagttgtaaggactgtgttgcggcaattccgagatgtgtgatgggttgttggcatgattagaagacagctaaggttaaaattcctctgtcttttggttgagaatattcgattggctttatcaagtcatccatgagtctttgatggtgcatgatagttatcaagttcaatgcatgaaactgaaagtttcaattttgggcagccagtcaattgtaaatactcactagcaagagtcaagagatgaagtaaatattcgcatttgattgaactagtttttaatgtactgcatcgtctcaattttctacattgaacttctgcaaaccatagcagatgagactgcatgggagctggagttgaaacacttgaccatttaattgtttttgttacatgaaaatccttggtagatatatgaagaaaacttttagacgaagagaaagaatcggcagtccacacttattgacagccatcactttgtagaaccactgttctgaaaaatatattctgcacttgaaaaaatcttttatattatcattattatgtaataattgtatcatgtggccatgctagctctcttggttaattctttctcttttattcctttcattatatattcatggacaactcctgttatttattttccctttatttaaaatttctgtttattatatctgtaacttgctattgcttaccagataataatggtggttaatttgttattaattatgcagtgaggctagctcctgaggagacatca

SEQ ID NO: 2855 - DNA, 3130 bp, Glycine max
  Intron number 23 from transcript Glyma16g00630.2 (locus Gl yma16g00630) derived from phytozome v7.0 (chr-ID Gm16; pos 293528 to 296657)
ataagtttttttgaggtatattatacaaagatttactattgaagtcattaaatattcactactgcagagctgctggcattctgtgcacttgtttcctatcataagcaaaccattgtcttcattagtgtaatatggggatctggttcattaattaaggtactatttgcccttgctttttaaggcttctcttcctcttaagagaaatggcctagcaaaatgcaagtatggagaagctaaagaaaaatagaagtttaataatgaatgaaaaaaaccaaaaaatggatcttctccaaaagctgattcaaggagcctttgcttatctattatgaattaacggtgcttcttcctctccagtctctcttccagacacactacctttgaatatggcaattttacacagtagtctagaccagtacaacaacttatctagtgaaaattataacaatttagccgaaataggtttgatgttgccacatcaccgagggtgacacaggcacacagatttgattcagaattcattttcaagttggagaatggatatcaatgattgcaaattcttagaatttaggtttaggtcctagtcaatcctataaaaccgacttgtgaggtgattgttgtctcccacttatatactttatattgatactatctctaggcaatgcaggacttggattttcccgaactcactccctcatgcccaacactattgggtttgtgtgttgatacttgataatatggtaggtgaccctttaagggatttaggataggctctaatactatctatcattatcttaaaatttgggtttgggtgtaacttaatcatacaaaatcgacttgtgtggtgagggttgcccaacaccaacttgataattttatattcaaacactcaatcaaagagaatctacatcttcagtaaagctaattccactatttgccatctcttgtttagtaaaactcctattgattctcacatctttaattcaatcatgctgtgccctcaactgttgatattactgatggatgattttttgtttgtatagtaggcccttctataataatattcaagtcttcaaataacctgtgcacgatgtaaactgtatccaaattacgttagattccttgggccatgttcttatattctaccctatgatggcacaaatacgatatgtatctaatatgttgatacgattatttaaacaatatataggatatgatacatgtaagatatgaatttaaaaatgtataaaaatcataaaagtaacatattaaataaataattacaattccgcaaatccaaattaaaaacatatttcttgagcatcagtaaaaacaaaaaaaattcaggctaaaatatgttttttgtcctataaatatcaaaatgttcggaagctgtccttgcaaaattgaaatctgttactttttggcttggatgtaggtttggttgatttcaatacctacatgtcacatcgctatttacttgtcacttgctcattggttctataactggctactcttacattttccagggttaaccccccccaccccccaactgtacgaaacagaataaccacattgttaacacgcgcaacacaccacactcacatataagagacagttatactcttggaaacccaaatcgggttcgacttttacattcaaatggaattgcacgagttgaggaagtggctttccagaggaatgaaaggaacgacgacagattgaaaaggaaaattcttgaggttgattttgcaaaagcatggagaagaagaaggatgaacaacgaagtgtgtgaagcaacgagaattttgagggcgaggttggtcacgttgagcctcaagatagggcaaggatccatggtaggagagagtgaaggccaaatgttatgttattgtttcaagcatcctaccttggtattagttaccgatgacttatgttgatgatttctaaaatatgatgctggggtttagagaagaaattgggttggtatcatattttgggttatagtttttaagttatcatgtttgtcatctctattttggattctggcccatttggtgaattcggatatagattgtcgggtatttttttagtgaatttgggttacccctagccgagatctagaaactaattcctctgggtacttagatccatgtaagaggttgacttttcctgaagttgctcttccttacacattgacttggaggtcgaactcctaatcacatgtttaagggacatggttatctaccaaccataccatacctcaccatggtgatttcggccattattaatggtggggtatgaggcccaatacattgctcagataccatgaattgggaaaggtattttgaggtattaatatctttccattgatctgaattctctaatatacaacagaggcttccatgaaaacaagcaaataaatgctaataaaatagtaataaattatactcaatctataaaaaaacataactaaaatggacatggaataaaatgtatcttgggtaaaataggtttatgtatccccataacaaaggtttgcatccaacatctgttaattcctacagattaatagtttattctaggttttccatcagattttcttttaatattctttcacattgcttttggttagagttgtgttttggcttgttcgtgggtatctgtaatttttgttgaaattcgtcttgtaaatttgaaaagggtttgatgaatttgcttttgtggttttatgaggtttttctgtgcgtcttctatgtacttctcttctctatctttatattggtctccacattccgcaaaagtaaaaaaaagtctttcgtgtatttaggttcttgctttgtattattttagcatctagctacatttgaataatactattcaactgttatgtgctacttgctgctgtactgattaattctttggtgtatttaggttcttgctttgtattattttagcatgtagctacatttgaatagtactattcaactgttatgtgctacttgctgctgtactgattacttctttgatctattatattattagtcatttggtatttattactcctattctttgctgctgtatttattactcctatgcttttcagtggtacaataaattgcatccagggaga

SEQ ID NO: 2856 - DNA, 1294 bp, Glycine max
  Intron number 1 from transcript Glyma16g04380.1 (locus Gly ma16g04380) derived from phytozome v7.0 (chr-ID Gm16; pos 3707322 to 3708615 reverse strand)
tcctcagtttctccaaacccaaactttcacgacaggtgcgtttggttttactttaaactattcaatattcatctgatcctctagcttcattcattcattcattcatcttcgttcagatcatgatctgtgccttgcaccatggaaaaattgaattagcttaatttcactgaatttatgcatgattaacgggaatctaatgttgattcttttttatggccagatttcgtttgaaattttgtttgttttattttgttctgtttttggtttgcttgattggctttaatttattgagatgtaaaaaaagtgttcacaaggaagaggcaattcagctacgtgtacggaggaattcattcttggatatttatgattaaaaataaattttggattttgtactgctatgacagagatttgcatgttttagcatattaggatgtgtagcattgatgcgttccctgtttggcgtcttttgtgcttcgatgggccttggataggaataggttattagtgtttgttcgctaattaattggttgaatctgttgttggatattgttgtttatagtctcagatcttgtacataattttagtgattcagctttttttttttagaatgtaactttttcttaaatagaaaattgtagtttgttttgggtgatatgttattgttgtatgcttttgtttacttgtccaaattgaagaaaaacaaattgcagagtctaactgattgggaattattttgtttatttgttagatattgcagttttaatcaatttagttcaacttgattaatggttatactgaggttctttatgttttctaattccctctctaacaatagtgaaagttgttagtagctggtgattgagaattgttttgttagatattgcagttttaatcaatttagttcaactagattaatggtttaactgagtttggttctggtgtttacgaattcctgtctaagaatagtgaaagttgttttttgctggtgatgtttttatatatcaatatgtgacatgtcatccttatatttgattagccttgtttagtattctgtatgaacttggttgatttccatttgcctagcttgagctgggtattctgtcattgattttgaggaaggtgcattaaactgttaatcaagtatgttggagtttaactaatgtcttgcaagtaattgtatcaagcaatttatttaaattaatggcttgactttactgtcacatgtgcatgtttcagggacctgtcagatttagttaaggtttttgcatcatcactgtgtgaagataatatagat

SEQ ID NO: 2857 - DNA, 2683 bp, Glycine max
  Intron number 2 from transcript Glyma07g33470.1 (locus Gly ma07g33470) derived from phytozome v7.0 (chr-ID Gm07; pos 38392587 to 38395269 reverse strand)
ggaattggtattacatttgccttcaacatgccttgccttttttattcgtgataacttgtgttggataaaggggtggggggattaatcatgaagttgtgaatcttatttttgatgaacatgtgttgagtgttatgttatgacctttaaatgtcatggctacgtaaatgtgtttgcccggttgcctaaaaaatgctatatatgtggcactagccttttgtttttgaatttttttatgcacaatggtcgcactgaggttcgaacctacaacctcatgcattctaccctcaacccccaccactaggcagtgacactagcttatttagaggatgagtattctcctgttggttctttttgtcatgacaacaacctattttgagaattttctctttattcttttgtttgattctaagaaattggatccatctaactctcctaactacacacaatgacattattaattgttgagtggcatgatttttcggtaaatttagttttctaccttcttaactgtttcaacatagaagagggtagaagagtgatagctaaaacttgagaaaacaactggctgattgggttttccccaaggatctccagcggttcttgtgtgttaatttagaagatttggcaccagcataggtgctacaaaggctttgacactgctcaattggcaattatctgacgtatctagttggaaagaaatgctagaatctctattgggtgtttgttacctcaagtttttttgggatccaatcagttcaccgagtttcgttttagtgttctgctactggtcttctatggggggtggggttttctttgttagaatagagagattgacttgttgtattacctgtttcttgttcttagtactttttcaaaccttttatttttgttatatataattcttgaggaatttttatcctttcacttttgtaccttcttttctgttttaataaattcttttatatgaaaaatcatttacatgatataattttatctctcaagtgaactgtgaacatgctaaattagctcacatgtagcatagacggactgttttgctgcttatgttttgttttttttcattcaaggcacctttatttaatgtattgcatggctatagccatgccccattcatgtcatctgatttatgactttgggcaaagttattttgcccatagttatcaatagatccctgatcacagtgcagagctgctgaccccaaaagtactgtatcagaatagtgttatactgaaaataatggaaaaagtatgtaatttgtactttactcatataagtgctaaaaaatcaaaggttacccaaaattaagaacatatcattaataatcaaaattcgtggcctagagacacaatcaccatcaatcgaataacaagccaataataacgaggagagaatgaggctgaggtgctgtgtttggttgttgtaattgagatgatggcttgttaaccatatcaaccatgatggttgtgacttgtttgctattttcccacaattcaggcttctatcatctcttgataataatggaatacgatgccacttcttgtgcattcaggccatgtgacacgatgctaaattgctatggtgcactattaaccataattttccattttatagatttgaagtcttagattatattagaaagtttgctattcaagttagccattctaatgtagaatgtttccacttaatttccattgagctttttcccaacttctctgtatggtgaaaaaaatattgcttgatggtggggaggatgtttctctttgtgactttgagttgttatgcaatatgaattaggattcctgtctcgttgtcatatgaattacagcatctaatttatgacttccaacataagagtttggtagattttgttccacccatcatcacaattacaaagaaagatttcaagggataccttaaaatagtgcccttgcttttctagtttccttttgcctgtagttagtttgaatcataacttcctttatcatatactgttaatttcagtcttgtatttttttaatgcatcagaagtgttggtatatcccacatggcgtagttactgaaatataccaagtgaccacttttgtacagtcttctgctgtttaggatgtttcctgttcccttttggtttatactatggtgaaacatgtgatgtgaggggttgatgatagaggctttgttgtatattgaagttgtattttagataggaatataatgtgtgcatcgtatccctcccttccctgtagtgggtatacctttcttgtaaggatacattctcaggttccttttactattgaatatataccacattagccattagttataaaaatacaaatcaatatatttgtgttgcttgggggtcatcttagaatttcttttatataaatgggttatcccatgttttaagtgttttttccttagatgcaaactatctgctttactagtaaaccttttcctaatagtgacacacggacttaatggacaattggacatgcatgatgtttctatcaaaaacattcctgagtgaccataattccatgtcaactttctgaaattccatatgttctttttatcttcactgttattttcaagaatgtcaagttggagtaatttgcctaatgtctgttttgcaggttacgtgcagaagataacagctcgcaaggatatt

SEQ ID NO: 2858 - DNA, 1226 bp, Glycine max
  Intron number 7 from transcript Glyma08g27740.1 (locus Gly ma08g27740) derived from phytozome v7.0 (chr-ID Gm08; pos 22074985 to 22076210)
tcgcgtttcagctgcacttcactatcctgctggtgagtatattttcgtttgtgatttgctgatagtttcctgttgtacactgtacccatatcagattggttaatagattgccaatttgccatttgtaaaatgtcacttcagtaattgctatagcacaaatgaatagcctatggcctttttaaatagaaactacagctcttgtagttttcagttccccctttaacaggagtatgactatgttctcatgcttttgttttgttgggacaattggtttactttaaacacttttttttttctctaaatctaaataacacaaacgtaatttagtagatagcacacgttaaaacactaattattgttactttagaaaaaaattcattctgaataaaatatctgggtatggttgccaatgtattaatataattgatattatactatttggaatgacataataaaggtaggctaaaatataatttttatccttttattttctcaaatctgcaattttagtcctcccattttttaatagagacatttcatcattcacttttaaaaactttgcgattttagtcctcttggccaatttcaaatttgattgtgtactttttttaattcttttttttttaataaattaagtttgttagcaattaaataatttttaaaaaaacatttatcatgtaaataataaacaaacaattactccctaaaatgttttcaagcttttaaaacaattactccattcattccaaaataatagtctttttttaagccttttgttttgttccaacttccaaaataatagtccttttagcttttttaagctattttttcaacaatactcctatatataatacttgcattgacaatagatattggccataagttgttggatagtagaatgtatccactattgctatatagtaggataatttatgacgagtagttgataaactgagggtattttgtctatatttgtataaattgaatatttcttaatcaacgtgccataacctttaaggactcttattttggaatggaggaagtataaaattagatttgataatttgttgtcgcaaatcaatgtatttactacatcttattatttcgttaacttgcaatttgaagaatatagggttttgatgtgcatggaatactttatgagggttaaaagctattattgtatactaaatgattttcttgttaatggacaggcttggagggttcag

SEQ ID NO: 2859 - DNA, 1190 bp, Glycine max
  Intron number 3 from transcript Glyma02g02390.2 (locus Gly ma02g02390) derived from phytozome v7.0 (chr-ID Gm02; pos 1795440 to 1796629 reverse strand)
attggaaccacaagcaggtaacttaacttgtgcttcctctatggagtctatactttaggttctgtttgaataaatttctcacaagcacttacgagagaagaaactaactagtaaaaaatgaaattaacttatcccatactagcttctctaaaagctcattttcacttatatataagctaattttaacatatgagagatgaaattggaggtgtgattctgggggatgatttcaacagtacctccacggatgtgatagagtttggtcaggattgaaattgtgatgggaggttttaaagtcgtgataatggctgctgatgaaaatggttcaaggagtcctggtgtgggtgcggtgatgatgtatatataaaatgaacaaaaaatgtaagaaataggcgtgattgaaaaaattttgtaagaaattagtggtggtgtgaaacaaaaaatgaacattttgagagaaacccacacattggttagacttaatttagaataggcgtgactttaatttgaaggagttcaagacaaggtcattctgtaaaactaatattttatttgtgcaggtctctgtgtttatgattttgtttatgtatgaaattaaggaaatttaatctttgtttttgaatgagccttgggttggacatgtaggcaacctcacctagtaggataaggtttttggtgttgtagtttttgaatgagccttagagcagacattatcaagtagtcatagtagattttatgaatgatttcttttctcatcctatgactaacaagtagcaactcatcagaatatcattgtctattgcattcattcttctgtatgtgctcattgccaactcaactggatgattttttccccttctttgagaaaaataaagatatgattctgttgttcctttaaggcagtgtagtgggtatagctatcagctatgagatacgcaaggactgtgcaggttcaatttcaaaccttgcaataccctctgcctccatttctctctccccttcttctcatgggacctcttgtgggcttcccccaaggcccatcagtgatgggccctaccttgaaccaaaaagaaaaacaaatgtgattttgttggaatttatgattctgttgaacatagtcttatagtttaaaacgtgaggtaattgtccactttgcttgaatgcagacattctcactatcagtgagtgaa

SEQ ID NO: 2860 - DNA, 1038 bp, Glycine max
  Intron number 12 from transcript Glyma20g36180.1 (locus Gl yma20g36180) derived from phytozome v7.0 (chr-ID Gm20; pos 44390170 to 44391207)
ctaattctggctccaaaggtatgtctatttatattcatcttagcaaaattttatttcctttagattctactaatttactttaaaaatgagagatgttattggtctaattagaatttcagacacatgaaatttatgacagttatattgctagttccatttttttggtgtttgcatggtatgtatggcctcattacttgtgtttgttaaatgcagcacatttaacatatgatttaaattagtttcagcacatgtatatatcattaggatttgattaacatttattttgtgatattactgtaagtctgtaacatcttgccttgttaagaagaggtctggattgtgtcagagcttgggaattagtatcgcagaggagctgctattgctcttagaaactaccttacttgctttttcaatatgtagtgaataagtacttgtttagttgtttgggaatgattaaattttgggaaattattgggttttttttctcaagagttttctcaagaagctgcaaaaacttagtgattatttctgcaaaatcagctgaactaaacctacactaaatgttctcaaagatgttgagtttgcgtaaatgatgttgaattcacatcaatgagatacatgatttgcctctgattcacatttataataccaaatggtcactgaattctgattgattcttaaaattgtttagatatttggtaaaagaagaaatcaattgagacacaattatagagaatgaggataaggaatcctcctaaacaaaagaacaaaactgaaaagtacctagaaaaagaagttcaaagaagcaaagctatacccaatccctcaatatatatgttagtgaaccgaaccccattaaaatgccatgtttttgaaagcttagttcctttgtctttactgttccttttcttctttcccctcccaaatattctcttctatttgatgaataatctttagtagttaattttttatttgttaaaatgttattgtctcataattgcagctgtctcaaaggaccttttcaggatcattattaaa

SEQ ID NO: 2861 - DNA, 2805 bp, Glycine max
  Intron number 1 from transcript Glyma05g26930.1 (locus Gly ma05g26930) derived from phytozome v7.0 (chr-ID Gm05; pos 32812874 to 32815678)
aaggaacctacaatcaatctttggtcgccaatcaggtttagtttttgcctaatctccctcttcttttatatcttcatttttaatttcttaggttatcaatctcattgtcacatataattaatagataattatacaaattaaagcataattcaatggaatatattattgttctgcacattaaatttgcacgcacctgcacataacatgtgatcggttagttcacatgaaaatctgctcttacccaaagtctaaattatggatatttagttaatcacataagtataacccctgtttaagactaaaagcaatgacgatgctaactatacggagtgcagtttggcattttcagtatgttcaaacaaaaggttgtagttaatctattatccgtatgtttagtcgaactatctacaaaaactaatagcattttttagaattgataacgagaaaaatcaattcattcaattaattaatcagtttttattatattgtccaattgatttagttaaaaatccaaaaccaattcaatttaactagtctaaatcagtttaaattgaattgatttattattctttttatgttaatatatttcatcaaacatatatataaatctgaggcatattccatatgcttcacatagatgctgatacattttcaagcattcacctcttagctttacgggtttcttaatatatacattcactttttctcttagctttatcaggttattattgattaacatgcattcagtatattcttttccgttttttctttcttattttttttatcacatcaattactatatttatcaactttttttttatgatctttctcttccaattgctccctcatccaccccaaaacaaagtggacgttacacattacccattttgatcagttacttctttctttcttttttgtcttctatctatccatccctgtcttccactagataatgatagcaacatagatgtcatcatcactcatctacctttgccctttttaatttttatagtggtgtcttttagaatttgggatgcaagagacatgcgattttaatttctgcctctgataatctctctcctccaaaactatggtcccataaggaacctttctctagtaattaaatatgaaaccttcgtatagtgtagacactgtagagtttttaatgcatttggacaagcatattccaatacttgtgagacctatggtttctaaacccaccacaacgacatggccaagcatcaaagcgttaatcttgtggagataaccccacgcatattccaatacaacacagacgatatgtatatattccaaggcatattccaatacaacatgagcatgctattaaaaataactataataataataattgaaatacacgtcacaatgatcaggacgatctaaagataagacaatctaaacactcaagtcataggtctttcaaattttaaaaaattatttcttattaatttttaaaagtataaaagactatatatattagaaaaaaattcatatattgttagaattgatagtatagaaaaaaaaaaggataaaattgaaaacatatcggagataataggatattagatttattaggtgtggttatataagttcacaatgtaattatgtaaacttatttgtttatttgattcatatttattttgtttattgtgagtttatttttgagatttagttaagtttaattcatattctaagatgatggtatgagagtctatcttagatttattaaaaaagtcacatatcatattattcacctatcaagcctaaaaatactaacaatcttaattttatgagcaagttcaaacttacattttaagatacataacttttttatttaaagttaaaagtttctttttaaattttactttatatttcacgtattgttgagtagacaccggaatgattcaagagttctgactcctgaggtgtaagcaaattccaaataagtttttccttgatgagatctagccttcaatgagaaaaatgtgattgactcaaccccgtagtagagcctatgataagcccgtgtgttctgttcggtctagatataaacgccaaattgtttcgatccacccacttcatctaatttaatatttacaatttattatacatttttaaaagtaaataaaaactgttcctgtgtattgtaattatataaaaaaaaactataatttaattaaatatcatcacatattattaaaaaatttgacaatgataataattatgtaatgtgcccaatatttctaaaaatataacaaagtataattagatggtagtataaaataataattatactcaaattcattaaaaccaagttagttattattaaattcttgaagtttattttcgagaaatagacaagaacttgtttttcttataaaactatcctatctagaataaaacaaaatacacatgaacgaacttacaagtgacagaataatatatggtcatttctctaagatcttattaagaaattgagacgctaatgtactccatcttacatttacattcttctacattattcacaaaagaaaatctattatttcctcacatttagatgtggcagctcctgctttgtatcatgtttaagctcgagggtttaacattgaacggttaatagcgcatttgactccaaaaatgttgtatgcacatctactataaagtgagataattaagtttagattttacaaacagccaattccatttttaagttgctagtatgttttttttttcttcctcttttggggtatcgagtagtaactcctcattgcttattttttttag

SEQ ID NO: 2862 - DNA, 680 bp, Glycine max
  Intron number 18 from transcript Glyma09g36050.2 (locus Gl yma09g36050) derived from phytozome v7.0 (chr-ID Gm09; pos 41926530 to 41927209 reverse strand)
ctccgcaggctactcaggttgcgcaaactccccaggtatgtcatgatatcatgttacatcttaaaaaaaaaagaatctttgttgtgtttgcggataatgtttatggaattatagctcagcggtaatttgagttttattcaaaatatattgatagtctatagttgtttttgggtgaaataattattttctttaaagttccttttagaggatgaatttttcttttctagataagttgaaccaaacatgcacatagtgtgtgaattttgactccaaatgattgatttggacatagaagaaaagttgttttgggatgtaattgcaaacccaagcagtgacaaccatttctttgagatacaagaagaactttgtttgaaattaaaacctctgctaagacagacacatggtagataatattaaggtatgcagttttttattttatttttattattgttagcaggcacgatgaggggaaactcatactctgggtctcttgtataatctggaattattgtttagtgggttttagtagcaagtctctccttgtataagatttaatgttatattccaaacattttttgaagtttccttttcataatcaattaagatttcccttgttgcttgaatctaattatttttttcttgtagccgactttctcaaatactgctgttgcaccaccacc

SEQ ID NO: 2863 - DNA, 5599 bp, Glycine max
  Intron number 5 from transcript Glyma13g10760.1 (locus Gly ma13g10760) derived from phytozome v7.0 (chr-ID Gm13; pos 12906906 to 12912504)
tcttgttgaaaaggaacataccaatcaagagcgtaatttcttgttgcattatgcgtatatatgatttcaaaattccagtttaaaattccataaaatttatttggattcaattcatttattgagtgttaggttcatttctattatatttcttttggatgataaagggatgctcttctccaactagtctttctattttgtttttgaataattagtcatacatgttttgactgaagttcttacttaagagctaaaggttccatgagcaatttcatgtccttccagaattacctgttttagatgaataggcatatacttggttattggtaactgttagatataaaaaatattcatgtacttatcatgtgaaaaccatttattcgccttcaccaaatatcttaaaactttagagtgttgatttttttaccaaaatatttcttgttaaacctccagctggttctttatgctgatgaaacactggggtagcttggttatctcaaataaatttcattggacttgtttagcactgtctccaaatctctaatattgaagaaattatttctactgtataatttcacaagttgcaagagtgatagctcggtatctacatctgcactcatcattgcaactattttgtgatcctctcagtacccatgaatttatatttaaatttaattaaaatcatattacaattgaaatccatgataaaaaataactccttttcggaacaagatataaagatattatctataatctatattgtctataataatcaacaaatagtagataatgataataattgttttgctgagaattaaattataaagatgcatgtggaaaataaatgagtcaatgggtcaaaccagcgtctggagctgatacaaatccccaaaacataagcatgaagccaaaatggcatagtgcaaccaatgggacagacaaacagcaaagcaaaatataagagaaacttatggaggagctggatgcccatcttaacaaaaagtgggcttctctgattgatgatgttagggtattgaaatccctaacagcagagaaaacaagagaaacagaaaatagaagagtatacggaaaatactgggagcaaactgaatttattcaagaaggaaaccttcttccaagggaaaaccctttacaatttctaattcttctctcccccttcctctaatgagaatactcttatttataatatcctaatccaactaattgataaagataaagataaagatagaataataaagattagatgatagaataataaagataaagatagaataataaagatagatggccctaaagattaagctaataactaattcgatcctatctcccgtgtaggggctttcttccttctagaatagaccctccagataattggtctatcttgagatctaacaatactcccctccaaagaatgaaccttgtcctcaaggttaaatttaggaaaaaatagattctgaatcacatccacattctcccaagttgcctcttcctcagatttgccatgccaacgaatcaaaacttgacgttcgacttcatgctgtttttgaacttctctgatcttcaaaatttgaactggaaagtatagttcagcctgatgttccaagtcagggggtaatttttcttgtgcttgatgattttcgagggctcttttcaattgtgaaacatggaacactgggtgtattcgtgccttcgaaggaagctgtaattgaaaagttactgccccaacctgtctaactaccaaatacggaccgtagaacctagctgttaatttgggatgcaatcgcggaggcattgatccttggcgatgtggtctgatttttagataaacccaatttccaacgttgatatcatgagggcgcctgtgattgtttgcatgtttcaccatgagactctgtgctctttccaaatgatgcttcaactgcttcaaagcttcatctctatccatcaagtcttgtgccacgacctccaccaaggtctccccgggtatgaacctagttatggttggaggaggtctgccataaacaatctcgaatggagtgctctgggcagcagtgtggaaactggtgttataccaatattctgcccacggaatgaaatcgacccatgtctttggttgctcagagctaaagcaccgtaggttagtttcaaccgtgcgattcaacacctccgtttgtccgtctgttttcggatggtaagctgtgctaatcttcaatttagttccttgcaatttgaaaagctcctgccagaaattacttaagaaggtcgggtctctatcactcacaatggaaataggaatgccgtgtagtctaaccacttcctttgtgaatacttctgccatggagtgggctgagtatggatgtttaatcaaaatgaagtgcccatacttgctgagtctgtcaatcaccaccaaaagtgcgtcatatcccttcgactttgggagtcccacaatgaaatccatgctaatctcctcccaaacagcattagggatcggtaagggttgcaacaaacccattggtgatgatgcctagtatttgttgcgttgacaggtgtgacaggctgccacaaaatctgttactgactttttcattcctagccaaaaaatggattgagctaaccttctatgagttttgaagatgcctgaatgacccccagttggggtggtatggaattctgtcacatgttgtaattgggtcaactgaagatggtcaagtttttgctcctcaccttgagttgctccctcttgatctcggagcaggtttgaatagaaaagtatcatggcagcagcctcaacatctgaagccctcccaaagaccttcgctgaaaatcccttcttttgcatgctatagtctcccttgatttgggtgggtgacccttgatagcgaaaagacatggtaagagtcttccaattgtgttgtacctcacctaatgaagccaaccaggtcatcccgaggatgacatccacaccaccaagatcaaacaagaaaaagtctccagtgtaaacataaccttgcatctttaggatcagattctggcaatatccctgagattcctgtcggtgtccatttcccagctgaaccccaaaacttctagtaggttgaatcggccagttcatccttgagattaggtccctcgctacaaagttgtgactagcgccactatcaatcagaatggtaaccccaacaccagccatttctccccataggttcatggtttttggaggcgtaatgttccgctggaccagttgagataattccatccattggcagtggtattgatcccccactacatcattggtctcctctggttcctgtttgtcattctcttctatgttgtcgccttcgtcctccccaaggatagtgatccgcagactcccttctggacacttatgtccaaaaccaaaggctaaaccacatctaaaacagtggccctcctcttttcgttttaaaaattcagcgtatggcaattgtctagctcccttgtttcttgaaacggtgccagcactgccggaatgcgggttatttgatccacacgaagaaaccccttttggagctgtcatgatgttccgtgctccagtagtagctgggcgtgcctgggatgcgctataattgcttgttgtattgcctgctgaactcgctgggttgctaatcacgacgcttcccttatgttgaaaacgcagatgaaaaaaaaccctttgagaaggaggctgaccacgagcaaggcggacttcttcatccacatctcttgcaatttccatggcacgcaagacctctgtcggccggaaagatcgcaccctacatcgaatctccggctggagaccgcccaagaagtatcccagcatctgatcttctgatggatcagggaattgagccaccaaaatttcgaattccctcaaataaacgtccacggactcctcctgtttgagagtttttaaacactcgaaaacattgcccttactaccttcaccaaaacgctgaagcatgagtggggttaaagattgccaagaaagagatggattgcgttttcgaatgaaacgatatcagtgtaccgcctccccttccatgctaatgaatgccaatcgaatcttctcttcttctttcacttgatgtacttcgaaaaaaatttcagctctagctatccaagacagaggatctgttccatcgaagaccggtagttccaccttcttggtccaaaagcgtggttcaaaaaccacctcagattcggtattgctctctgacttggtatcggaggggtctttctgtagtcgttccagttgctgcagtacgtgattcatgatgccttctaccctctggatgccgcctctgagatcagctatgtcttctccatgggtcatcaaggtgcggtctaaggtgtctagatgtgaatccatctggaatggtagaggaaagagcaggtcgaaccaattgttagggtattgaatatccctaacagcagagaaaacaatagaaacagaaaatagaagaatatacggaaaatactgggagtaaactgaatttattcaagaaggaaaccttcttccaagggaaaaccctttacaatttctaattcttctctcccccttcctctaatgagaatactcttatttataatatcctaatccaactaattgataaagataaagataaagatagaataataaagattagatgatagaataataaagataaaggtagaataataaagatagatggccctaaagattaaactaataactaattcgatcctatctctcgtgtaggggctttcttccttctagaatagaccctccagataattggtctatcttgagatctaacagatgagatgcgccatcctttgtgagttgactccccagtttctgacatcaagtgcaaatacttgtcttgtgagctaagctcttgctgtactgaaaaaccagatcaaacttccctctttctctccaccatacaaaatttacccatttattgcttcttctcctaaaggatctcatttatattgggattgcagacagggatggcggcctacagagggatgtgtttctttgaaagtgttgttttcctgtgctgtttttgtgagttttttcccgccagccatagcctgaatgacccttagttgcttttgcctccaatgatgcttccaaagaccctccaaaggcttaactaacatcatcttgctgtccggtgctgcttttaggctctccctgttctgttttgatcttgtttggtctttggacctctattctgaaggaccctcttgtttggatgctgccccagtttatgttttctgtgtccctcctgctgtttggtggctggctgcacttgctttgctgaacctctctagttgtttagtggttctgcttgtttctggattgttcttaccctaacctctgtttttgttcccatgtgctattaatcatattcttctaaattcaacttgtagattaatttctgttgtgtggtgttaagggctaaacatttgattgtgtgtatcatattataatgacaagtataaagttcatcttacagttacattcttgtgaagtcgttttcttcccacttactgtctaataaaaacttgtgaacag

SEQ ID NO: 2864 - DNA, 779 bp, Glycine max
  Intron number 2 from transcript Glyma07g00630.2 (locus Gly ma07g00630) derived from phytozome v7.0 (chr-ID Gm07; pos 325224 to 326002 reverse strand)
actgcttttcagattggccggtgaacgcgagctaggtacacttattaatttttcttcttctcatcttttaatgattctgatgattgtcatctttgcttaccatgagcttaggaaataacaattttattaagcattatcctactactagtttaacacataattaacaaatcacatatttgtggcaatggtgagtttgtagtgtaaatatagatgttaagagaaattaaccggagtggtcaactattggcacaaaatctaaaaaaaaagaaacagtttggcattgatgctgttggttttaaggtactgtatcacaaaaggatctagtagcagactattgataatggtccggaaaagaattaaattatttgattttctgtaacttcattaaaatgttctgatgtgtttgataaccttaggtggatatgcaatttagaaattttaactggcgaaagtcatactctcctttagagctgttgcaatgtgaatcgcttttcagtttctagtcctatttggatttcattatatattgtttataaatcaatctgtattctgtagcatgaatcttggcagtagccttcaattaattaatcggcttttggaatgtacaagctttgtttttttgttaactgtaataataccaattgcacataactgcatgtggtcaatggttattacttttttaattgcaatctgcattttgagttacttattatggtctttcaatttatattttgaatcatccagtgataagtacagcagtgtcacccccaactccagtt

SEQ ID NO: 2865 - DNA, 981 bp, Glycine max
  Intron number 15 from transcript Glyma18g39750.1 (locus Gl yma18g39750) derived from phytozome v7.0 (chr-ID Gm18; pos 47858078 to 47859058 reverse strand)
ctgcaggttcatttcctaccaatttcatcattgattttacagtttatgcttggaaatgcattttgacatttaatgttttgtctctggttcttaagttgtaattcaataatgacaagctatattttaattttttacttgggttcagatccaactgaactactttctcaagctgattggtggctgcaatatcattaacttgagctactaacatgagtttctatgtataaaaatgtattttccagtttttacagatttgttcccttgaccatctcttatcttagaattgaagttttctttattttttaattatgtcttttagtgttctaggctattctctaaactacattaaacaaatgtggtgagttagtagaccatggtctgcggcattaattgatatttcaaattgatgacaggctacaaaaactgacacatgattgatataggtgtgagttccatttatcagtgaaggttttctttttttggttgggagttgcagaataattatggaagtaaaaattaggtgttcataatgcaacagtgtttagaaggttacgagtttgatggcattctaatttggtttttgttgtcattattctttttcttgtggacccaatgaagaggacaagatgattagatctttctcctttaatatctaatgactggtttacatatattgtaaaaataatttgttctaacgtaaatggattttttgagaactcagtcattgtgcagcttgatgtaacttccattacattatgtagtcttgtgatttatgcatatgttgcataacaatataacagtcaaatcagtagagttagctggtgcagagcatcagtacctccgttcaaatttttctcagttttgggtcttattttggagcagaaattttcatttgaccttggttcttttatatttctaatgcttttgtttatttatgtgaatttgaaaggattcttttttttttaaacatcttaagggaaa

SEQ ID NO: 2866 - DNA, 2232 bp, Glycine max
  Intron number 5 from transcript Glyma09g08900.1 (locus Gly ma09g08900) derived from phytozome v7.0 (chr-ID Gm09; pos 8332997 to 8335228 reverse strand)
ggtgctatcttacctgactccgccacatttagttagttctcttttcttcaacttcatgcactttttcaacgcattgcattgcgcatcagaagcttgaagttgcaatttgtgattgtaacttcagttgttgcaatctataattgcatatttgttgtctgatttgacatgctttgacttgcaaatcacattctcaattagcttacttttttaataaaaaaattacatgctactaaaatcactaatcaaaattacagtttgacttggtctacagttaattaaaaacagattcatcatgttaataataagttttgtaaataattcattttgaaaaaaatgtgtgcaaaagtgactcatatgagtcaatcagcccatatatacacacacatataaagagtttgtaaatataaaacctctaggacccaaactaaaccatgactgctgtaaccttttagataaactttttttcctgaacatgtaagataaaaaaagattaaattaaatttttctaaatttttataaaaattcattttcttattgaatccttctccaaaatttaaggttaatataagtttattttcgtttatgaagaagtttaaaaatattttatctttttctttctataatttcttatgaaaaaatttaattaactacatatataaacattgattttcatcatacaaagatacatattggttatttgttggtcctcagtttaaaacatagattgaattgatcctttaaacatatataaatactctcttagtgtgcgtctatatatataaaattgtgtaaagggtagttaacctatgcaagtaattttgatactaagttttagttgtaaattttcctccaattatttactataaatgctctaaaacaacataaagaattttatatacagaataacccgacaatactcgttaaagaatttagaaaaataaaagatttatttcatacacacataatgtttcatatgctacgaacttaagagaaaaaatatttaagtttaatctttttttcatattcttatcatgagtccaagaagttctggttgacgttcacttaacgtaaagtgcctagaaaaaaaaaaaaaaaaaaggtatacaagtcataatagaatgattagtgacatgcatcgacaggggggtctagaaaatttagggctatcaacatttgattgagctgaattcattgcgatgatgctaagtgccgaaacgttgatagctactgctcgatcaatcaaataactaagatattatcacaatacagttttaagtataagtcttgcttgcgtttaagtcaatgactcacatgaatagactttttcagcgatatgcatgaacatttggttcatataattaaaacaaattcataagatgaacagcatggataaaagaagtcaattattttacagggaaagaaatctaccattaaaaaaggaggtaataatgttaaccacgaaatgaaaggcattatactttaaattttcttttctcatcactgtcagtttcaacccttgagcgctgggaggagacaaaataactctagtaataattgatatacataatttaaattctctttcaaagatatatattaaaagattttaatatatttctacttactttttatttaacaactcttttttttcacaaaatattaaaaatatacgcaggagaatgaaatcttaaataaatacaatttttttacataataggtatacttttttttaacacactttattatataatttaaatttattattaaaaattacaattttataagttgttttcatttcttattaaaagaaattaactcatgattttataaatttcttgtaattttataatttttaataaattaattttacttaatagcaataaagaaaataatatatatatatatatatatatatatatatatatatatatatatatatatatatatatataatagtgtgttacttattgatcaaacattagtcttgatttaattagtttacacatcaatattcaaggctcaaaccaatatataacattactgaaatctaacttcttttttcaatttacttttactattttttttctctctttcaaccatccacctatacacccaaaaaatagggtataccttttggttatttctatgtttcataacccttcccccatgtcatattcactattgctgataaccgagtaacaccaactttgcttcctttcccagcaatcacaggcg

SEQ ID NO: 2867 - DNA, 1309 bp, Glycine max
  Intron number 1 from transcript Glyma04g36170.1 (locus Gly ma04g36170) derived from phytozome v7.0 (chr-ID Gm04; pos 42715001 to 42716309 reverse strand)
gaagagtccgatttcgaagaaaaggtgctttcctctacgctccacccttcattttctgttattgttagctttgttcattgcattctgacgcacaataattcattcaaaacgttgtcgtttaggtcgcactctgtctattatagctataatagcttatttgatttggcagcttgaattaaactaaaccttgttccttttccacccatttttgcacactcttatttgtctaggtttgtaatgtatcaaatgattgggaatttgggatgaacagaggcatatagggattcggtgatatggtacttatgaagcatgatgatcaaacatttcaattttgccttccattaatttgtcagacaatttgaagataatgaaccatgatatggaaacattagagtgtgaatgactgaatggtcataactgggagttcacaaatgagaatctatgaataatgaatatactacaagctaaacgcacatatctgaaatctgtgacaaaattctgttttttttaccctctagagaggtagtaggtggaatatttttttttcttttaggtgcacatatttatgttgttagcatctttctcttaaaatttcatatcttttgggagaatcaaagtttggtcatcatacaaggataaaatctaccaacaaagtttggttgagagatagttgtatcccttaggcttgttgacctgaccacagtttgattcttatgagaaaagttttgtggagagagacaaagtctactttaatgatctctctgtcttattggaattaatctcaaacttcaggttaggagatatccttggtgtatgctaactactaagtgcatgcttggaacagatttcgcaatgtgaattgtcattctctctctacattcatttgaagcaataacaagtagcttctgaatcattgaggcctgtggacatgattttcgtaatggatgtggtgtgaaaactctattccaaacatgctgtaaatatacacattacacacacaaaacaaacaaaatctcctcaaatgaaagctgccagtttgccacattggcatctagctgtgtttgcttgaacttatctgcattgctctgatgattttgaactagtagtcattcacatatacttaatagttcatagtattaagaaaatgcttggattatccatgacataaggtagtgttcagttaagaggataataggctacaagttgcaactcagtgctctttaaatctctcttttcatattgttccttgcctcatactcatccctgtcaatgttggcacgaatcattgcagtgcaacgagatcaggaag

SEQ ID NO: 2868 - DNA, 5116 bp, Glycine max
  Intron number 1 from transcript Glyma17g23590.1 (locus Gly ma17g23590) derived from phytozome v7.0 (chr-ID Gm17; pos 23569209 to 23574324 reverse strand)
ttcttgctgttgactttgccaaacagctcctacaggttctctctcaccatcatgctaataaattagtattccatgcatttttgtattgttttactgccatcacatatatatcttcagttagttaattatactagttcatatttatattttcaaataataatgtgtatgaatatctcaacaatacagtgcatgtgtggtactttttcagtgttaaacgtacttttgaagaagaatactatgtgtgtcttttagtttgaaagtatttttcgaagtgaagtagtggagatcttaacatgctaataggctatcattggtttttggtttgtagtattccaaattcagttccaaggatacttagttttgtaactcgtatgattaccttcaaaaataggtttgattcttaaaattttgtcaaaaaacttagtttagcaacacttaagttgtttttgtaaactcggcttataaactaagataatgattgatttgagtgtttattattttattttatttttatttttattttttaaaaataatttttattgttaaatttttaaaatttataaaacatgtatcaagaaaaaaatattttaaggtactattgtgtttttatttcttcagataaagactgagaacattcatttattgttatcaattttagatttgattttaaaataataaattttaaataaatatattttcactcttattttatgttttatttttaaaaataaaaacaaaaaatacacaaaccaaacatcacgccgaccttaagtttaacacaaacttaaaattgtaaaatatgcacataatcacttagagtgtgtttggatagagaaatttaaaattcagaggaattttaaattctaagaattttaaatacttcaatagaaattcttttattttcaaaattttgtgtttggataaaaaacttaaaattatgaggaagaaaaaaatgaatgaaaaaaaaagagaaaatatgattagtgtactagttatacgtgttcctctatgctcacacccgatcgatattttaggagctaagacgcttcttgaagaacactgtaaaaagagaatttcaatttctgaccttttagaaggaaattaaaattctaaatttttagttgtttaaaattctgttttaaaattctaaaattttaaattcttcataaaaagtatctaaataatgaattctaaattacagaaatttaaattctctcataaattacttttctcagttaaaattctctatccaaatgtactattagtctattagagtaatgatttttagtatatctgtttattcaaataattcattgattactctatttcttttcctatcataccatataaatttatcatatttatatttttctctttaatttatttcactcactaagtactaaataagttttttttttaaacctaagtttttcacgagtattgaaaatcatttttttttcatttaaagtttttcataagtagtatcatttatcgcattgtctcttatttattttttctatctctcaaaatactataaattagcattgaatgttgacaaaacataactctaatattcttaatgatactatttatttacattttcttttattatatcacttatttcatgacataatttcatttttttaactctctttggtctaaaaattgcggacatttatcgaagaaatgttgtttcttgtctcaagatgctaggttgacagtagtgatagcgacgtaaaacggccacattttgtttctattttatacagctgttccaagtcatcttataatatcctgcgcggcacttgtgcattaaaagattgcgatactatcttatcaagtttccacgtcacgataatgatgagattttcattttatttttttcatctcattttcccccacatattatatcattaattacatctctcactttttttctagacttatctctcttctcttctcccattaatgtgagaaaatcaaaacacgttgttgtgtctgtctggatcctctgcaacaccttattgtcgacttatcatgtactcctacgcatgaaccaaaacatgaacaggattttaatgcaaaataaattttcatgtatgcataacttaaaaatatatatttgtaataattttatagtattttgtttctggaaaatgcattgacaccaatgtcttgttatacatctaggaaaagatacagacagaagaaaatagcatagatattatatttgataggatataaaaaataagaaaaaaaattaagaggtcaaataactatacaggtgtcttgatctgtaacgcctccatgattaatgggtggggcaactggtaactgatccaagggaggccaggatgttttttgggatcctttatgtatatataagaaaaaatattaaaattaaaaaatactaataaaatttttttttttgaattgatatatgtttaattttcttgtagatgattatatatctaattttacacattaaattaataataaatatttttttgaaacttattatttattaaataattatgtaaaaaaattgacctcctttaatacacttttcaacttgtccctatgggcaacacacctgatagaaaaattaatgatcacttatatgtgaacatctaatattttcaaatatctaataattagcacatatatatttttttctattgttttcttcttttcacattatatcatctatacaacttatttctttttttttctccctctctcaatagctttcatttgaaatttttaatgttcaaatatcatttttcaaaattaatatactaagacaattttaagaatagttgtacgaggagataaagtggtctgaatcatccttttacgaagaacccacttatttttatgaaaaatgaataacatgagaggcaaaaaaagaaaattaaataaagagagagaaaaataataaatatgataattaaagagatgaaataagaaaaacaaaagtaaaataatgaaaaaagtatatatatatatatatatatatatatatatatatatatatatatatatatatatatatcatttcatttacatctcattgttcttacatgaataatactttttccatgtttttcttcttttctgtttttttctattatatattttaaaaataattctattaataaaaatcaaattcatgttagcacaagttgtgcctaggacttgccataagaaattacaaaataaattggtgcacccacctattacaaaaggggaaaggctgctgctcacccctatgttatacccctgtaagccactgatccgtccaaaagcattttaaaacttgtaccctcaacatttaataaccacgtgagccaactgttcgcatgttacttcttcctgtcttgaatataaaacaaataaatttatttaaattaattagtaaatttggctagcattatttaactacaacaatgccattcaaatttgatataaaaagtaataaaatgttatatgaaatacaatttcaattaatcaaaaaatattttgaaaataatatcactatgaggtaaaataaataaaattttacttatattttagattaatatctatattttgttatcttatatttgagactaaagagaatatcataattttatggggaaagttttttagagttgtcaagaataaccactttaaaacacatatttttttattcactaaaatctattaaaagtgaaaataaagagagaagttgattgaataagatgtgatgagactcacccatttttatgattgtgaataaatttcaataaaataaagagtttatgtgtttaaaaaatgttttagaactagcatttcttgaataaatttccttttaaatatatatatatatatatatatatatatatatatataagatttaatataaaaaatacacatattaaatcttgatcatctatattcattatacggtctgttttaatgctctcactcccgtataaaataagtctctctctctctgtatataagtacttctcactctattttccttctctttttatttgtttcttctcttttagcattaatgtcaaaaaaccataacacgcttcacaacaaattgatgtgtaaatgaaataattacaagaaaaaaatttcatgcacagcatgaaccaaaacataaacatcatttttatataaaaaaggtgtaaataaaaaaaatcacaagaacaaatttccatgcataacttgaaaagtatatttgtaataatttcaaaatattgtctctaccccctacatgattcatgggtggggctacgcacgtgatgcaaaattaatataaaaagtcagtttcaagagtatttgtaggatgagatagaggttgggatcaacaatttactaatctagacccacttattaagagtagctgtacatgaaatagacgatgatatagagtggtctggatcatccatttattagataatgagtaatatccacaggattttgaaagtgaattgtctgatatataaaaaagagagataaaaaaattgaggtagaaaagatgaaagtgaaaataaatcataaatatatgttgattatctatttcttatgtacaaaatgtagttaaaaaatacgaaaaattatattattattagatagataacagaaaaagagggagataaatataggataaaaggtaataagggaagaagataatgcacaaaatgtcaaaacttgatttgtttttgttagaatgactaacagtttttgcaatacaccaaaatacaatcatgactataagaaaaaaaaaaatttgttatgaaacacttttcgaagcatacacaggaacctttgatttctattttggtttgaattccatcaaattaaactttctttttacactatttttaaatttattacttaaccaattacgcaaattaagccacggtcttttcccaatccatgcagaaatgattggtaccattcggcaatcctcattgcacattcaatcaatagtagtagaataattcgtttaaaaaaactaccattctttcgtccaaataaaatctgtctcgtactaactacctctgctatatcttctgtaggcacacccgaactcgtacgctttggttctaagcac

SEQ ID NO: 2869 - DNA, 1616 bp, Glycine max
  Intron number 8 from transcript Glyma11g04870.1 (locus Gly ma11g04870) derived from phytozome v7.0 (chr-ID Gm11; pos 3340253 to 3341868)
ttgctcgaagccaagggttccaggtactctaaatgtttagttaaagagatggttgatcaatattttctgtttgatatcttacaattgtgatattttatatcttattgagcgatgctttctaaattactactaaacaaccttttcccacaaagtgaagttagctatatagatcacacaatgccattgatctcagttaaaaaccaaattctttcaccatgaggtcccttttaataatttccttattatccttggtttccctctaccccttttgacaggaatacaaaacacacaatctactatttatattagtgactttattggccttctctcctctgcatgtgtccaatcactttaatctatcttttgttatattttcctcaatagatgttacatcaatatccccttgtatacaattatctcgtgttgtcttatttcttgtatgatcacacatccaacttaacatatttttgctattctcatttttttttcttatccctttaaaggtcaacattcatttccataaaatatagatggttgtataacattaagataaaattttgctttaagcttggtagttggtaggtactttgtgatcacaatcccttatgtcttccaccattttaactatctagcttgtatcctatgtgtgacatcttcattaatttttccatcattttgtaatactgatcctagatacttacacctagaaacatgtagtatgacttctcctaaatttacttccaagtcattttcctcttgtttttttccgctaaccttaccatgcatatactgtcttactccaactcaagagataatcctttgattccaatatctgtctccaaagccaatttagatttaatctcttcccttgattcttcaatcaaaactataccatctgcaaaaagtatacatttagggataatcttttgtatgcccctactaagcacatccaatgcaagacttagattaaacaaggaattcattgttaaactttggtgtaaacctatccttacaaaatagtccctagccgtgtcttcaattccacaacacttctcttgcactcaatcatatgttttttccaggtcaataaaaactctatgtaagtattattctttactttcgtacctttctatcaacctccatctccatagaagataaatatcttttgttgcagacattattgacataattccaatttttttcaattccagtatcttctcttaatctatacccagtcacattttcccataatttcagagtgattcataagttttatacctttgtagtttacacttttcacaattctaaatatttctcttgttcttatatataggaaccaaagtgctccttgtccttttgtttaggcattgaccacctaaatggctttggcttgactctaattctctacttatttgtttcttaatcattgattcttgccaagttttcctcgatgtcagctggaaaaggcttaatagggtagaggttacggtttttatttggattttagacgacgctactctttacttgtttctattggcattagctacacagttttatccttcatttcccatggtttatctaatatgtgcaggttgaggagcgattagtgtcagtgg

SEQ ID NO: 2870 - DNA, 6095 bp, Glycine max
  Intron number 2 from transcript Glyma14g10320.1 (locus Gly ma14g10320) derived from phytozome v7.0 (chr-ID Gm14; pos 8479861 to 8485955)
ctgtggttttcgtgaggatacttgtgttcaggttgttcaatccttccaagatttgaatagttttatctgtgtgccttgtgctataataataacagtgtgctagagtgaattgttttcttatctgttaatttttttaatctgaaatcttcagatgcccatcaactatcaagatttctgatacctagttaagtagaagtgaaatgttattaagctcattctaatggatattttcagtctactctctatagtctagattcaattgatgtctctacgaatacatgtaagaagtatatatttgatgacatctcacctgcattgttcaccattaaaacctctctggtcagttttaattaacatgcaaattgtgttgttcaatgttatcattttgtaaatgattttaccttgcttcagaaacaaattctcatgaaagtcactcttttgagccctttgggttaaaaggcatctaaacattgaaactagcttggaaatagaatattcatctaaaagtgatacttgattgcatattatgctgtcagatggaatggaacaaatacttaaattataatttaaataaattttatggtgtgatatcatataatatgacaaatgttcatctattaatctatcacctttactgatggttttgtgcctgcataagaaggcatttgcttaaaaatttatgtcaataacaagaattgagatttgtgctcagagatagaagcaagattgctgtttgttgaataaactgagagtgagagaaggaagagaaaacttgttaagcataaaggctaattttattgattatcaaaagttaattacaaaaggttataaaagaggtatatatagacctcatttctgttattgtaacagaattgtaactaactaacaaaacctaaccaactctaactgattctaaccaactttaactgattctaaccaactctaagatagatgctgttagcaaaagccaacagcccttacaattagtttacagaattgttttcacagttgactaacagcatactctaataccccccttcaaacttaaggggaagagttttcaggagaaacattcttcacattgagttttcctcgaagaacttcaaatcatgatgcagaaagaggcttggtgagaatatcagcccactgatctagagctggaacgtggacaatagtaagctgcttggccaaaatcttctctcacaaaaaagacatcaatttccatgtgtttggtacggctgtgaaaaattgaattgtgtgcaatagaaactgcactctgattatcacaaaaaataacaggagtagtgaatgaaacttgcaattctgttagcagagtatgaatccaagttaattcagtggaagtctaagctatactgcgatactcagcttctgtactagacctgacagtaactttctgctttcgagaccaccaagagattaagtttggaccaagaaaaatagcagtccctgaggtagagcgcctgtcgtccacatctgatgcctagtcagcatcacaaaaagctcaaataactaagggctttgtaacagatgtaggttgaagaagcaaaccatgaaacaaagtgcccttcagataccttaatatcctttttaccactgtctagtgagaatccaaaggagttgccataaattggcaaactttgttgacagcaaaactgatctcaggtctagtaagggtagcatactgtaatgcaccaactacaaacctgtataaggttggatcatgaaaagcatcagcaccatgtcgaaacaacttgtagttggataccattggagaagagatagagtgagcttcagctatgttagtcttgtgaagtaaatctctaatgtatttggtctgagtcataaggatagaactgttgggtagattcttgattttcaaacccaggaaataatctagatgaccaagctgcttgaatgaaaaagcagtgtttaacttgtatgtaatttgctgtattagtgaaggtgaactacctgttagaatgatatcatccacatagacaaggagataaacaacattcatttgttggcgaaaaatgaataaagatgaatcactattgcttccaataaaaccaaactacagtaaagtagattttagcctgataaaccactgccttggagcctgttttaagccataaatggctttgttgagtttgcataccaatgacttatttgtaacttcaaaaccaggaggctgagtcatgaaaacagtttcttcaagtgacctattcagaaaagcattattgacatcaagttgaaataatttccacccatgagacaaagccaaagtaaggatgatccgaatagtaacaggtttgatcacaggagaaaaggtttcatgaaaatcaaaaccatgcacttgatgaaatcctttggctaccaatcgagctttgaacctgttaatggaaccatcagcattttcctttaccctgaaaacccatttacaaccaatagcttgcctattaggaggtaatgataccaagtctcaagttttgttctttagcagggcattatactcttgtcgcatagcagtgagccaatcttcatttgccaaagcctgttttacagttttaggctcagaatgagtaagaaacagagaaggatgtaacctagggttgtgaataccagacttagaccttgtttgcataggatgagtattgactggtacagaaatagattctgaagaggatgaagcaagggtggtagagtttgaattgacaggctgaacagagacagacacagtggaagtagaattttgaggtacagactcagtgttgccagaagactgagttgataaaggagaaaacccaagaggaacaaggggaacagaagctgtatcagacacttgagatgtttgagaaacggaagagataaagagtggagaaagatttggattgagactaaagtaggaatcaaggttactgactgaactagtagaagtgggaaacagatcagaataggggaaccttaactcattgaacaaaacatctttagaaatgtacactttaccataagaagataaacatttgtaacccttgtgggaagaggaataccctaggaataaacattcttgagaatggaaattcagtttatgtgtatgatatggtctcaataaaggaaaacatgcacacccaaaagttttaagaaaataataatcaggttcctttttaaacaagctaacaaagggagtgacaaattttagagaagtagtggaaaacctgttaatgagataaatagatgtagtaaaagcataatcccaaaattgcaaaggtaaagatgcatgatgcagcaatgtgagacccagatcaattatatgtctatgctttctctcaaccacaccattttgatgatgagtatgaggacagataagtctgtgagaaatgccaaaagaggctaaaagtgtggaaaagggtctgtattcacctccccaattagactggacacttttgattttgaggttaagctgtagttcaaccatggacttgaaagtttgaaaaacagacatggtttcagctttggactttataggatatatccaagtatacctagagaaagcatcaatgaaagagacataatatttataatcagaatgtgaggtaatatgaaaaggtccccacaaatctataaaaatgagctctaaaggagaatagacaaaagtagaagtatgagaaggtaatctatgagatttacccatacaacaagaagcacaaaactctgtggaatttttatttgatgaagaagtattacaatgattgagaacaagtttcattacatgatcattaggatgccctaacctagcatgccagagattagcaatactgagagaagaagaaacaaaatcagacattatagtagaactattattattaacagtgagagttgaacttggagaggcagcacttgaaacaacaaacatcaacagtgaaggactcttttgaagcttaagattatgaaaggagtaaagtccatcagcaccaacaactcctttaagaaagatcttattggtctcctgagattttacaagacatacatgagggtgaagttcaaagaaaacagagttatctttggcaaattgactaacacttaacaaatttttcgaaattgaaggaacatgtagtaacttgtgaagtttaaaggttatgccaacatcattaggagatataaatgatgcagaaccagtgttagaaatactcaaaccttcaccattgcttatgaatatttgatctggtccatcaaagtgagtgaattgtttaatattctgtgagtttcaagttacatgaaagctggctccagaatctggaatccaggtggtaccaggttgcccattcccttgagaggttgaactagtgagcatggcactgggttgactatgacttggaccagaattcttagaattcggattaacccaggtgtttgaggttctgactgaaccagtagagtatgggataggctgtaatgtagtggatcaatgaaagttaaagattcatgaggatggaaggtcacatcagaccgaaaatgaaaaacattagctgtgtgcccaaatttgagacatatttgacattgaaaatttgcaaatcgttcaccaccacgacctcggttggagccaccaccaccacggcccgcaccacggtccgaaaaggcaccacgactaccaccaggaccatatgcaccgcgagaaccaccagaatcaccaatttttttataggtgtttggatacaaatagccttgcatgtaattcatcgaagcagagttcatcacctgtgcttcttgtcgtagtgcatgagtcgagtttcatgtccgtagagcaacacttcaatctctgcgatggacggagttcactttttgctttcgataatagaaaccaccgacgcgtaatccgatggcagtccttcaagcagtgcgtcaacatattcctcatgacgaacagggacaccaacaccaacaagttcatccacaaaccctttgatttttcgcaagtactcctcaattgttttgctgtcaagagtaattgctctcatggcagtgcgcagttgtcgtgctcgagttttcatgtgaaggctaaaatgctcatgaattttattccaaacttgataggaatgatatgaaccaagaacatgcgacaacactgatttagaaagagttgactgcagccataccaggagtgtttgatcttggacttcccaggcttcataatcagggttgatatgatcagcaacacgatcatcttctgtgagataatgaggaggaataatcggattaaccatgaaacgttgcaatctatgtgacttgataactggttcaacgtgctgatgccagtgaagatagttggaatcatcaagtttttcagccacagagttgggaaatgattgaggaactgaactggaaggagcggaacccatgaacacagaacactggaccttgtaaaggaactaggaattcgaaaaaatggctctagataccatgttgaataaactgagagtgagagaaggaagagaaaacttgttgagcataaaggctaattttattgattatcaaaacttaattacagaaggttataaaagagatatatatagacctctgttctgttattgtaacagaattgtaactaactaacagaacctaactgattttaactgattctaaccaactctaagataggtgttgttagcataagctaacagccattacaattagtttacagaactgttttcacagttgactaacagcatactctaatactattgactaaatataattgatataggtaacccagtatccatgaagtaccaaaacaaattaatgaagctaagtgtgagcgggcattttgtcctttataaaattatgtagttttctattgagtatgataaattaccatatgcagcttttgttatgccttggtttttatgtgtttggtttcagctccatttttttattcaaatcaaaattagttcatcatacagtatatcaaataaaaattatgcctaaaggaaatttgattgtccatcttgtggcgttactaactgtaatgttgccattgtctacttcagtattcaagtgttttccattgctgctgccat

SEQ ID NO: 2871 - DNA, 3146 bp, Glycine max
  Intron number 2 from transcript Glyma03g23690.1 (locus Gly ma03g23690) derived from phytozome v7.0 (chr-ID Gm03; pos 30244481 to 30247626 reverse strand)
atcattcgcgccttgcaaggcgaagtcttccaagagtaacttggttgttattgctggagctgcagttggcggggtgactcttgcgacattaggattgtgtattggattgttcttctttgtgcgacgtgtttctttcaagaagaaggaagaggaccccgaaggaaaaaaatgggcaagaagtctaaaaggaactaaacaaattaaggcaagctatattggtgcattgcacaaaacatatatgattacacaactattcatttttcttgtagatccatttgtgtcttgtagcaatagataattatttcaaatgtttaagataggaactagtttgttagaaatatttcctttttttttaattctttcaagtttcaagtgaaacattttcgtaataaatattatatttccttaactatgttgtgtttattaataggcaaaacatgttttgcatactgttgcgctaaacataggaaaataaaatattttctaaatcaaactgctaaattatacattttttgttgtcaaagttaaaaaaatgtagaatatattttctgaaaaattaatttgtgtaaaatttaaagagccttagtttgtatgatttacacacaattgaattctaatgaggatattatgcctaagtctaactaatactgatatggacatcaggtttctatgtttgagaaatcaattccaaaaatgaaactgagtgatatcatgaaggctactaacaacttcagtaataccaatatgattgggacaggaagaatatgaactgtttacaaagctgtccttgatgatggcacgacacttatggttaagagattacaagaatctcagtaaattgaaaaacaatttatgtctgagatgggtacgctgggtactggcaaacatcgcaatctggttcctcttttaggtttttgcatggccaaaagggagaggcttttggtctataaaaacatgccaaatggaaatctccatgaccaactccatcatgctgatggtgtgagcacccttgactggactacaaggctcaaaattgcaattggagcagccaaaggtttagcatggcttcatcatagctgcaatccccgtattatccatcaaaacattagctcgaaatacatcttgttggatgcagattttgagccaaaaatttctgattttggccttgccagactgatgaaaccaattgatactcatttgagtacttttgtaaatgaggagtttggtgatttaggttatgttgctcctgagtacaaagaactttggttgccacacctaaaggggatatttacagccttggaactattcttcttgagttggtgacaggtgaaagacctaccaatgcgtctaaagtccagaaacttataaaggaaatctggtagaatggattacggagctcacaagcaatgcagaacaccatgatgccattgatgaatcactagtcagcaaggatgctgatagcgagcttttccaatttctaaaggttgcatgcaattgtgtctcaccaacgccaaaggagaggcccaccatgtttgaagtgtattagcttttaagagctattgggggtagatacaatttcacaactgaggatgagatagtggtacctactaatattggtgatattgataaaatggaggaacttattgtagctcgagaaggaagttattgaaaggtatgcgagatatatagggtataatatatgtaattggtgttaaatcctagcaaacgttgacaaaaaaatctactcaatatcggctaaaaaattgcttgattgttgccgaccaataaaacctacccgatgtcggccgaataacatcattggtcaacattggccgaaaaatccgtagtcgaagttggctaaaaaaaatagtcctgaccaatgtcgaacaaaaaatcctacccaacatcagatataaaataaccttggctgatgttggttaaaaaataaatttgaccgatatcgaccgaaaaactctagtggatgtcaactataagaacctagtcaatgtcgactaacaatattcatgtccgatgttggtaaaaaatacctagctggtgttagcagaaaaaaccttagccaacatcaaccaaaatacctagctaatgtggttaagaaatagctctagctgatgtcagccaaaaaaccttagtcaatggcaacaaaaaaatcctaaccgatgtcggctaagaaaatctagttgacatcagccaaaacaccctaactaacatcggctaaaaaataaccttaaccaatattggctaaaaatagctttggctgatgttggctggaaaaacctagctgacgtcagctaaaaaaccctaacatgtgtttactcaaaagttagtcatgaccgatgtaagtagaaaaattctagtcaacattggccaaaaaaaatattagtcaacattaactgaaaaaatctggatgacaacggacaaaaaaatccttggccgacattagcaaaaactttccatgagtgatgtcagtgagaaaataaccctaaccaacatcatctaaaaaaaatcttagtcgatatctgtaaaaaatagctttggttgacatcatacagaaaaattttgattgaaaaaacatcggccaaagtcattgaaaaacaacttatgtccatatcggcagtaaaaactttggtcacccatagttgtgtgttttgagcgaaaaagagtcacgagcaagaacgtgagttaaagtgagcatctccgaaaaaataatttcaaattctatatttttttagagaatttgaaatcccactattttagtcaatcaaaatgattcataaaaataccagaaattagatcttgtttcaaatactctatccaaacaagctattttatcatgaatcattttaaattccttggaaaaatgaatttccatgttaaattgctccatccaaacacagggttaaacttgatcagaattgactcagtggtcaaattcctccacaatttggtgttctctcacgaatcaagacattttatgtatccaacaatcttttgatggggccagttccaatctttagcgctggagtttcaaaaaattatgcaaataatcaaggcctatgtggaggaaaaacattggcgccttgccaaaccaagtcttccaagagtaacttggctgttattgctggagc

SEQ ID NO: 2872 - DNA, 4556 bp, Glycine max
  Intron number 9 from transcript Glyma16g00630.2 (locus Gly ma16g00630) derived from phytozome v7.0 (chr-ID Gm16; pos 282053 to 286608)
tgctgtttctaagtttgacacatctgagagtgcaggtttttactttacctctttcaattttctatttcattgtcaatttttttttcacatgatattgttttgccaatacccatgctagtttggtatcttgggtattttagccgggattctttcggttgagactaagatatttgattataatacttgagtgtctcacacacagctgaaacatatttatatattgagaattaaaatacaagctgtctctctatgacagatgactaaagcaaagagaaaagtcaacaaaatataaaactacatatataaatctaacattgcctcccaagctggagcatatagattgtatgctccaagtttagaacatatgaactggattcaaggtcctctcagatttggtcaaaatatctgcaagctgataatttgaaatgacaaattcagtactaatctccttggacaacagtttctccctaataaagtggctgtcactctttatatgtttggttctttcatgaaacactggattggaagcaatgtgaagagctgcctggttgacacaatacaacttcatttgtttgacttcacaaaacttcaactcttgaagaagttgattgatccaaactaactcacaagtggttgtggtcatagccctatattctacttttgcactagaccgaacaacaatgttttgtttcttgctcttccaagaggtaatattgcccccaatggatacacaatatccagtattagatcttttgtctatggggcatctctagcccaatcagcttcacaaaatccaaagatttgggtatttcctttgttctcatataacaatccttgtcttggagccttcttaatatacctaagaatgcgaatcatagccttccaatgatcaacatgaggagcttgcatgaattgactagccacactaattgcaaaggagatgtttggtcttgtcagtgttattaaaaagcggccatggtggaatggcgtcgcggaaatttggaaaaacgccaccaaatagcggtggtgttgcgggttgcttatggcggcgctatggcggccgccatagccatggctgaatcacgtgaatggcagaataacggattttttattttaggaaacgttcgcgacaggggttgggctgaccccatacccgagtttctcctcttcagcggcacgaccagcagcagtctccagtgcgacgaatggcggcgcaggcgccggcgatgcacacgacaaaagcagacgacgttctcgagcacgacggcagcagaccaacagacgatgcacgcgagagaccgacgaccaatggacgacgcacgcgaccgccgcatgacgcacgacgcacgtcaaccgcgacagcagtgctctgatgcgcgacgacggtaaactggtctcttaaacaaagaaggaagaaagctaggcatttgagaattgtctgatttcttttttcttgggctgagggctttttcttttttctgtttgacacccgtttttgatgagggtagcttttttttttcctttttctatttgacacccttttttatttttgacacccgttttttttcctattatttggatgcaatccattgtttttttttatttttttgttatatttatacgtatatttttattatttttttgtctgccataacgttcgtcattttccgctatgtcatccgccttatttttatggcggatttttgactttccgctatgaaccgccatccgccattaacaacattgggtcttgtaattgtgagataaatgagctttccaactagtcctctgtatctttttggatatttaccttggtttgccattaacttctgattcgggtccataggactatcaatgggtctagaattagtcatgcctatttcttctaaaatacaaagggcatacttcctttgtgaaaccacaataccttcaatactatgaaagtacctaagcctccaaaggtcttcagtctgaaaatgatcgaacaagtattcttttagttgggtaatctttagcattatcatttcctgtaatgactatatcatctacataaacaacaagaaagacacattttccaggagatgtctgacaataaaaaactaaatgatctgcttcacatcgtttcatctcaaaacacttaataacatgactgaatttttcaaaccaagctcgttgagattgtttgagcccgtagagggactaacgaagtttacaaactagatcagattccccttgagcaagaaacccaagaggttgctccatgtaaatcttctcatctagttcaccatgaagaaaacatttttaatattcagctgatgtacgggccaatgacaatagcagccatggcaaagaagagcaaaatagtagtgattttggccacaggagagaaagtgtcaccatagtcaagaccatatatctgggtatatcctttagccactaattgggccttaagacgatcaacttcaccattaggaccaactttaatagcatatacccatctacaaccaaccaccttcttcccaggaagaagaggaaccaactcccatgtgtcgctgtgttcaagagcctgcatttcaacaatcatggcttgtcgccatccaggatgatcaagtgcttcatgaacatttttgggaatagtaagaaaagacaaagtggaaatacaagagaaatgtgaagaagataaacgatgataactcaggtaaataggatgaggattttgagtagaccaaattcctttcttaagagtaatgggacaacctgagtcatcatcatgaggaggtgatgatgaagaagggatgatgaaggatccgtcataggggaagctaatggagaataacatgaactagaagactctccatgcaatgttggatcaattccttgtgtcctgtgttgagatatcaaaggaggtggtgaagataacttgactgccctgttggttggagggcgagaatgattttgttcttggttggagttctcacgtataggaaatactactgggttgaaggatgggataagtaagaccttctgaattgagttgatatcttgcttggaggatgagaagaaatgagtttcttcaaagaaagtaacaacaacagacatgtagtactttgtagtttctggagtataacactagtaccctttttgaagacgagagtacccaagaagaacacctttgattgcccttgcagagagcttgtcaagtcctggggagacacatgatataaaggttcatgaggaaggatggtggaagtaggaattttgttataaagtgttgaacaggacattctatttattaaaaaacaagcagtgagaacagtatcacctttatggtgaatagggacattcgcattacacaataaggtgcatgctgtctcaactaaatgtctgtttttttttctgctattccgtttttttgtggtgtgtgaggacaattggattgatgtaagatgccatgtgaggataaaaaggaagaaagagtagatgaaaaatattctttagcattgtcacttcgaagaattttaatgactttgccaatctggttcttgatttaatatacccaagtacaacgagagtattcatcgatgaattgacaaaatatctaaacccaaaagatgtaacacgacttggaccccaagtgtctgaatgaatgatagaaaaaggagtgaactgcatgcgccttacaaggcgatgaacaaaagctgcatgagagcctgtgggagttaaatagaacccgtaaccacttgggttctgccttgcagagagaggtggtccaaatccggtgttcccggaatatatggcggcggccagtggctggagacggcagctggcagcggatgacaggcagagtgagatcaacccgctttgataccaagttgaaactaagatatttaattgtaatacttgagtgtctcacactcacacacaactgaaatgtatttatatattgagagttcaaataaaagctgtctctctatgaccgatgactaaagaagagaggaaagacaacaaaatataaaaacaatatataaaaactacatatataaatctaacactttcaaatgaacataggttataagaaataaactaacattttgtggtagtgtacaataaattcagttctttgaaatagttggttgaaacatgatgtgtgcatctttgaaggcacttgatcatttcaagtgctttttttctcttttgtagactgtgtatcttgagcaatgcccttgacacgatgtggggacaaagtgtatcatgtcacagtgagagtaagcttagcttgggctttgcatctttgattgcccaggatgcatgtgtctttgtttcaatgtcccatcattgtttccatttaccatgggtttttaaaggagaaaagatcttgtattagggttttggtagagactattggtatcttttgatccatgtgctacctcacctattaggaaaactttcctgttgtactataaaattctattgtccttttttggattataaatgagatgaaaactttttttgtactggaaggtcaaaattcacatagtgtcctttggagaagagtg

SEQ ID NO: 2873 - DNA, 426 bp, Glycine max
  Intron number 2 from transcript Glyma02g04220.1 (locus Gly ma02g04220) derived from phytozome v7.0 (chr-ID Gm02; pos 3404883 to 3405308 reverse strand)
aaaatcaaggttagttggtgccactcttgggaaatttgcctttttctctcttgtttagtagattttcttttttaagtctataccatgatagataatcttgcatgagctaggtaagatcattatgagtagtaaagctctcgtttccaatatttctaggactcaatttgagactactaattaaactgaaacaattaagtaacgattaatctacatgttaagtgattctttgttttagaagatggtttttgggttttaagtaaatttgaagtgcacattttgttcatgttgtttttgtttgttatagtatttcatttcttaacaacacagcaaaaatcttcatgacttattcttggaaaccatacaaataaagccatgtgttactgtgtattaggacacaaaaatcttgctataattgtggctgtagca

SEQ ID NO: 2874 - DNA, 3090 bp, Glycine max
  Intron number 1 from transcript Glyma03g26660.1 (locus Gly ma03g26660) derived from phytozome v7.0 (chr-ID Gm03; pos 34138817 to 34141906 reverse strand)
tcaaggaaggtatgtttccctttgaattgtttcaggcatctgttcattttatagaaagcgagaatgcagaaatggaagaaaataaaaaacaaaaaactgatagcacttccctttgtgtagaatgcctatttttccagttcataaggaagccacagacccatatactttattgtgaaagttgattatctagattagatggcattagtaactacctcatttttttggccattctattttcttcttcatataaacaaggtaaattagaaatttgcaacagtcactgtggagctcacttggtcttctcacccccaaccaccaaagtgtgatttatactgctatggttgggtttggtgttttctctgatgactgagtggttttctctgtggagctcattttgattatctttgaatttgttggtttgttcttcacttctaatttttcatacttcaataaccccattctcacattttctttatttttttctggtgctggtgtgaaagttttgattagtttgatataaggaaataatttgatggcctgttcataaaagagtgaagagtaaagcatcagttttgtatcatggagataactatttgatgttgttttggaagtgctgcagatcactggttaagaggttattataggaatagtttattaaataaaaagcctgctcttgctaaagggcgtgagacaccagtttcttcttgctagagttcttgacttcttgactaagaggtggcaatataggaaatgacaacagtatgctgaaacaagcaaaaaaaatgtgtgatggtaatgaaggagaaattcatccaatgtctgcatccagcctccatctagatcagttgttttatctgaattccaacaggcaactacaaactcatgccaaataggttattacaggaatattttattgaactaacctttgaagcagaaatcaaaaacaaaaataaagctgtaaagagaccaagtatagggaaaattgtcatttagaacataaagaaaaaaaagaagaaagcttaaaagagatgagcaactacaacatacaagcatgaaaataaatcattataaccataaggttatgaaattacatttggaattagtattgaaaaaaccttaactctgaaatttcccttgcttacaatttttctttcaagtgtttcagactaaaatgttctgacttctgacttgaaatcccctgcaatctgcagtaatatgcaacccacataccagatttagggagattcatgaagggtgaactgagcgtaggtgtagagtgaagagtgagtgctgatctgagtgtctggtgtttttctctcttaatatcttaagtatggttcagttcagttcagcagtttggtttttaaaaactgaactcaacaacagttcagttcagtttttattaaaaaaagttcacttattttacaccagttcaattgagtttggtttttttgaccacccctagacattcctacactccattttatctcctcatcacccttactttttgtgaaagaaagtcaactgtttaaacaaggttgtcatgattcatagtcattattgattcaaagttacagctcggaaaactgtgagagcatgcattggatcaaattgcacaattctaatagtgaaccttgtgcttcatgtatctatctaattgtttgtcttgtagtttatacaacaaattcaggttgttaagttggatatataagctaagaagcacagattcggacacggtttcagacatggacacagggacacgcctacaataaaaaacatgggacacggggatgcggcgggcacctatatatatgtaaaatatgatcaatatcaacatgacaaaaaaataagtatgatcaaacatgacaataaaatttatatattcatatgataatctaagaaaaagtactaactactaagaggcatcaagagatatgtcatatgtctaacaaaaagtactaagactaagaggcatcaagtctaacaaaaagagaaagaaacccagaattttatattatgaaacaggaaaaataaaacatagtaaagagaaagaaacccataattttatatattctgcagatttcatcgttgagtcttccatatgaacatattggatatagcattaaccccatgaatttgttcaaagaacaagtctgcctccactttgctattgtataggtatattataatattagaaaactaatacaatataaaaatcagtatcttgtttcacagacgaaaaaaagtcttactgttagtaacatatattatatatattcacttgcgcggacacggacgtgtatcagtatcttgtttcacaatctgttacataaattatatatattctctgggcaacagaaaaataaaattagaaaagagaaacggggagctacctgtgcgtggcgatggaggtccggtgtggtctgcgtgcagtgatggcgtgcacggcaacggaggcgtttggttcgcttgcaggaaatgtgaaggagaagaaggtgcatgagaatgagaactgaggtggttcgtatttcataagcgttttttttaatttttttgaaaaaaataataaaaataggtgatgtgtccgcgcccggatggtgggtcgtgtccaatcgtgcgtgtctggcggcccaaccatgtccggcgacggcggacgcaaccgacactggcgtgattctgatgcgggacacgcccctgtgcttcttagtacataagttaataaaaaatttcttgacactgatttaccttagattagctatattccctgaattagagatttactaaatcttgtcacatgcataatgaatgtgctttacagctatcttcctaagtacgaatcttatatcagtttcttgttcttgtcttaattgaaaactacccctgaaagtccaacacaacttattctagggctgcattttaagattgacattattgaaattctattttgatacgagtaatacagtcagctctaaaataagatttttattgtcagttttttttacatgattaaagtttgatttgaatgccaattatttgtactttttttttatacaatttactctactgagatgtattttaagaaagaaaagg

SEQ ID NO: 2875 - DNA, 2141 bp, Glycine max
  Intron number 1 from transcript Glyma08g23580.1 (locus Gly ma08g23580) derived from phytozome v7.0 (chr-ID Gm08; pos 17973154 to 17975294)
ccctaggattttctggaaatcacgaaggagatcaggtatatattaagtcttaacttcacctacgttcctctattttctctctctactttatctattacattctgttccaaacaattttcgcaactgcactttactttctcttctgtgccatttggatttcaaattcaatgtttttgttcatttttgcatggaattttcaatattataacatgccctctgccaattcttaattctttcaaaaataaaaataaaaattatctctgtatttacaagatttggaactcagagtctgagactaaggctaattcctttttcaatttaacttcttttctgtaattcctgcaaatttgttactgtttcagatagaggaagcgtaaacacacaggttttaacggttgggtgtgacttttatattacgttggtttattttgttaggatgttgctaacaaataaagcatttaaaagataaaagtttctcttgtaaaaaaaaaaaaaggatataagtttctaatgcatttaaaattacagaaaatcgtatttttacacatttaatatttttttcttttattttcttaaccactgcctgcatagcatttgacaatttgttatcaatggcttgccgaactttggctctgtctcgttatcagtatcttatgatgattgggatccaaatttattataaaaaaaattggaagaaaatatgatgtattttgttagctaattagtagctcataattatgagctaactctattacttttacctaataataataataaaagcaacacgacaattctatgcatcttggtaaaagttttatttgtggtgatatagctagctgttgaagatttgttgcattttgtgaaggataggaaaaaaaaaagagagaaaaaaaaacgcatgtggctgttgagatagtgtagtcatcatcatatcatcggctacactgttggacagctcacccttcaaccaaccctcttcggtatgagtgtatgaccttaattttggtttccttgcatatgtgaatttcaacttgatgtccctcttgttacagatgggacatctaaacatttcaatattaccttttgtgtttctttttttaatgtgtgcattagcattgaagtgtatgattggttggactgtggagaaaagaaaaacccaccaaaaatgcatgaaaatccataagtgataaagatttgtggtaaccttgactctctttcacccaaccaaatacactaaataggcatcttccttttagtaaccgtgttcaattatattaaaggcaatccaatagcacggatgacctaaccttgactgaaaatgaagtcagtttgtccatctaaagaataggtttatctatatatgccattatgccagccgtatggcatgttgtgtattggtatagtttggtgtataatgaaacctatgaaattaggcttcaagcagccggctatgtttaactaacccttcccatgaattcagttttatgactactctcttggggaaacttgtcttcaaaaggatatagaatactagggagggtataacattataattttgatctcataaatgctatttaactcggtgtaactccttgttagttaccttgtttatgctggcttatacattatttaagaaatgttagaacgtgattcttctatttagaatcgatatttttttttttgaaggatgatcaaaatcgatattatatctcactaacaacagttttcatcttggcaactatgataaatgagcaattattaggaagtttcagactattacaggtctctggttacaattaatctctatgtaatatgtattcaagttttttaatttacaagaaagaactaataacactccattacgcgtcatgtaaagattaattgaaattgtgatggtcttaaactagctcataatttgcggtgtttactcattaactatatccgtcatgtagtaatcattggatgcatttgttgagtacaatggatatgactactttgcaaacaacttagagcaaaaaaggttttccattttatttttcctttgttgtgcaaatttactgtctaaatgagctgccaaaaacaaaaatggtaacttgttccccacagctagcgggaggaatttagaggtatcagaagatact

SEQ ID NO: 2876 - DNA, 1555 bp, Glycine max
  Intron number 4 from transcript Glyma13g23140.1 (locus Gly ma13g23140) derived from phytozome v7.0 (chr-ID Gm13; pos 26589329 to 26590883 reverse strand)
ccttttcccccttcctcaatcacataaggaagcaggtgaatcctgtcatcactattctttcatcttgattttcttatcagcagatgcataacatataatatatattgtcaatatgttggtagttagtgttagatttagttactcatttagttcttatagttacacaaattttaccttttagtttctatactttcatccattttggtccatacacatacaatttttaatcccttacatatcatttttatccctttagtccttaccatctaaatttatagggactaaatgaaatgatttttatagggactaaaagttaaagtttgtacaatataaggaccaaataagtaattaaaccttagttttatttaattgtataacaagttatttaataggttcccaccttccaagaactctgatatatattatatttgaatcagttttactatccattgcccttaggtaatagttaaggattccaaagtggaatacttctattgagaagtatgacgttggttaatgttactaacacatctccactgtgttttgcaataattattttattttatttttattgattccttgaccattgcacttagtataatagtaaaacaatatgacagtcgcatttgctggctcagttcactttaaactcacatgaccaactgagtgtgtctatatgcctcaatgtgtgggtggcatagtttgaaagacaagaaattgtatcactgcttgatcgttttcaattttgagtacacacccaacaaagaatgctattctttggcaaaaactgaaccattcctagtaacttccttgcattatcagttttctgaaagtaaggatgcgggtaactctaggcatgaagctagataggtatacatcgtaagataactccagaatacaaacatgggatggagtgatatcaaatgccagtgcattggttatcatagacctgaagagataattcaagtctggaaaactgtcattcagggaggttcattttaaacaactaacttttaccaactacttagtgactttatgtggctgttgtaagccaaattttgcaatattgctctggtgcgttggtgcttgaatttcgacagaaagaaatagaaagaatactttaaaaactagagtataatatttacttccttgatgattaaaaaaatccttagaatgaaaacttcagttctattactttctgcatctatgaagtattttcagcctttatttacaccagtacatgtagttttttttatttccttgtgtatatttctcattgaccctttttaaggagtcaactcaagcggcttcttggggcagttgccattgctttacataattgatgattaacattgctaacaaatttagaacttgagattgctcacagatcatactagcttacattgaacctttatatattgtggtgtttactcagtctgatgcagttgcaatttagtcaaccttttttagctaccaatatatatttttatacttcaagctttgtgatttctacgatgcagaattattcagaaattatttgaagcagataagggaa

SEQ ID NO: 2877 - DNA, 1375 bp, Glycine max
  Intron number 2 from transcript Glyma20g02580.1 (locus Gly ma20g02580) derived from phytozome v7.0 (chr-ID Gm20; pos 2147207 to 2148581 reverse strand)
ggtacaacataaagaagcaaggtacacatgtatcatgaatatattatataagatgtttcgccatcacaaaaatctactatctctattcttatttataagacccatttttttaaagttatttttttataagacctaatccatattatctaatgcattaattatttttaaactaatatatccgtaattaaataagaaaagttatattgacatgtatttagaagagaaaaataaatattagtgacaatattattattaaaaaagtatataaatttaggataaatttattgttataaattaaattaatttattttcttaatcttgatgaattaatgagttgagtcttataaataaaaatatggataatggatagtatgtaaaaagcattgttagtgttctgagaatcaaacacagttgatcaattggactgaaaaacagtaaaccgatcaagtgtcaagtttaaataaacaacatgaatggcctatagaaaaactagtcaatgaaccataaaacagtctaaaaaaataaacttaaaatatttgttcttttattttttattctaaacatatttttttattattaataaatattgttatgtattgttgaaacttaagcgtaagtataatgatatatttaatttaaacttttttgggtactttaagaccttatgaaattgtgtattagtattttagtttgtagagttagagttatgatattatgtttctttaatattattttatgtattattcaattatcatcattattgtatatatattattctaccacaattaaactgtggctacattgtattaaaatttaaaccaatgtcttttgactaattcaatcatccatcggacttaattaaatatcaatgctttttgttcctatattccatattgacatgtattaaatcctattaaccataaattctatcaaattaaacttgagaaatattgttcatgggaaagatcaatatcaagtcactagcattgtttgtttatataataacttatcatctgtctaaaatgatcacattgatacttagtggtaataataatgataatgaaagtattaattattttttttaatcttgattcaaagattacagtgtgttaaatatttggataattttattatccttagtaatcttattcggcaagaaaagatattgactcgagtaaaagatatttatgatctagaaaaaaaatattataattattctcatatttttaccataactaggtgttctcaaaagagtctctttatgtgtgagtgtctagttaaaataagtcttaaaacttatgcacattgatctcaaatagttcccatcaatcttcatttaagttatctatctacctttctataatgcagtggcacg

SEQ ID NO: 2878 - DNA, 697 bp, Glycine max
  Intron number 1 from transcript Glyma20g06780.1 (locus Gly ma20g06780) derived from phytozome v7.0 (chr-ID Gm20; pos 9321784 to 9322480 reverse strand)
atagccaacttgaaaggaaaatatttggaagaagggtaggtaaaaatggtaaaatatatatgttgttattaattttcgctgtttgcttcttgttaatttatggccaaggatgattgttcatatttcgatttgtggcgtgtctttggctttatatacacttttcctcatcatttttgttttacgcaaaatgaagtttgaacctcatgtgaacatcttttaacttcagtgtacttctgaatgtcatgaaaatgtccgatatataataactacttctgcaggttagtaatttttttcctcctttctattttacttttacttttgggtattctgtctatgaataactgtgttattataggccagaaattttatttccaaacatattttctgctagggatgtaacactttgccgattatgatccaaactcaaatttgtccccagctagaagtaggtcgtagaattaatttttgagaaattcaaacatggtactaaactaagtttggagtttcaatagtatgtttcaagtccccaaatgggtacccaaacatatcctaagtgagctggattggaccagatttgttctgtatattttactacccaaccctgatcaatatacacaaaatataatttggcaaaatcaatttgttgcttaatttaaagagcattgttttttcaggagggacgaatccaagtttattg

SEQ ID NO: 2879 - DNA, 2095 bp, Glycine max
  Intron number 6 from transcript Glyma11g19070.1 (locus Gly ma11g19070) derived from phytozome v7.0 (chr-ID Gm11; pos 15716395 to 15718489)
gaacgtggtggcacatccaaacttgcagaagccatgtaagtgaagtaaaagtttttaggaaacgttattgctttgttttaatccttacgagtgtgagtaaaagtttttaggaaacgttattgcttttgttttaatccttacgagtgtgaaaggctagctatctctgttttgttcggttccatcgtgtcatgaacattgtgagagatctttaagcatttctgttcatgtacacccttagattgccattgaaaaatgatcacccaaataaaatgggtagtgtgcacattaattttatgtttaatatttaattattcatttgattcatataattttatcatttatatattttagtctttataattttaatatattttagtctttataattttaaaatgattttttttagtcctttgagtttgaaaattattttttttccttataatttatattttaattctcttttagattaaaattattttttttcattataatttatattttaatttaataacttttttaattcttataatttgaattttatttttttagtttttataatttaaaagtgattttttttagttctttagattcaatagtttgaaaataatttttttaattcttataatttgaatttttttttactttttataatttaaaaatgatttttttagtcctactattaagatatgattaatattttaattctaattatttttttagttaataatttataactaatttgtaattaattagtctattagtctatagtttgaaaataatttttttaattcttataatttgtattttaatttctttttaatttcatttttttatttttttaaagaataaaaaaaattaaaatttaaattatagggactaaaaagatcacttttaaattatagggactaaaagagaattaaaatataaactataaaaaattaaaaaatcactttaattttaattattttttaactataaaaattaaaaaatcactttaattttaattattttttaactataagaattaaaaaatcactttaattttaattatttttttagttaataatttataactaatttgtagttaattatttttttatttttttaaagaataaaaagtaattaaaatttaaactatattaaaaagatcacttttaaactataaggactaaaagagaattaaaatataaattataaaaattaaaaaatcactttcaaactataagaactaaaagttatgaatcataaaattatagggactaaaaaaaattaaaatacaaactagaggggattaactaatttgtagctaattaataaaaaatagttaataatttataactaatttgtagttaattattttttttatttttttaaggaataaaaagtaattaaaatttaaactataaggactaaaagagaattaaaatgtaaactataagaattaaaaaatcacttttaaattataagaactaaaagttatgaatcataaaattatagggactaaaaagaattaaaatacaaattatagaaagattaaaagaaaattaaaatataaactatagtgattaaaaagatgaatcataaaattatagggagtaattaaactatagtgattaaaaagatgaatcataaaattataaggagtgaaaagaattaaaatgcaaattataaaaggattaaaagagaattaaaatataaactatagtgattaaaaagttatgaatcataaaattataaggagtaaaaagaattaaaatgtaaattataggagaactaaaaaatcactttcaaattataggaactaaaagatataaatcgtgaaactataggaaccaaatgaatagtttaaccttaattttaacacaataagcattcctagtttaacttttaaggtatctccttggagggagaggggtataccagtggttagggaggcttggttcatgaacacccttagattgccattaaaaaatgatcagccaaataaaatgggtaatgtgccacattaattttaacacaataagcattcctagtttaacttttaaggtatcttactgtagggagaggggtataccagtggttagggaggcttggt

SEQ ID NO: 2880 - DNA, 6405 bp, Glycine max
  Intron number 2 from transcript Glyma05g35280.1 (locus Gly ma05g35280) derived from phytozome v7.0 (chr-ID Gm05; pos 39349105 to 39355509 reverse strand)
gatttagaagagaagttccttgctaaaggtatggttctgtgtttcttcttgagtctactttttaaaaagttttaagataatttgttttctctttgtgtggaatatctagagtcgagtgttaactagtgttgttttattattctattttgacatgttaatttattgtaactactaactataccgtgggatatggtatttgagtttgggaaagatgaacatgtgattaaaagtcttattgcctttataaattgtgtgttgaatgttgttagaattcatggtatagagatggaaaagagagaaaagagaaactgaatattattttggataattctcaaatgagcacatcagtttttacatgaatatgttgagcttttatatagctaatactaataagctgttatatagttggttacaagaataactaacttataactaactactaactaagctaactctagttacatgataatcaaactgaattaaccatgctctatgttaagatcccccctcaagctaggaataaatatttgacattcccagcttggaatacagaaactgaaaatatagctaatgctagtaacactagtaatctctaaaactgaaatataaagaaacatgtcagaacaatagaatgattcaggaataaatcaaaatgtaggtgtggccatggtgcatagctcctagaagtcttcaaccaacatcgaccttctcaatcttcttccaagagtccaaagcaagcatcaaaggtcaaaataagcaaatcaaagcttaaccaccaagcaaaggcaacaacaaggccacttggctgacactcaaatcatcaaagcttaaccatcaagagcaaaagctaaacaatgcttaaccactcaagacaaaagcaaccaaggcttaaccatccatggtagaagctaaaacagtacttaaccaccatggatagaagcaaacaaaggaacaatgcttaaccaccacacatggcaaaagctacaatcatcaaaacaagcctaaaaggctgcaaacaataagccaaaacaggtcaaatattaatgaaacaatgaaaagataagtctccaaacatttggtgtgaacctttttgaaatagtgcaagacttcaaactgtagccaatatatcttcaaaatctttagaaacatttaatcaaacaccttgtaggcaaaacatggcaatgctagacatggagagaacctctagatctaccaaactcaagggtatcaaatctgtcatcaagcttgagacaatagttccatatgcatcctcgtcggaaattgccactcacagcgaaggaaggcggcacacggcggtcagaaattgtctcatggcagcggcgaccaaaaacataggggttttgttgcggacgtaaaggtgagctgattgggggtggtggtttcatgaattgtgatctagattggccagaaaaggaaagggaaaatgttagggttttgtgtattggaagatttttaggaaaatgtaatcgaaaattgaaaagggaaatatgaagagaaaatgaataaggattgatcgaaggtaggtgttggccggaatcggtgactcattacagaggacggtggcagcggcgaacggagaggttgatcgatagtggcagcggagaggaaatggtattgttttgataccatgttagaattcatggtatagagatggaaaagagaaaaaagagaaaaaagagaaaatgaatactattttggataatgctcaaatgagcaaatcagtttttacatgaatacattgagcttttatatagctaatactagtaagctgttatatagttgattacaagagtaactaacttataactaactaagctaactctagttacatgatgatcaaactgaattaaccatgctctgtgttaaaaaatgtttctgttatattaccattgttctaccattgaaaatcatgctgctatttatctcaattatgtctaaccatgtggttacttgtgttttcttttctgataaagacttagttttgtacaactggtcatttacaagggtttttgtgatttgtccatatatcattgttataatttatatttatatattatatattttagcctcatgatttgttgcatgtgaacgttctgtgcctgcttggtcaagaatcttgaaactaaaatggtccaataagatggtgttgaagctgcctctgctctcttggtttatcatttgcgtgaactttgtttgacctgtatgatgaaatatattgtagttatgtgctaaagtaaaatatagtattccaatgatgtgatatgccttgttagcataaatgctaaagattagttctggcgttacatcagggataggcttgtgatgttttttttcttgaataaattctaaacaataagcatgtatgcttactaattagtatcattgtatttcccccttaatctgaagagtgtagtttcagaacacaattgtagcaatggtttgcataagtgtaatatccaacaacctttccattccttttctattttaaatttggaataatgtcatactaaatgaaaaatagtacagattgtctttgttatattgaagtgttttaaattgtgaacctctacattaccttatttaggacaataataataatacattaatactattactaatactactactaataataatagtaatgtgatatgagagtaattcaaatttttataactataatttagggaaggttattaagtattagataagacctatatatgatttaacttttccaatgggatatttcttggtttttccttttaatgatttataagaataagagtatccaattatttcccccttaaacttggggatataaatattaaccctaacggtgatgttctttttaaaactggggatgtaaatcttcagtagtaaagtatttaactatttttcattgatttttcatattaattaactactcaagcatagcattttttataaaagaccattgtgttcattttacaaaaccctatgttgtttgctgctaagagtcccaaagactgactactatttattcttctgacattctgaatatttcaccaagaactgtaatctattagttgaacgtacatttatggttttatataacatctctaacaatccctctaatgctagtgcctttttgggcttgaaacatggacaatcactacgtgctggtccacctaccatgcaatgaaattcaacttgttattataaaaatcggggcagcatagcaaaaattcaacttggtcagaagaggctttgataccatgccatgaaccaactattcaaaaaatttaagctattaggtgaagagacatgaatggttggttcattctcttaacgtcacacagttaataatttagatagttgtgcttttagataaaaatcggggcagcatagcaaaaattcaatttggtcagaagaggctttgattccatgccatgaaccaactattcaaaaaatttaagctattaggtgaagagacatgaatggttggttcactctcttaacgtcacacagttaataagttagatagttgtgcttttagataatttttatccttgtcaatgaggcactgaaggcaggcctcgcttgaacccgaaagtcttatggcgctgattccattggccccttgcctcagtgccttaggctcacttttgatgtgtttgactacactgagctgaactgcaactagaagctgggattatatcttactgtattgtccatgtttaccttgcaatttattgttcttcttaacgagtataatgaattgaaagagaggtacatcattctactcccacaagctatcacgttaaaaatatttcatgtttttttattaatacgagactgatcatatgtataaggtaagattacaataataatatttgactaaaagaaaatatccacttttttgtgtttatgagcagccgtttttccaacataagatatgattacatattaatcaatcgtagggattgatccataattgcaatccatctttgtatgatgtaaatgtataaaatttcaaattcaaattggtcgatatgcatggtaaattaaaaataaagctctggcacgtgctttgaattgcatagaccccctgttctatgttaagtgttattcaaaatttatccaccacacattagccttggatgttttccagtagttgctactatagtagtaaaactgtgctatagcagagtggagcagccctaggtttctacaggattaaaatagcagagcagttttcaatagcagccaaaacaacggcttttcacctgttatagcagcgctaccatgatataggtttcaaaaacctgtttttacccctaaaataacattgattagggttttttgggtacaaatgtgatttcttcctcattttttatgcattttttgattcagagatgtaggatttgaaacccttcttccttgaccattcctcaaaaaggtacctctgttccttcttcacactttattaggactttttttccgatcttctattcttcttcctttcaacttcccaattcacactgctaatttttatctattatctaatttgttatgttctttttctattaatttaaccaccatcttttgctatgttcttattacacctagattgattgatggtgattgtgtgtatgaactgctacttattatttataatgaatttctttaattttgttgtgtagcatataaattatttagtttgtattataatttttaaaatagtggtcatcctgctctcccgctatagcattttcagagttgtccgctattccctgctatctgagattgataactatggttgccacattgtttgctacagagatgctttcctagcggccaccctcaacccccttcaattttccatctaatccttcttttatttagttttaaggtatttgaattaatttggagtacatacttgtgctgcttcacgagtcctcattgtgaatattcttacttttggtttgaaaatctgatcctattatttgaaatttattatgaagatcatatcataaatttatccattttcaggatggctcaagacttttacccctcctattgcttgatagcttataatctgagtgttttgttcaaaatctgtgcaatctgactggaggaacttgatttcaggtcttttctttggtagatgttcatgtagaagtagaactgccataattgattaatacttgtgttgttctggctggtcatcttgaatgattttgcctaatgtagtttggtattagtatctcataatttaaacatcaattattgcaaatgttgaaagcttataaattttaaggtggattgcttccatgttgtttctgttgatgaagaggggaatattttatataaaccattgtcctctaagaagctaatggataatatttgttgtcaaatggtttttattaactatattgtcaaagcagtttaatgaaagtatgcaacagaacttggataacatgaaaatgttgtcaattttcttgtagtttgcacattatcatttgtaaattgttgtctcctggattagctctttcatgctcacacagataaccacttccgtacatctccttttaagttcttcaaattgtttactttctaattctgtggactgcacttagcttgttcatccttttatacttattctcttgtcctctgtttctgtattcttactgttttgtggcaagatgtgtgaatgtttggttgagcttattttgtagaaataataaaattttccagctttgtgtggggttttgaaaaagaaaagtgattgtttcctctaacaaagcagttacgaagcatgctaccaatggtgggtaggtctatttttctccattagaggcatagttctaatactgatgctgtagcaacaactgcttgatgcatgcatgatacctagctatataatttggtgttgttagttccagttgttggatttttggcttactcaactcttaagtctatcatccatgtatgatgctgtaatctgaggcttaaaaatgggtgaaagtatgactggttttattttgtgaaaagaaattgaatcaattctgttgtatctgatctgaagggttaacatgtcctgactcttgaataatgcagtaaattgtagaaagcattagttccattggtcattcaactgtacaaaaaatacccttatattcacatttctttgatggaacctgaattcagttcatcatttattgcattcatatattttactccctacatagtcttattctagctttgctatttgtgttgtttatgagtcctagttttattgtttatattagtttgaagtttaatttttgttgtttccaccaaatacttctacaattggttgttatttctccagtttctggtgttcaaagcctttcttccagtgtgcaa

SEQ ID NO: 2881 - DNA, 779 bp, Glycine max
  Intron number 2 from transcript Glyma04g41030.1 (locus Gly ma04g41030) derived from phytozome v7.0 (chr-ID Gm04; pos 46920598 to 46921376)
aggattgtaagtaatccatgttttccattgctttcagatgttcctgagttgatttgttgcagttttccttgtttggaatctatctttgcatgaattctgaagaatatatatatatatatatatatatatatatatatatatatatatattttttttttttttttttatttcttgtagtcatgacatataaacagcaacctagatttatcccaataggtagggtttgcttcgaacaaagccattgggctgttttgaaaatataataagtagttttattaggaaaagaatgcccaatagtcggcatgaaaagaatcttcaacaatggagtctggctgccacttttttcatagaagatagaatgagaaaattggctaggaaaagaaggaacaactgtagagggttagaattcttgcaagttgcaatggaaacaggaagatgccaatctattcccacttccccacctaggtcacctgctatgtaaccaaaacaccagagaaagaaaggagcaagaacgtgcaaaattgatgaacagtctatggagtattgagttaataggattctgtgattactgaagctcaccatggccagtcatataatcaatgttaataaattttcatatcagaagttcactcttattgtttcgtgtttattgctttagaagatttgttgatgtagtaattattaattcatgagttattcaaagtactgctggagaagggagctaaacttctatccttattgccttagcttttgcagattcaactttatctgaggagaca

SEQ ID NO: 2882 - DNA, 1335 bp, Glycine max
  Intron number 3 from transcript Glyma16g05050.1 (locus Gly ma16g05050) derived from phytozome v7.0 (chr-ID Gm16; pos 4329995 to 4331329 reverse strand)
ctgatattaaggttggactactaagcaggtttcaggtatgactatgataaattttttccgtttcagttgtagttaaattcatctagttgttagcgttgcatgctacaaagaaggtatttcactaatctaattaaaacttctttggtagtcaaataataatatgggttcattatcactaagtcctctccaatgataattcactttaatcagaatcaaaatatttcatgaactgtcccatagattataatcatggtctgaactgaatacacgccagtttctgggtagggtaatgtttcctggctctaacaacaaaattcccatttattgtataaacttgatagccttttagtatctaccttgagtgaaatacccaatctagaacatcaccttggtagtttctgactttatctacttctagcgtattgcatatgcatgctattggtcaccactcaccataattgtgatgctattacacttttactattagaatggttagttttatttttattgcttgtgcatggactaaatatatacttaaattagttaatcataaatcatttatacctctaattgtaattgctgtttttgtgtccatttctatattctgtttttttttaattattattattatggactaatggctaagttggaaagccaccttaattgtggtcacccctagcccaccttagttgtgacgggtagccgtggggaaaaagagggcatgtttagggttgagttagactcaaacccactttctaactgacaatattagatagttattgctgttattctcttattattcatagatatatgaaatgtggcactatattttgcttgatggatctatattgttcctcacatacatcatttttatgtgatggttcttataggtttctttctcctgatttggcaaatgcattttacaaagccatttataattgttatcctatgcttaatcctttcaacaatctgaatttctttatgatctgcagtggtgagagtgacaataattctatggtggtacagtatacattactgcccttatttgccattcagatatatattaaattcactagttcatggtattataatattcgaaaactggatatgtcttgctcctccttttttcccactacaaacttttcttataaagtgaaagcatatggacattgtaggaacttgaaatttggaaaattgtcaatcaaatatgataggcatcatgggcttctaggtggatatttatgaatagtttataagctctatatcaattattgactatttcacttatctcaattttcagaccaaagcagagaaagaagagaacttggacaagat

SEQ ID NO: 2883 - DNA, 9961 bp, Glycine max
  Intron number 6 from transcript Glyma15g17340.1 (locus Gly ma15g17340) derived from phytozome v7.0 (chr-ID Gm15; pos 13711751 to 13721711)
gcaggtaacagctaaatcaacgttttgcaatgatatcttggtcaagattaatactgataagtgattcattttattttttttttctttcttccgactttttttccaccgaaatttttaatttgaccaaatattttaataattcttataaagattctgtttgttgctagtggttaggttaagtttttattacttaattaaaggttctgttataacctaatttgcaacgaatgatcccacaaatttggactcaagataagaaggatgcatggaggagcgacacgtttgatctacataaaataaaaaaatcttaagagtgtgtttggataaagaaatttaaaattctaaagaattttaaattctgagaaattcaaatacttcaatttaaattctttcatttctaaaattttgtgtttgttcccttgaaattcaggaaaatgcattgatatttccaaaaggaaatttccaacttttatccaaaatctttcatatgttcctatagaatataggagagaacaaacaaaatcactaactccctccttcaatttcggaaactacttggcagcatatctacaaaactcacttgacagtcgttataactatataccatgaaacgcaaatagcaaaggtaccacaagagtgacagttccatcaaagagtaagcaacactcaccgataagccacagccgcagaggctgagcgcagcaagactagtccagtggtggccggaatcggcaacggcggcatctccaacatttggcggcgtcgaggacgacaaatcggagcgcaacaagcgtatcaaaataccagtgttgttgctctgctgaccggaggcaacagccttggccattgtgaccgccctgagagtctccctttgcttaacaaccttcattcccaagtccaccacgctctcatcatcgtccctcggcctctactcaaccacgactgtgtcctgcagcatcggcagcgccatcatcagcttctttttcttcttcctttccgatgcagtcaccagaaaccaccgttggcagctgaacaagagcagaggttttcgggagaagctgttgcaagagagagaatagtgagagaatgaaggagccagagaaagtgtggtatcctaccgcacaaaagaatttcaaattctttcataaaataaaagaatttgaaatgttaatatttaagttaactaaaatccctgatcaaaatactcaaatttcaatttcttttcaaatttttatccaaacatcttatttaattgaaaagtaattaaaatcctttaaaaaattgaattaccctattaaatttcttcatccaaacacactctaaattcataactaactagtttaatattggctaaattctcattttgatgttttatctttttttcttcttcaatttaatcctctttcaaagagtttattttaatactttattttattaaactgattcaaaatgaccattccatccatttgaagttgccgctaataagataaggatatcaatgactaaaaatcgttccaaaatataagcttcttcctcctcttcttctccttatgctccctctacttcctcctcctttctcctctctcttttcaatccacccaacaaatgtattcttaaatgagacccaaacaagaggatatttaacattacgtaaatgacgtagaactcccccacctcttcattcatcaccgatgttgaatcctcatcacacgcttcctctaaccttgaatcatcgccgaagcaagatttactagtggaggcatagaggtctggggatcctcccatgaatatatgcatcgcctgccatgtgcttcatgctggaaaggaactccttaacttcaccccacacattgccgccctctgcaacaacatcaccaccctttcctcgaaaacaagaaaaaaatgagatattgattttgagagggggtgtatgacgacaaatatgtggtggctgatgatagtgttgacaaagggtgagaagaagaggagaataaggggaagaaaagagaatccatgacacgaagggagaagggagaagaggcagattgaaaagacataagaggaaggagtatgttgagagaggtaaaggataaaaaagagggagaaaaaaagcttacattttgtggcaatttttaatagccaatatttctaacaaaaccatctatagtgtgctaattctaaaggagagtgttgaataatataaatttgatttagtccattaatcaagtgttagacccattaagtttgtgctactactccaaagaaaatgttagagaagtgtaaaaataagtaaaattaatatttaattggaggaagtgtgtagaagtaagtagttgggagaagtgtgtagaaccctcccttgaagtgtgtgaaatctttcttaatttatttagaactctcccttgaaacctataaaaggaggaaaagttatcatttgtaagtaaactcaaaaaagccaaaagaagccaaaacaaaagcatttctctcatcataaaaactagtcttctttcaaatattttttcctccatttctctcaaatacttcttataaccttctcctttccaagagagaggatgacaaaagtttggaatcctctcagaggtgtagtgatccaggaaatcaatattcctcttccaacttgagctatgtcgtaacaaccatgatccagcatctatctctcacttcctagagttgcaaaaccagatgaataatctcttggatcacgaggaacaattttggaagcaaaggtccaaatccttttggcttcgtgataaggactcaaattctagtttttttcatgtagctacgagtgcgaggaagaagcataacattgtagcacatttaaatgatctggaagtggggttagagaatcatgacactatttgtggtattgcctccaaatcatgacactattaatcacgtggacatcaagatcactaaagaagacaataatgttctcatatctcctttcagcaaaggccagttttgccaagctctcttccaaatgcactatgacaagtcccccgggcccgatggcttcaatccagctttttataaacatttttggtatttaattggagatggcatctttatggcaacaacttctttccttaatataggtgaattccctcctctcttgaaaaacaatgatattgttctcataacgaaaaaggagaatcctttatctatgcttgatctgagacctaaatctttatgcaatgttttgtatataattatatcaaaagtccttgcaaataggctaaaaaactttgcaccctaaatgcatttctagtgagaatcatcatttgttgagaggtggtccatcttagataatgtactcgttgctatagaaactatccacatgaagcgcaaggtaaaaggtaaggttggtgaatttgctctaaaggtcaacataagcaaggcttttgataaagttgaaagggaatatttatttgctttattgctggaaatgggttttgacaccaagttgataagttggataagattgtgcatagagactattgattttaatgttatgattaatgaagacattgttggtcctattctccctagaaaaggtctgagacaatgagatccattatcattttatctctttattatatacatggagggtctcatagtgctcttgaagaaagtagaaggaaaatgaggcatccatgatatcaaaggagctcccatcccctcacactttctatttgttgataattgtttccttttttatagggctactgataagcatactgaagtcctttaaaacatcctgacctcttttgagaaatcctctggccttgtgatcaacttccagaagtctgagatcttctttaataagaacacccctagcaatgtcaaggataatatttccagtctcttatgtgtttctgaatgcttgggacttggcaactatctgggtatgccctccatgattgggaagaaaaagaaagctatattcaactatatgagagacaaaatttggaagaagataaatcattggtcaggcaaacatctttctaaggtgagaagggagatgctcattatgtctatggctcaagctattccatcctattgcaggagtactttccttttaccctccactctagaggaagagactcaaaggatgttaaactctttttgatggggttcaaacaataacttaggaagatgtaataattaaaatataaagggtcaattagttagtaatcagataagattagtagttagttataattagtattttattttaaagataagattagtagttagttatgattagtattttattttaaaaagtcaattagataaggttaggaagttatgattaggattttatcttaaacaattagataagattgggaagtgagagtataaatatcagtatgtactcatagaaggcatgcagaaaataaaagttatttagtttgtttcctctttcattgtgtgagtaaagcatgagtgaagttacatcaaaaatttatttctaattgtaacaattggtatcagattgctaggtgacgatgttgacaacaaaagagcttgagacacgcatggattcttatgagaagatcgtctctgatcttcaagaatcaatgcaaaattcattcgagatgatgcagaaatctatcgagggactaatggtttcgcttgcaacccaacataagggacctaaaatcacaactgaggatggaaatcatagtgggactcatgaacccattgtctcggtggtggatagggcgcaaatcccttttccctcttttgatggttctaattatcgagaatggaaggcaaaatccgaataattttttgaattggaaggaacaccggaagaacaacaaatttgtttgttgctattgtccatggatggtaaggcttttgcttggcaaatgcattacatgcagaatgtgaataacaaacacaagacgtggcagcagattttgcaagacgcagacagttgatttgacactggtgcattcgatgacccggtggcagaacttgcgagattgaagcaagaagattccctgattgagtatcttgagaggtttgacacacttttggctcgtattgctataccagaagagttagcattaagtttctttctctctggtttgactgtcaaattggagaaatctgtcagggttcataaaccttcttcaattcaggaagtggtcagaatagccagacttcaagatgaggttcttcacgagatgaccaagaagttctctccaacgaaactgattcaagcatattcataggccaagtattcaagaaactggtctgttacatcacaacatcatagaacgattccaattacaactttgcatcagcaacagactcaaaacccaacacaaccaacatatccaaccgattctaaggtatctactgccaataataattccaggaagtaggttagtgacaggattgctagagggttgtgtcgattctgtggtgacaaatgggatcgagatcataagcaaaaatgtaagatatggggtaagttaaatgctattatttcctcacaagatcaaaagattgttgacatacaatccgaatctgatgaggatcacgacaatgatctcataaagcgcagtttagatatggtcaaggatgcagatgtttgtatttcccttaatgctctacaaggtgtggctggtggtagtacattgcaactgcaaggcatgattaagaaacaagttgtgccattcttgatggacactagaagcacacacaattttatcagtgcgaattgggtaaaaacattaggtctcaaatctcaaaatattcaaggttttccggtcacggttgcatcagataagcaacttgtgataaccaagaagtgtagtcgggtgcaatggaaatttcatgatcttgtatttgttgttgacttcctggttttgccaagtagtacttttggtgtgatcctaggaatgcagtggtttaggacactaggggaaataagttggaattgtgctcagctaaccatgaaatttgaacatcaagggaagatgttttgtttacagggtaagctagcatcaacatatatgagtgaacttacaggcaagctgaagacaacacaatgtcaagctatgttgcttgctataagaggaccatattgctacagtgattcttcagttgctgattttcaacacctaactcaaagtcagcaatctgagttggatgctctattagcaacttatcaacaattgttcaaagaacctaccactttacctcccaaaagaagatatgatcatacgatttcattgctcaatgataaaccattttgcttgaaaccttatcgatactcgcatgcacaaaaggaagaaattgagaggcaggtgaaatcactacttagcactggatttattagagaaagtcctagttgctatgcatctccactaatactggttaagaagaaagatggttcttggaggtgttgcacagatttttgaaaattgaatgttgtaacagtcaaaaataagtttcccattccattaattgaagacttattagatgaacttcatgatgcatgttacttttccaagttggacctccaaagtggttataaccaagttcggatggtagaagaggacattcacaagacagcattccgaacgcataacggtcactatgaatgggtggttttgccttttgggctgaccaatgcgccagccacattccagaacttgatgaatgacatttttaaagattatctcaggaagtttatccttgtatttttttatgatattctggtatatgcaaaaacttgactagagcacattcaatgcttgagtacaacattacaacttctccaagacaataacctagttctcaatcacaaaaaatgcagttttgggaagacaaaaatagattatttaggccatttgatctcaaaaaatggggtgtagccagatgaagataaaatagttgccataaaacgatggcctaggccaacaacagttaaagaactcaggggcttccttgggttattaggatattacaagagatttatcagaaattatgggaagatagatcaacctttgacacagttgttgtagaaagatactaacttcaagaggaatggggacacataaaaggcattttctacactaaaggaagccttgatctcagctcctgtactggccttaccagattttggtcaaccctttactgtggagacagatgtttctggaattggcattggggctgtcttaatttagcgaggtcatccaatagcttatatcagcaaagcaatggggccaaaataccagcttttgtctgcatatgaaaaggagttctatgccattttgtttgcagtcaagaaatggcaacattactttcttgggcaacactttatcatcaaaacttatcaaaaggcacttaaacacttgctagaaaaacctccaacaactttaatgcagaattagggacttgaaaagctgatgggacaaaactttagcattgagtacaagcaaggaaaagagaatgtggtagctgatacattgtcgcgacaacaaccagtaggaagcttagcagcaatcttccaggtaatatcccaattgatgatggaggctaaagactcatggaagcaagatcatatgttacagaagatagtggataaaataagattgtgtcaacaaccttataagcagtacacatttgatgaccagttcttgagacgtaaaggtaaggtagtcattggagcaaactcagcactcagaacgaaaatactacattttaataattctgtgattggagggcattctggagatgatctaacttatagacgaattaaagaccaattctattggaaagggttgcagaaagcaataaaaaaatgggtgtaggagtgtatcacttgtcaacagaacaaaccattattaaggatgccagctggattacttcaaccattatccattcctgatagggcttggaagtctatttcaatgaactttatagtcggtcttcctaagtcgaatgacatgactttcatctttgttgtttgtgatagacttacaaagtatgcacatttcctaccattagctcacccttttggagctgctaaggtggcactgttgttcatggataacatcgtgaggttacatggatggccaagtgaaataatttcagatagagataatatatttatgagtgcattttggacgaaactaatgaagaagcacgcagtcaaacttctgcggtcaactgcatttcatccccagacagatgggcaaatcgaggccctcaacaaagcactcgaagtttatttaagatgtgtcactggtgacctgccgaagaaatggtcagagtatctttcttctgtagatcttcggtataatgcaaagtttcatagtgcaactcaattgaccccctttgaagctttatacggctatcctccaccaatgccaaatagtactctaataggagattctttggtggaagcagtggattataacatcaagacaagagaacagataacaaagttacttcaccataacttgcttcgcgcccaggaaagaatgaaacattatgttgacctcaaacgagtggacaaggagttcaaatgtggagacctagtctatttaaaaattcagccgtacaagtagcttactttggcaaaccatgctttccacaaattggcagctaggtactatgggcctttcaaggtgttggagcgaataaggaaggttgcgtacaaacttgagttacccactagaacaaaaatatgtgacgtgtttcatgtatctttgttaaagaaacatcatggtgcccatacggtttcaactgatttgccggtgtataatgaggaaggggaagttcaattgcagccactagcggtcttggataggagaatgaagaagaagggaaaccgagctgtatacggaagtacttatccaatggcgacataccaatcctgaagatgctatttgaattttatgcagtacaacaataatttccaaattttgattagaattctaatcgaccttgaggacaagtccgtttcagtgggagggataattgtaataagtcaaaaataaagggtcaattagttagtaattagacaatattagtagttagttatgattagtattttatttttaagataagattagtagttagttacaaatagtattttattttaaaaagtcaattagttaagattaggaagttatgattaggattttatcttaaacaattagataagattaggaagtgagtgtataaatatcagtatgtactcatagaagacatagaaaataaaagttatttaatttattttctttgtaaagagtgagtgaaattacattagaaatttatttctaattgtaacataagaacaattaattggcttagttgggacaaactaactatgggaaaggagcatggtggctcgggattatgccatctttacggctttaactatggaagccatctgggttcacaatctgcaccttcaaaatgttaatttcgaacttgactgcaagcaagttttggataacatgaaatgcctttcaacacatttcactgagtttggttgtattttatctttatgtaaacataaactgtcttatcaacaactcttcattgagtttagtctgtagacaagccaacctagccagtcgctcactggttagctcggacatctagattctttgctagtccatatttctttcatatacttcttctatatttgtcacgtcattgttcaatgtaaaaagtcttcattaacagtttaatttaatgttaaattaatttttaatgtagtctttcatttatctaacaaaaaataaattatttatataattttgcagatttatattaatggataagcaacaatttttgtaaaatttaattacagctggacttgtattaatagtaataaacttgagtctagattattatagcttcaaaattgttaataaattttaaatttccattttgcttagggtat

SEQ ID NO: 2884 - DNA, 6190 bp, Glycine max
  Intron number 2 from transcript Glyma14g23990.1 (locus Gly ma14g23990) derived from phytozome v7.0 (chr-ID Gm14; pos 28564783 to 28570972)
ctggtgtcaggtaattgttattcattttcattatcatgatcatgccatgtatgcctatggacacttcttgaatgttaggtgtagtaagtgttggagatctttatattgattagtgatatggcgaaaataatgtgtgtagggggagggaatgaatttcaatattttgatagtaatgaaattgattagattgttgtctcgtaaaagtcacatatttctttttgttagccattgctatctttatggtaactagtaagtgaactttcatattggttcagggtattgaaatgtattccgtttgcaattttgtttaatttgtgctattatgtagtttagtacttttcccattcaaactcgttttctgttgatccttaaaaatgttagctaaaggagtatgaaactatgaatcatgtttgcatgatttaggtgttgaattgtaaacttaattaaaatcagggactaaattgtgagtaagaaacgttttcaagaaccagtgctattttacttgtgaatgcagtgttcctcatcactaaggttagatgcattacacatgttctgttatttattatggattttgtaccatcatttctacatgttttcacttgagcattctttttcgtgatgtggaaattagtaattactaatgcttgctaaataggcatatttaacttctccaaaatatctgcttgtggaaattgctgctcagtttaattcctgccgccaatgttgtgtgcttgcaattcattatatgttgttggagtgtaatatgccttaatgtatgttgtcttatggacatataagacaaatgagctaatgaaatttatctgtaagatgcttgcttttagtttttttttagttttttgttttaagacatcttttgtatctctttctagtcatcattttttaggtggtattggaaagggtaaaatattatcaatctaatttggagggttgaccaccgttatatcacttgtgttatgtgaatgaaggcctactttcgcctttccggtgattgttatgagaaggaaaaattcataactatgtgttacttgtggagatagttatctatattaaatctcatttggaattttcactttttttgtgagtacaatgatgatagggctgtgggttagaattctaactttatttcatgttgttttttctttgaaagaaatattgagtgcaaacatttttggctgctgccccactctttctccattcatatataaatgttgacaatggaaggttgatgtaaataactaagcaaccattttcagattcttaatgcttatttggatcctgggatttatccatttgatgcttaatttattcccttttggctctttcaccttgcttttgtagttttatgccttgctagttgctatcttgattttcctccttcaagtcgtgttttggtgtgttagaaaataggttgttatatccctattgtactaggctactgttcttctttttgactttatgtatctcctttgttctgagttttttgtaaaagcttccttgtgtgtgtgtgtgtgtatatgtatatgtgtgtatatatatatatatatatatatttatataaaagagaagctgagtgttatgaaaacactcaagcatttcatccaaaagggcctctatgcgctgcttgtccagagccctcggtttggcacatgaagtgcatgcgctgccctctctattggtcagaaactttctgcaacagtacagaacgacttgtcggacctccctggacctagatctggtcctgcatcttcaatatctctattcagtagtgttgggttctcaagttggaaactttcatgaaggttctgtttgtgtgagttcgacgtcttggtttgcacagctcctccttgttataagatggcctccacaacttcttttgttggtcccacaattttgaatcttaatggttgtaaaagttatttgtcctggtctgcatatgtggaactttggttccttggctaagggcataatgaccacttggagaaagagttcactgaagtacaagcaaatagtcaggaacaatggaaaaggcttgacttccagctctgtgccttgttgtgacagtctgtggagccaaatatcttaggaaccttgaggtccttctaaacctattactctttttggaaaaaggcccaaaagatctatgccaatgacattcagagattgtatgatgcagctgccaagttgacatcttataagcaaacagatcatgatatgacctcatttgttgcttaaattcaatctgcaattgaagaactaactatgctcttagatgctgactcaatggaggaaatgaaaaggaagcatgacaatctgtacgtggtgctggccttatgtgccatgaatccagattttgatcataattgtgatcaattctgactagtcaagaagttccttcaatggattgcctcatgacacgtcttcttcatcttcgcaccccaaggaagattggaaactcacttgagcattctgaatcttcagcaatggtgtctactagaggaagagggggtcatgggaatcgtggaggatgtggtggtagaaacacgaattcagaccttcgatgctcacattgtaagaagtggggccccgcccaagacaaatgctactacataattggtggcctgataaaacagcaaatgtcaccaaatcagaaacacttgatcctaagttttctgaagagaagtattaagaataccttcgattgaagtccaacagtcaaactcaatcatcttcgggcccgagtacttcaacaacttgcatttgtctatggatagccaaggtccttgggtaattgattcaggtgcttttgatcatatttctggtaatgactctccattcacctctaagtctgctccaaaatttcctcatttgatcaccctagcaaatagtaccaaagtctcctctaaaggagtcaacaaagtctccatttcttcttctttaaacttgaatccagttctttttgttcctaattgtcctttcaacttagtttctcttagtcaacagacaaaatcattaaactgtcctgtaacatttgatgttgattcctttgttatacagaaatgtggtacgggttagttgattggtgtaggacatgaatccagtggtctctactatcttgtacccagcccgtttgtgtcttgttttgcatccccatctcctaaacttatacatgatcgcttgggtcatccacatttgtcaaagttgaagaaaatggttcctaatctcagcaaacttcaagtcttagagtgccagttatatcaattaggataacatgtcagattcttttttccaaagagaattgaaacaagatgtaactctactttttccactattcactctgatatttggagtcctagccgtgtcacatcttttggtttaagatatttttttacctttattgatgaatactctagatgtacttgggtttatttaataaaagatcgatctgaacctttaccaatattcatgtcgttctttaatgaaatcaagacccagtttggaatagaaattatgattcttaggagtgataatcccaaagaatatttcttctctaatctctcttcatttttaaccacacaagacattttacatcagttcacaagtcctcacaccacaaaaaaatggtatagtggaaagaaaaaatagacacttggttgaaactgcatgtaccttattgcttggtgcaaatgttcctagtcatcattggggtgatgccatccttactgcttgtttttaatttaatagaatgtcatcttcatctcttgagaataaaattactcaattctctttccaaataaacccttatttcatgtctcatcgtatttttggttgtacttgttttgttcatgatgtttctctaggtcaggacaaattatctgcgagggccattaaatatgtcttttcttggctactcccatttacaaaaggagtactgttgctactcacctgacactagatggtactacatgtctgcagatgtcaccttctttgaagaaactcccttcttctcttcttcaatgcaagatttcaattttgtccaacaagttttacttgtcccatcacttgatccactattgtctccagttcatgaaatccctattatggacacaagtcaagccacctctccaaccagcccttcttcatgacctcacaccacttcatcaccttatactactcaccactatgagacacacaaagagttatctagtcctatgtcacatggagagtcctctgcttcatgtctgtcacctttagctattcatacatcgtttccaatagatgacgactctaggtgtccaattaatcttaggaaaggtattagatctactagaaattctcatcctatttatagttgtttgagttatcatcggttatctccttatttttcctttgtttcatccatatcacctctcatcattcctaaaattatccatgaagcacttgatcaccttggatggcgacaagccatgattgttgaaatgctggttcttgaaagcagtggcacatgggaactagtttccttaccacctgggaagaagatagttggttccagatgggtgtatgctattaaggttgggcctaatggtgaagttgatcaccttagggctcgattgatggcaaaagggtacacacaaatatatggtcttgattatggtgataccttttctcctgtggccaaattcaccatggtccgtctattccttgctatggctatcattcgccattggcctctccatcaattggatattaaaaatgctttcttacgtggaagaagagatatatatggagcaacccccctgggtttgttgctcagggggaatgtgggttagtttgtaatttgcctcgatctctctatagcctcaaacaatctccacgagtttggtttgggaaatttagtaaaattttacaggcttttggattggagcgcggtgaagtagatcatttagttttctattgtcacacttctctaggaaagtgtatttatctaattgtctacattgatgacatagttattacagggaatgatgctgctataatttgtccgctgacaaaacacctattcaaccactttgagaccaaagaccttgggtgtctaaaatacttttttggtattgaggtggctcaatcaaatgaaggcattgttatttctaaaagagggtatgctttggatatcttgaaagaaacatgcatgattgagtgtagacctgttgacagtcccatggacccaaatcaaaagttgatggcagaatggggtgaacccttcaatgatcttgagcggtataggagactagttgggaaactcatttatctaataatcactagacttgacatctcttttgcagttggggtagttagtcaatttatgcaggctcctcacattgatcaatgaaatgctgtaattcacattctttggtacattaaaaggactccaagacagggattgttctatgaaaacaagggaaacacccatgttattgggtattgtgatgctgaccaggcaggctctcctatagacagatgctctactattggatattgtgtattcataggaggaaatctgatttcttggaagagcaagaatcaaaatgttattgctcggtctagtgtagaagctgaatatagggccatggcttcagccacttgtgaactgatgtgggtcaaacaactcctccaggaacttaaattttgtgaagttcagcacatgcaattatattgtgataatcaggcagcacttcatattgcttctaatccagtattccacgaaagaaccaaacacagaaattgacggccactttgttcgagagaagttgttggctaaggaaattagtgctgaaaaaattagctctaatgatcaatctgcagatattttgactaagtcattgaggggacctaggattcaatttttgtgatccaagcttggtgcatatgatttatatgctccagctctgttctgggttttctgtaaaagcttcctttgaaagctaagtttatatgtatgtaagagaacactcaagcatttcccatccaaaaatatctcattatattcaagtgcatttgtgtgggtgcttgcttttctcagctaaattatagtttgtttcatagatctatgtaatgttattattaactgaatacttggacgctgagtaaggtaattccttttttgtcagggcta

SEQ ID NO: 2885 - DNA, 9575 bp, Glycine max
  Intron number 5 from transcript Glyma20g19210.1 (locus Gly ma20g19210) derived from phytozome v7.0 (chr-ID Gm20; pos 26868225 to 26877799 reverse strand)
attgttattcattttacactgtagtttttttagcataactctgataaaaggacaagcatatcgtttcttataatttgctgaaactacggtaagaaattggtgatgatagagaatagttatttatgtatgtgcttattaggttattttatattaaaggcctgggcttatctttcttgcgctgagacagtttgagagagagagagagagagagagttatcttgtgatttgagaagaaattggggcctttgggcatttggaggcacggaccctctaagtgtgctctctgttcagtgatttggggagttcttccctctgatgtgctctatatccttaatagcctcccacctttcttttagggtttatgtctatccatctttgaagggatattggttgtattcttgtatctttccaaggcatatataatccaccattttatattccaaaaccatcttaagcaaactttcctctatatggtccagcactcagacattctccttaatttttttaatctatcctggtatgctcactcctttatccgcttaagcattcactagttaactttaggcctagcagataatcttagtttgtcatgaccagtgccctgtggatccaacatgtttaggttttcccacgggaaaaagaacagatacaaattggaaggtgagagatattgtttttgtttgcatctaagatttttactaaatactatcatatagagagaaggaatttggaaaggacacgactcaccaaacaaacagaagagagagaatggagaatgaaaaaaattggaggttgtcgtgaatattgtgtgggagaatttggacaattttaaatgtccatgtctctttaataacagcacaagcagtcaagcacaaaggtgcaatgttgggaataatggttcaaaatcttgcattcatttggtgagctggtattatgatgtctgagctaatgtgtacaacttgtaggaaatgttttatattgagtaacatgtacaaagagtgtgtgcaattataatttataaaccaagtcaaagggtgtggttcacttgtttgaatggggatcacaatagggctttctgacttgtgcaaaccacctcttgttaagcctatttggtcatgttttggatcctatgggtctaaatggagctatgtaactctaaaatgcttttgagttttgcagtccagcttattatagggtagggtagggaacctgtgtgtgaaggtttcattctaagagcaaggcagatttggggtttgtgcattgcatgcctctagtgctcttgatttggcaatgtttaggcaatggttgctcaatttgggaaatccgcaagggttgcttctaaaatttggtattagaaaatatgacatggctactgatatgttaatgcagctcctcctaaggccattttacacagaaaaactaatttggacagctagcacaagggttcgactttcgagcaataggcaggataatgcatatatcttccaaacttgacttttaggttcacacttgcctcttaaccttgtgcagcaaagtaactaaacaccaaccacattttgacatcgaaacacaacttggcagaccctatatcagcaaattatgtagtaccaatgagtttagctacaactatgaaaaaccacatattttgataggtatattctattgatatgttgcatatgataggatattttattgagttattgcttgtaaccttgaacaggttgtagaaagtgttcaagtggatatgtgttatatccatgtgcataaacagaaaatgcagaaaagagaaacacagaatttaatattgttttgctgacaacaaattatttgtctactccatggcaaaaagagaaaaatcattatgaccaataaatattataaggagtagcagctgaacactaaaaccctaatcgaatacacccaaatcctcactgttgttgaaataaagtacactgtccagtccaactactgattttacacacacagaggttcatgaaggcatgaagtaacatatggttgcatcattgaacttgaacttgtgggagaacattggtccagccatgggggttaagataatgtacttgttctagtgttatgtttggctcattgtgtttgttggaaagtgacaggtctaatgaccaaagaacatggtatagatgatgtgcaagtgtaagaacaaataatccaaggaattatgtgatttggcatgttacgtgtctccacaggcaaaaggcaacaaccaaatattttactaaagaaacatgatggagaatacaaaagtggttgcatttcaaacccaaacctcaaatacacccaaaatacctcagtattttcacacctatgcattctttcagcagtcacaaacatatagagaggattacacagaatcaacacttcaatacaagaatgctataccaactgttttggaaacatagtattggatcaacagcagtcaacaatgattcaaagtcatgctacaagcctttctttatagaccttgcattgcatttgcaacttatcatgcaaatccattataaaggcattgtaactcaacttgcctatccatgtaggcatgaagaaaacatttggttaaaataaaccttttctgcatgtagctattaatgcattgcaactgcattgggcttttactagtagagtacgcaaaatggactttgctcatgtgacagtaatgaaatcaccaaagtacgtgaagttatatgcatgtttagtaaatattttttgaaaagtcgagacatccttttaacaaaatgagagaacttagaagcaacaatgtctattttgagcaagcttgatgtgctaagtgatcatgaacccgatggggcttgaattttgtaaatgttatgttggtaggtgataggatccacgtggcagcagaagataggacaccagaacaattaattcatcacaccacaggtggtcccaggatcttatacgtctattctagaaggaagggcacaaagggaattagtggctgaaattgttattgttgatatgacgtgttgaagggagagagcatcatggctttttcattcctagttataaggagtcagaaaggaattttagggggatcttggcattttggcttttagtgcaaataggatagagagtactgtcctctctattgaatgagcctagctcttggcaaatcctaggggtttgtgattcctaaattctgtactgttttcccttttctcattataataaagctctcttttccaccccattgattcataattactgtttcattattatactattcattggttcgtatgaactggtccgacctgccggatagtcgagagaggtaccagtgaatgccaaacagaaaggttacacttaccgcattttccaggatggaccatcgagtcgaagctttggaggaaggactgaatgaagtcgagcttcgattgctggcgtacaaaccacgatgcgggagagttacgcgaacatagtcgcgttgatggagaaacacctgggaaagtcgatagcgacggagggaggtacgccggagaagaaggacaaaccggaatctagtgaggtgaaaaacgatgtaacactagagttccgtcagtcagccaagaaggtggagctgccgtcgttcgacggtgacgatcctgctggttggatctcgcgtgctgaggtgtactttcgagtacaaggaactacgccggcggtaaaggtgagtctagcccagttatgtatggacgggccgacggttcattttttcaactcgattctgcgagaaaatgaggatctgagttgggaggagctgaaggaagctctgcttgaacgttacggaggccatggggaaggtgatgtttacgaacagttgacagatcttaaacaagaagggacgattgatgattacatcacggaatttgagtatttggtggctcaaattcccagattaccggagaaacagtatcgaggatacttcctccatgggctgaaaccggagataaaaggaagggtgaggagtttcgctgccttgagtgaaatgaggcgaacaaaactcttacaggtggctagagcagtggagagggaggttgaaggaggaagtgagcttaagcccaatcgtgggcctagatttggatctggtagtggatctcataaaaatgggtcacaatcagattgggtcatggtgaggaggagagaaggaagcagaaatgagggtgtgaaaagcaacactgatgggccaaaaggagatagaaagagaactgggcctcgtgatagggggtatacacaactcacttacaatgagctgatggactgtaatcaaaagggtttgtgttttgagtgcaaaaatccctttgggccaatgcaccgttgtccggccaaagaactaagggtgctaatagtagacgatgtggaaaacgaggaagatgaggagaggattttggctgtggaggtaggagaggaagaagacgagaagggggagatgagcatactcaatttacaccacattgctcatgagactcaccacaccatgaagtttcaaggcacaatacgaggggtggaggtactaatcctagttgatagtggtgccacccataattttatctcacagaagttagtccaccaaatggattggcccatatagcccacggcccaaatgaatgtcaagctaggtaatggatttcaaatctccacacaaggggtgtgtagagggttggagatgtgtattggagacttgaaaatgaatccggaaatgcacttgtttgagttgggaggtattgatgtggttttgggcattgattggcttaagactttaggagacactatcaccaattggaaacaacaaaccatgagcttttggaaggacaaatcatgggttactctcaagggacacgaggggtgcaggagacaaactgtggcgttacaaagtattttaaataggcccaaacccacttctcaaggcctgctatgggaaatggacaatgtaaaacacaaagggaaaggggtaaatgaattatccatacaacagcaagcagagatggaggtgttgttgaataagtttgagcacgtgttccgaacaccgaccggtttgcccccaaagcgaaacagagaccacgctatcaccctcactgacggacatggaccggtgaatgttcgtccctacagataccctcatcatcacaaaaatgagatagagaagcaagtcaaggagatgttagcggcagggataattcgtcacagtaccagctcgttttccagccccgttattcttgtcaaaaagaaagatggtacatggaggatgtgtatagattatcgggcattgaacaaggctaccattccggataagttcccaattccggtgattgaagaattgttggatgagcttcacggagccaggtatttctccaaactagatctgaaatcagggtatcaccaagtgagagttaaagactcagatgtgggaaaaacagctttcagaactcatgaaggccactatgagtttcttgtaatgccgtttgggcttaccaatgcgccggccacgtttcaaggtctgatgaacgatatcttccgtcccttattgagaaagaatgttctggtgttttttgacgacattctagtttacagcaaggactgggagacacatttgcatcacttagaggaagtgttaaggttgttagcagctcacagtttggttgctaaccagaagaagtgttattttgggcaaagaagtattgagtatttcgggcatatgattacggaagaaggagtagcagtggattccaggaaggtggacagtgtgctcagctggcctcaacctaagaacgtaaaggggtacgggggttcctaggcctcaccggttattatcgtaagttcattcgtgattatggaaaaatagccaaacctctcactgaacttaccaagaaggacggattcaaatggggggtggaagctcaaaaagcttttgatgaattgaagaagagactcaccaccgcgccagttttgaccttgcccaatttttctaaagaattcgtaattgaatgtgatgcttcagggagtggaataggcgcgatattgatgcaggacaaaaaacccatagcatacttcagtaaagcgctgggggttagaaatctaaccaagtcagcttacaagatagaattgatggctgtagttttggcaattcaacattggcgtccttacttgcttgggaggaagttcgtggtttccaccgaccagaaatctctcaaacaattattgcagcagagaatagtcaccaaagaacaacaaaattggacggccaaattgctgggttatgatttcgaaattgtgtataagcagggaaggctaaacaagggtgctgatgccttgtctagaatacatgaaacaggggaattgcaggttttacactcccaaattaagtggctgcaggaagatcaaatcaaggcagaaaatgataaagacgaaaggttgcggaagattatgtctgaagtgcaacaaaacccagataagtggcccggttatgagtatcgacacggggtgttgttatatgaaggaaggttagttttatccgctcattcaatagtgattcctacacttctagaagagttccattccacaccacaagggggacattccggattctacaaaacctatagaagattggctgccaatgtttattggattggtatgaaaaatcatgtgcaggagtttgtgagacggtgtgacacttgccaacgacagaaatacatggcaacctcacccgggggcttactacaacccctacctgtacccaaccaaatttgggaagatatatccatggatttcatcaccggattaccaaaatctaagggatacgaagctgtctttgtagtggtcaatcgtttgtccaagtatgtgcacttcattcccctcaagcacccgtacacagcaaggagtattgcagaggtcttttgtaaggaagtagtgagattacacggcatgcccttatcaatagtcagtgacagggacccgattttcattagtagtttttggaaagaaattttcaaactacagggcaccaaattgagaatgagtacggcgtatcacccggaaacggatggacaaacggaagtggtcaataggtgtttggagacttatttgcgatgtttcatcacggatcagcctaagatgtggatatcttggttgcactaggccgaatattggtttaacactactttccatagcgcaaccgaaaagaccccctttgagatagtctatggaagaccacccccatcattgtacaggtgggtgcaaggggaaactagagtggaagctgtacaaagagacctggtggatagagatgaggctctcagacagctaaggaaccaattgttgagggcgcaagagaaaatgaaagctcaagctgacaagagaagaagtgaccagagtttcgtatgtagtgaatgggtgtttgtcaagttgagagcacaccgtcagcagtccgtagttactcgtatcaatgcaaagttggctgcaaggtattatggcccctatcctattgttgaaaaaatcgggcctgtggcatataagctgaagctaccaaaaggatcaagagtacaccccgttttccacgtctcgctgctcaaaaaagctgtgggtacctatcaagatgatgctgagcttcctgaactgatagaagagcccatagaagtttacagtccggaggccgtattagccacacgaaaggtgaaacatcagaatgaggaggtccgacaagtcttgattcattggaaaggaaggactgcagaagaagcaatgtgggaagatgaaattatgattagaagtcagtttcccagctttgaccttgaggacaaggtcaatattgaaggagggggtgttgataggatccacgtggcagcagaagataggacaccagaacaattaattcatcacaccacaggtggtcccaggatcttatatgtctattctagaaggaagggcacaaagggaattagtggctgaagttgttattgttgatatgacgtgttgaagggagagagcatcatggctttttcattcctagttataaggagtcagaaaggaattttagggggatcttggcattttggcttttagtgcaaataggatagagagtactgtcctctctattgaatgagcctagctcttggcaaatcctaggggtttgtgattcctaaattctgtattgttttcccttttctcattataataaagctctcttttccaccccattgattcataattactgtttcattattatactattcattggttcgtatgagtaggaagccaactagtataccacctgcaggagtaaggacaatcttggttatatcaattctaatttgtgaagctttgtgcctgttctcttaaaaggggtatctgtatgtgagttggccataatgggtgttttgaagaaagcaacttgagaaattaaagacttggtaaatgtctacccaagatgaagatctgttaaaagaatgtcttggctgtggatcctgaaaggctgaaacatttactatgtatacttaatgaatagcttcaaataatgtggtgattttgctgatgttaagtgggcttgcattctttgtgaatactgttgggctttaataataataagaaatggacaaaaatccaatgttgttgcaagtattaattgctgcatgctggatggtttatttaatgtaaatgcgggcaataagcttatataaagaggcttgtagcatgactttgaattatccacttttaaatttttttctaagccagttggttttagttatataattataatcagtgtgttttgcaattttcttaaatatttttaggtatcgaggataaaacttctttgaagtcattttgttatgtaatggaatatactgagctttaagtatagtttcccagatgttttatcgcaatttgttttttctacaatattatgataatatgatccttttttactgatgttccttaactttttttttacaattattgtcaattaaattcttataaatatctcattttcatgaacttgaagttcatttcttaatgtgatttattcttctccctctcttatccccaaaatgtttgatgcatttcctgtaattttggtaacaaaggatgtaattttatattttataataaacgttataaatctcttgctgatttgtgtcaagtgattctgtagggtggacagttgttcttgactgtgcatttcctgtttatctaatattctcatccatgtagttattgtcgttcaatattgaacataaaagcttattcatctaaaatctttcaagctcaaaatatatatgcaatacaaatactgtttctgtatcatcagcattcagcaaatgagatttttaaattaattgtcagtactcctaatgattattgtctaattgcattgatgtatcctgcagcaaatggtttctgcagaagcttggtcatgaaggttgcaccttaactgcataattttagatcagttctcagtttttttagtacaggggtttcaggaatgaggatattttacagaatttgatttactcatttctcagattcatttttcaggtctcaacaatttgctg

SEQ ID NO: 2886 - DNA, 1207 bp, Glycine max
  Intron number 10 from transcript Glyma09g30440.1 (locus Gl yma09g30440) derived from phytozome v7.0 (chr-ID Gm09; pos 37291529 to 37292735 reverse strand)
gtcacatcaaggtaactacttagtgtgtttgcatttctttttacatacctccaaaccatggtcatgggagaaggttgcctcttctaagttttgcccaaaaaccatggtttggaaatttgtaatggaaatcccaacgcaatatggctagtcttttttcttcttcttcttaggattaatatcaacagttttgtattttaaaatagtagttaagtactaatttgagtaagttacactaaccacccttgatgttttgtgaaattacacaaacacctcatgtttttaaccattacaataacctcccttgtagggggtgtttgtgtaatatacaagggggtgtcaataatgtttcaaacatataggaaagttagtttaggtattgaaaaggagtggtcttatgtgttatttgaaaaaaacatggggtgcaagtgtaatttgttctattaattttatggtgtttggttaggttagcctgtttgggtggtctggtggtgattttgttgtttttttggggcctatgtctatatgatgaatcattgagttttacatcttttctattattagcttctttcgatggctctaccaatcccatccctgtaggttgtgattccatgtatttggttcaattattttagagaatttttttactagctttctgacagcttttgaagaaaaaaatgattatttcaaaaaagtcactcccaaacatatatttaatactaaaatgtaaagtatttattttcctcatgaaaaaatggtaaaagaggtttctgcaaacttgtgtgtgtgtgtacatttattatattttagtttatttggatgaggtctcaaactgaagcacaaacaaaattgtgctattttgtggttttttccccctagctattttttattccttctaaaaagactttcttatatagttatatatgatagagaagctgtttaaacatttaaaaagtattactctatattagatccaaacatataagttttgttttatttttctagaaagctcacataaaatagatttctttttgaaagctcattggaaccaggctaattttttgctcctcttaggtgtaaattgcattcttttgagtttcaacttcaacattcatgtaatcctgttttatagtgtgctagtcaacttgattttttttctctgtctactttggcagttaacagactttgggctttctaaagttggtctcat

SEQ ID NO: 2887 - DNA, 6135 bp, Glycine max
  Intron number 1 from transcript Glyma01g33880.1 (locus Gly ma01g33880) derived from phytozome v7.0 (chr-ID Gm01; pos 46068019 to 46074153 reverse strand)
cgtccatcaaggctgattacatttcgcgccaacaggtttcagttctatttgatttgatccagttaatcatttttaattttcgtttttatttacttttaattataatatctattgttgtgcgtttttgaatttgctattgattgtagtgtgattttctagctccggtttgagctacttggttggaactcctctttttttttgctaagtggactttgattggattgctataggtgttattgagttaatcttttaatttttgtttttattgtcttttaattatggttgctgttgctgttgccttgtgtgttcaaatttgttattgagtgtagtgtgattttctaactccggtttaagctacttggaactcttttgttcagtgggttttgatttgattgctatatgtgtggttttcattggttatgatgtgacagttgagatatttgcttggaaggggatttatggattttacgttttatagtttggatggagcaatttaacaggggaattcatttttttaatgaatttaaaatgattcatgataaaatagcttgtttagatagaatatttgaaaggagatttaatttttggtatttttatgaatcattttgattgactaaaatagtggaacttcaaattctctaaaaaattatagaatttttttttttttcagagatacttactctaactcacattcttgctcgcgactctttctcgctcaacactcacaactacgggtgaccaaagtttttaggaccgatatcgacataagttatttttcactgacgttggccgaggtttttccggtcagaatttttttgtatgatgccaatcaaaattattttttgtcaatatcgattaagatttttttttagatgatgttggttagggttattttctcactgacgtcagtcatgggaaatttttgctaacgtcggccaaagatttttttggttgctgtcatccagattttttcagttgatgttgaccaatgatttttttggctgacgttggctagattttttctactgacatcggtcatgactaacttttgagtagacacttgttagggtttctcagccaacgtcaactaggttttttcagccaacatcaactaaagttattttttagccaatattggctagggttattttttagtcgatgttagctagggtgttttggctgatgtcaactagattttcttaaccgacgtcggttataatatttttgttgacatcgactagggttttctggctgacatcagctagagctattttttaatcacattagctaggttttttggttgatgttggctagggtttttttctgctaacaccaactaggtatttttgaccgacatcaggcatgactatttttagtcgacatcgactaggttcttacaattgacatccactagagttttttcggtcgacaccagtcagagctattttttagtcaacatcaaccaaggttattttatagctgatgttgggtgggattttttgtccgacattggttagggctattttttagccaacttcgattagggatttttcagccaacgtcgaccaatgatatttttcagccgacatcgggtaggttctattggtcgacatcgaccaagctattttttagctgatattgggtagatttttttgtcaatgcctacaaggattttttaggccaacgttggctaaaaatagccttggtcaatgtcatttgaaaagatcctaaccggtgttggccaaacaaaccctagccgacgttggtaaaaaaatctagccaacattggctgaaaaatagactcaaccaacgttagtaaaaaaatagtcccgactgatgtcagctgacaaatatttctagcatactttgacaaaaataaatcctatttgatgtcgatcgaaaaatagtcttgattgatgtcggtttaaaacatcactggttgtggtcagacaaaacaaccctagttaaaattatcaatatttcgtatttataaattattaaaaattaaagatattttttaattaatattttaaaattagattgtgtttaatttttataaaatttaatattaaaatttcatctatttaaaatataaaattgaaattttgcatatggaggaaattgaattaccctatccaaacaaagaatttaaaatggaagaaatttgaattgatttatccaaataaaaacatttgaaaaatgaaggaaattaaaatcaaagcaattcaatttctagacatttcaaattccttgaaattttaaaattcctgatccaaacacaaggttatggaatggatatttggacgtgcctgtagttgttgattgtcaaatgatggatcactttgcacttgttgggtaggaaatggaataggggtgagctacaagattttaagtggggagtgctatgcaattgaattttagaggagggggcagattttttttatttatgcgtgtttaagtggttatttcttcaaaattagtttaacatacacacccaaattattgatctttgttcctctcatttttgcccgaacaaaccattatactcactataacttatctgtgcaacaactcatattctagtgaatttttgtggggtatggtgttttagaggataaaattctatatatttgattcaaagctaagtagtcaactatgtcgctagcacgacaaattgtgggtagcctggaatttgaagaggcacaatgcaaattgtgggagcgtcacaggtttgcagttgcgggaaatgctgtggcaatttgcgactaaatcgtggaggttgtgaacttcccaagctttgtactctggattcacacgatcaacaatttgatcaatatccgtgagatatcgaggcagaacaattggattaacaacaaaccgctgcagtttgtgcgatttgattactggtttgacatgttgttgctagtgtagatagttggaatcgtcgagtttctcggcgatagaggttggaaatgagtgcgaggagaaactctgtgaagcggaagccatggaagttgaagaaggatatggaaaattcgaagagaagaacttctacgaaaaattggctctatataccattttagactgagtgaaaagaaatagagaaagaaaaatgtagagaaaagaaactgatattattgaatctgaaagttagttacagagttagttacaagggagtatttatagatctctaacccttcaaactaagtacaaaacagaattaacaaataggggggaaaatctgttaatagactaacagcttaacagcctgatattagtgaggtgctgttagcaaaagctaacagcccttggaaactgttttcacagttattctaacatataccctaatatccaatgtccttcctagtctttctttacctcttttcaaggggttaaaaaccagaaatctaaccttttcactgggtgggtaatacccctctttggtgcatttcccaagacttttccatcttcttattctgcacaatgctcccgtatttcactttttttctacatccaatgctaatgtgtcttgggattaacattttttagaaatctgaaagtcattgatatctctgaactacaaaaaaaccttttggtttttctgaaaaatgtcaattcactcctaaccaagactggaagagttggtctattgattcttcatgatcctttaatgggtaaataagatttccaattctcacttcatcccctaatagagaatcttttctattggataagccaatttggaaattaattgttccttttaaagttaaatttttaatttggactgctgttcttaaccggattaataccaatgacatgctccaaatttgaagaccccctaactacagtatcacctaatttttgtgttatgtgtatattgagttttaaaattgcttctctttttttttttttttgcacccagctgggttccatctttggtatactctgctgtggtgggtgaaggatgggtctgtcccaaggatcttcagtgtttcttgttcgttatttagaggctttggcaccaatagagatgctaaaaggctttggaggttttctcagtttgtgatagtttggtgtatatggttggaaacaaaatcttgaattttcactggttgagttctactaactttggatttcatttgggacagagtggttcttctagcttctttgtggagtcatgacaaaggtctctttcaggggatgtgtttggcagatatacagggagattagcttgcttgacttcatgttagtttatgttcttttctcttttggtgtaatttttagctgtagtagatatcttatcctaatcccttcgtatttctcctctctttctcaataatatccttttttttaattaaaaaatgtaggttgtttgaaatgactggtttcattatgtaaaatgtagaaaccctctgggtccaccactagagaagaagaaagttggatgaaatatttttcaaatgtttttggtttcttttcttcttggctactgagtaggatggcatgtgtggaggaggtggtatcacatggcaatgaatacctcatttcattaacttcattggtcatacaatagtcttacataacataaaaacatgaaaagaaaatatagaaggaagagctatcaaaatttcaaattgacatttttatcatgttcttaatcaacaatttttttaaatgaatcctggaaacagaaaatataaaaggaaggtctctctgcttgtgtgccacatcaaaaacagaggactgacacaatcaagatcatgatcgacatcagaaaggtatcacggagggatctgaggattagctacaaagcgattgagtccaagtgcggagatcgctggctcaatttgttgtcaccagagtaaaaaattcttattgttcaacttttctgtgatttgaagcaaaaaatttgtcgtaactgacgaagctgggacgtcttgattcatcggaatctaattgactgtaatcgcgccaatggtgttcggaatcgtgccagaattgatcggaatttcagagtagaatggaatctcagagttgattggaatttcactggttggaactgcaccggtgttaaccagagttgcaccagaatttgcggaagccatgagaatggatcagaaagttctgaaaccatgtagagaagatataagggagaagaaggagagaaaagggatttgtattattgacgtagaaggaaatacaaagccactgagatctcttacaagagtggtatttatactgctgagattcagttgtaactgaaaactaactaaaccagagttagttactcatatacacttacatacatctaccatttccataaatggcaaatccaggaccttcattcagtgggatcaatttatttaaaaaataaaaaaataattattattatcatacatttgaaaataaagacaaatattaaaatcaagtgcagtgagatgaaaaggaaatgaaacgtccaactaaataaagagtaaaagtacctagtgagctggaaaaagaacaaaacataagaaaaaaacatagtcaataaaaagcaaaatttgacaacaactgaaaaattgagagtagtgggttcaaattttaaaaatagggggagcaataagataacaacagtaggatatatttatattttctcaaagtctggggtgcatctgcaccccctcaattatacttgggtccaccatttctccccatacccgactaagtaggagccttgagtattgggctgcctttttcaagatttttttttaaaaataattgagagacataaattttactcagtttgaaattgatttatatttctaattatgatgatgatgttgtgtgtttttggtcttcattaaatatttaaatacttgtgtaattttatgtagtttgatactcattggttgaactagtggtgcattgcctcaaactcagtacctctcctgagttaatttccagtttgacttttataacagtaacctatgtatagtctaatgcctatatgtaataatcttgtttgtaacaacatttacaattattggatcatgtatggtgtctccgtcattcattaatgttgcagctattttattcagaatataaggagctaccaattctatgtgcttatattttgctttatttttcaggcca

SEQ ID NO: 2888 - DNA, 767 bp, Glycine max
  Intron number 1 from transcript Glyma18g10170.1 (locus Gly ma18g10170) derived from phytozome v7.0 (chr-ID Gm18; pos 8983632 to 8984398)
ttccctcactttctgtctcttcttcttcttctcaggttccttctctatcctctctttctctctctgacttgatctgttgaaatttcaacttagattttcagatttcgtactcatttcacgattcttcctgccccttagaaacctctctctcttcagggacaatcatctcatttaaactccgttgcgtgacttcccccaattttttacgcaaaatgctttgtttttcaaagaaaaatcttctttcccatttttttaataaaaattctagggcgtttggtggctttagttttgcgacttgctcacgattctgtgatttttttaccgatcaagattcgcaggaattgtagtttcacttttttcgatgcgaaattcggtgaaattgtgtataattaaaaacctttgccttggttttcagcttttcatctgcttgtgtataggttttattcttttgggtattatgtttttgttgatggattcataattatgtttagtgaatttttatttgaagttcgaatagtttttttttagaagcaagcttgaatagttgtttacgtggaaaatgttatatatttatgtatattgtattgattcttatgcttatgctttactgtgttttatttgatatttgttttatgtttttaacattggtagtgactagttaaccgagtgtttagtttggttttgtttaaattaggtcagttagttttatttgcaaatggttgtttgaaactaactgtttgcattatgtgtgtgttggtagcagaaat

SEQ ID NO: 2889 - DNA, 383 bp, Glycine max
  Intron number 3 from transcript Glyma05g35220.1 (locus Gly ma05g35220) derived from phytozome v7.0 (chr-ID Gm05; pos 39310252 to 39310634)
aattcaagtggtgaatctgtaagtctgctatctggataatattcaaatgttatgtaagcaatagtattttattgtatctataatgactcatgtttattcttatgacatcaattcttttttttgatttaaagattcatgcctttatgttaagtttgtactaatttttaatggtgtattatagtcatgtatacaatgatttttttttttcttaaatctactatgtctccatgtccatgtcctcgtcataacatatctatattccatgttgtatattcacttcccaagaatctaccataataaatattttattttgattatgattggctggcgtttgaatctattttgaaggttggggccatagtttcatattacaagattccact

SEQ ID NO: 2890 - DNA, 3743 bp, Glycine max
  Intron number 2 from transcript Glyma10g03140.1 (locus Gly ma10g03140) derived from phytozome v7.0 (chr-ID Gm10; pos 2255193 to 2258935)
tgtgtctcattctcctttccacctggtgttgggtaagtcagttacattatttctcataaagttctctttaattgttatgtctttacttattttatctacctttaactttatcggttctttaaaacttcttttaaatattgaactatatatattcgatgttatgattttttctatctgattggccatttttctagatatgtatagtttcagtccatatataattcaagtttccttttgaaggtaagtggaacggtagctttagcaaagtgtgaatagaaatattatagtgaaagagaaagggagaggctagctaatgtgacttgtgaatttaaatgcaacaatatatagcagctgcagaaatttaataactttccatttgtgctaacttagcttttgcaaacaagtgcctttcttactttgtttggagaaaattaaagacgttaaatcattttctcataaaagagctttggctagaagttatcaatgaagtgtcaatgcaatttccctcagtgacaagtgcattttgctgaggcatgcagactgtggcgcagaggcttctgtgagtgtatagtagtttaaatgcaatatgagtaccttcgaatttatgaagcgttaggacgcaagatatagtatatacaaacttgaaaaaaaaatgctaatcacatgcttctttaatgggttaccctttctattattcacagaaatttattagaattttacaacattatgaataaaatcttttaataaataagaagtaatactcatgtgatcattttatgaatcctaacacatttgagtcaataaaaaaatattttattgaaaatattgtattaaagagagatgttactataaaggataggttggtgggggttctataacgaaaggaatttgttcttaattttctgctgaaaaagaagagacggtaaaacatttcccaaattcactttctggtagaagtttttcacgtataagcatcaatttgtaaaaggtagctgagggacttaaatttcttcttccaagattcgagtgtttctcagactcttctttcaggagtaaatgcatgaagcgcaattagcaaacgtaaatctgtcaaactgacaacatttgatattgagagttacagtatgttagaatgtgttggggaatatattcggaagcgcattctgtcaaaatagaatttgctgagttggtcaagtatttagttgcgcattatatgcatgaagaggagtgctgctagagggaattaattatagatgcctattttcagaaactagacaaattaatgccttcgaaacttgtagcaaatatagctacacaaaaaatgccactacttgctagcatcctgcattcggaagttttttgcaatcacacttccatcttcctttccttctccctcctctaggatcaagcttttttcaaccataatatatattttcatttgggaaaaaaataatattaggaatccgtttttggttgatatagttttttcgtctatagcttcctagtttctcccaaattgctaataccgttttcacacccatcaaagggatatacaacatcaattggtcctgatataagagggtgcatgttcctaccaaatattgcagtaagctatttagttgtcaattatgcaagggtaggctgtgaatttaggctggtctatatacacacacacaaagctataatgatagcgttgcttatctatatctataaatattctgtaagagacgctattgttgggagaaagacaaatgaaaagtctaacagagcttagtggagtagcactatattaggactctaataatagtgcaatgatttaatggcactatcggattatgtgggatttaaattacttcatgttaacatgacaatcttataatttttcaggatcaaaacttatgatatttaaagttaatgcaaataatttaagaagtattcaatgttatttacgaactacatatttaatttaaggctgttattaattaatactcttaaaatatttgttaaacaactaaaaaatatttattatataaattatagaagaacatacaaataatcacatacaacacaatttatcttttgataaaactatttttattttaagttccctatccagtgtcttagttgccttagtttaaaattttatcttttaatgtttatgatgagagtaattttgaaatctaggacatgccaaaataagagaaattattagatagttcgggatcatcgtatcatctatgatttcaagtaataattatgtgatatataaatagttttatattttaaattgattaatatcttttaaattaagggacacataattaattattgttagataattatcaagtatatctttaatttaattaatatatatttaattatctaagtgttagataattattgatcgggattatgaatgacatagtgattttagatcacctaataatttcatgtgaaatagatatataatgtgaaagataataattaacaaaatttggaatctttaaaacattaataattgtaaaagaaaaaaaaacaggaagaagctaaaacatcacgatgttataagagagaattgaacgattaaaaaagtttaattatccatttagttttaataatttttaaacttatttcttttaatcctatagttaataagtaaattttttagttcatgatatttatattttaattttcaaaggatcttttttattaaaattctttaaagttaaaaaattttaacgacaaaattttatgaatttcagagattaaaaaatttaattattaaattttaaagactaaaaagtcacttattaactataaaaactaaaataaataaatttaaaaattataagaattaaataagtaattaaatctaaaaaaaataaatgaattaactatatacaaacaattgtagatatccctataattgtttttgtatctttgtctaatattataataggacattattatgttcctttttgacatatcaggatcttcatcggtctgcatgcacgaagcaaatcattatttgttattgcttagattttatacaattatggaaattttaagtattgactttttaaaaatcattatttgtgattgcttagattattttttttggtttattaaacaaacaatttaatagttttgatagtttaagtatttaatttttaaaaagaaataatccttggtgaaatgataaagtgtgtaaaagagtaaaataatttacaacaattaggttacaataagtgtattaagagagataaaaacttactttaatgattattatatctcgaaaaagacaagtttggaacggttgaccgaaagatagccttagttaggtttaaaaacaataatcaatagagtgagttaaagggtgaaattcacaatatgatgacatgctcatccaatattatattctgattatttgagtttttttttttggagagaaacatttgagttaaactatagtgcgagcaaattgggcattcaattcaattaaatcatgctctgataatattgctaagacaactcttggtgcaaatgttccgatagaggcaattatgaattctttatttattggattctactttgatttcactagctagtatttttttttttttttatttataaacgtgtagtagtttaattgtcgcagcatatgatttgcgaaaaattgtttgaatttttttgtatttgacgcatgttactgaatttcattgtaaggttgcctggaaaggcat

SEQ ID NO: 2891 - DNA, 1582 bp, Glycine max
  Intron number 2 from transcript Glyma14g06400.1 (locus Gly ma14g06400) derived from phytozome v7.0 (chr-ID Gm14; pos 4656827 to 4658408)
cttttattgtcaatattggagaccaaattcaggtgaatgctctctctctcccataattatcctcatggaatctttggctacaaattcatgatacatgcatctgtcacatgagggtacaagttgagggttgattcttttttagttttgtccttaattcgtcggattttttgacggatgtggccatttcaatgtttctacacacatgcatgtgatctcatttagggttttattttattcaatgaaaaaatatattatatatgaacacacggtaaaatagttatacattaatatttaattatagatctttctatttaatattttaaaacgcagattaataataatttctaatttcttatactaataaaattatttattagtataactgttaataatagaaactattgataaatgttttattataaattagtagtaaaataatttttattagtgatagtttgattgaaacttgaaagagatcttaattataaagaatgttcttttcactgtcgcagaatcagcgcgcacacataaaaatagatagcatttggcctgttggccaaagcattatagggataaggtctttctttattgacaagacatttctgaacaaatgatttcattgcttaagctcatttttgcttttaccttcctaagtttgtgactgaaactctatccttcataccaatcataccctcatcatataaagctatgatcaatgatctaccaattataactagctagtacataattgcatcttttgacgatgttcaaaagaccaaacactgcacctagtaaaatattatttctatcatgactgtataagatgaaatatatctagattatgttgactactacaaaaggttagagcacgctccaataattgagacttcaactaaaagagtactgttaagatacctataatctatgcttatttatatttaataaaaaaaattcaaaatagacattacattgattaaagttttatgaggtatgtactaagtcaaaataaaataaacacctaatgagtgcatgacgttatcgtgactgaaaaaaaatgacagaatagggtaccaactaccgcacgaattagtgatgttttttttaaaaatttggctagtcacggtgcaaatgacactgatattgctaagatcattatataagccaaggctaagggcaaaaatgaggcactttgtgtctggctatttacaaaacaattgagatttgtgtaatagtgagacaattaagtatgtcataggcgtttgagaatgataatattattttttgctttttttttagatagatagtaatgaaaaaaataattgaggataaattagaaataataaatacgtatactaaataagataattatcattataatagttatagattagggatatatatttgcttttgcttaagcaatgtcgcggtacaaacatataaggtagatttttgtctccgattttaagtttgcatgaccatgttacttccagttgaaattcaatgttagatctttagtatgtagcttatcaatgagaaaatcatactaatttattttagtttttgtttgacaaggttctaagca

SEQ ID NO: 2892 - DNA, 3024 bp, Glycine max
  Intron number 11 from transcript Glyma12g08720.1 (locus Gl yma12g08720) derived from phytozome v7.0 (chr-ID Gm12; pos 6464244 to 6467267)
caagtatgtatagctaaaatattggtgttgaatcttctttagcctgtgcaataccccactaaccctgacataaaatctgttcctttttttcttgctgatatctcgttttcttttaggtagaactataccatttggttgttattttgttcctagttttactcagcactgacggactgaaactgagatccaagtagttggaatatagcaaataactaatgtctttattgtatcttagaatattgtatagtttctttggtgatcatgtggagtggtttcctgatttcattatttttcttggtttgtttctttgtttgatttgattatgatttgaagtctagtgctactactataaatagggattagtgctttatattttgtatcacattgaaatacatcatactgatttagggagaagggatgggggggaggtcgtgggtacgaatcccccgctaaccaaaactaacaaaatttaacaactagcatttgctgataataaaaaaaacatcatattgatttgaagtcctgtaaatttaagtctctattcacccttcttttttttgcttgcctaaatcctgtgatttcaacatggtattagagtggtatcatcttctttgacctgtcccgttacttttctttccactgtcaagatacctaatgttgtaaactcttttgttaggtgaccctgccaccctgttagatgtgagaaattctggtcaccaaaaccttagttggcacatgtaaacacttctggcaaagtttctggttactgtcaccactgattgacttgtgctgttctctacccagttttgtccttatcttacccaaacacactctatgttataatgtacctttgctcgaagggattcaggtatattatggtgcagtttttggcctttattccttgaacctcagcttcttgtaatcctacagttggctcaaggctaaaatgcctgtgtttcaccctcgtcctgacatttatacttaaacagtgtcatctcttccagcaaacaactattccagtagttcattgatgatcataccattggtcaccagtactattcttccgctgacttttttctcatcagtgattcatacactgataaattggctgtgattcatataagccagcctccttttttgtatcaactgatgatcatttctccaatatcaatgatgagacatcctttttgatgaattctccatggttatggtgcatatcgacttagttttttgaagttgtagtttgtcttattcgtttatgaattcatctccactgagctacaaagttgggattgatttaaataaatttttcattttcttattatttctgatccagttctatcagtcttttacatatttctgctgtttgaagctttcaaatatggattggaaaagtttgggctagagctatgcctgtttgcttgccaagaaatttctcatgttgatgatcattgctgctgtattgccaagttatattttttgtaacgttcatctttctgatgtctcctgcatccctgaagtatcagttttagtcatgttttatagagcctactatctgtgaacgcttttaagaactaagaactcatttgtaacaaaagttttgttagctttattttgagggttaaattttggaaaatatttcttaatagatcaatctttattgtatttttagactattttagatgaattcttaggagtggtttttggatttcattatatttcctagtttgtttccttttttaattaggtttaattactcttcatgtccctgaactttaccaaattttaaatttggtccttgattttttttatttgggtccctgaacttgtatttattttttaattaggtcactgaacttgtatttgtttttaattaggtccttgcattagggacctagtttaaaaaaaggaaaaaaagaagttcaggacctaattaaaaattattaaatcattctgagacctactgcttacttttttttttttttttttgatcagcaaagataaaatatatatattaaaaagtaccagaggtactagataatgtacaaattacagatcagattagattccaggtagacctaattctgaccatagatagagtgtggatacaagaatggttataatacacatatcaaggtattcttaaaaatcctgcactaatattggtagaccagtgattataatgtgtattaaagtccttctccaaatttctgagccacgaccatagtaggaagactgcatcgtccatcagtttgttggcattaaatgtaccatttgcaaaaatgatgtcatttctgtgcttccaagtagtccatttctgtgcttccaagtagtccatgttactgcttacttaacccctatctaaagaggttgagagaatttgatagagaagaagagattgagattgaataagagatatattattccaacccaactaatgactgattacagatttgatatatagcagttacagttgcgtaactgctaactaactagagttagtgacagttttcacacagctgtcctaactaactactagtaaaactgacaacaataaaccaactactgattacagtagttagactaagaactaacagctaggaagtaaaaaactactttgagtaatgtatactccttatactatcatctcaagacaagtataggattatggcatactttattcttgttgttatgttcatattaccccttattaatttattatgctattatttggagtctcaattcattttctccttccttaccctaaaccctatcatctcaagacaagtataggattgacatactttattcttgttgttatgttcatttggtggtattttagagtatgtagaattctattccttaaattatccagaatctgataatagttagcataaatatctctgcatatgatataaaccaagattttacaacattttacagaatgatccttgtgtttctgtaggctgttgtccttgatttatttgatggtcaatattgtttttttgtttcacagtgttagta

SEQ ID NO: 2893 - DNA, 2514 bp, Glycine max
  Intron number 1 from transcript Glyma18g03980.2 (locus Gly ma18g03980) derived from phytozome v7.0 (chr-ID Gm18; pos 2751573 to 2754086 reverse strand)
cgtgtttctcgcggagaaatcttttgttttctgtggtaaataagctattggattgagttatctagttttgcaataagaggggttaagaggattgaagaaatttgaaaacttaagaaagttagagaatttcagacacgaagtgtttgacatgagttcggccctcaaatcatgagataaattgtgtttcaagtgtggattatgatagtagacactgcaagttttaaaaccatatcgatctatgcattgatttgaagttggaaatggactaagcttttgcaaaaaatttctgctatagctgctgtataatgaggacaatttgagctgcaaaaattggttttgggtgaaacaaaatttgttgggacgtttttgttgtaagtatctaactggaaattttcaacattcaatcttgggtacgaaattcataataaatttgagaacgtggttgtctgttttaagttttgatgagtcagcctactttaagagagaataacttgattcatacatatgattttgaagtggaaccaattttgttttaaagcttacatagttgattctggaaattttcagaatgtcttgatgactataaaattccctgcaaaccataatttcgtgaaattgactattctgttctgtattttgatgcagctaagtccaatttgaatgctcataacttgagccaggaaaattgtttttgattgaaccagtggggtttgaaagataataagttcttggtccattaagtttcagaattctttaaccacaggcccagggattgctcctggtgcataaaaatgcagaccatagtcgtgctgaattctgatgtaaatcagtctactttgaaggatcataagttgggtaaagaaactccaatttgtgtgatcctgagcttgttggaaagcttagaaaatctatttttggtggtaaaatatcagaatttatttcattgtaagtcaatcccagttgtggataaaagtggagtagtttagtaaggttttcaatttttatgctacaatttgaaatttacatgtattaggatgtgttgattcttatgatattttaaaacttgcatgctgtagtgtagtctatgatatataaaaatatcagttctttattcaatttgtattgagaatagtgtacttgcaaagtttttgtgttctagtaacaatgtgaagaaatatgatatgaaattgttggaatgtgatatgctgaatgacatgttattgtctgggatttgtttgaatgcaatttctatatgggttctatgttagaacacccacttttgctgaaacagagagaataaaactggcataatctgctttaccacagtgaaggaaataaatagcttgtgtgcatatggtatatttatttaagctactgggtgaacaaatccattagcaaaccgttgggcaaatggatcctttggcattcttctgaaattacagggtgaaggtgaacagaccctatattgtgataagcatgttatgcttgctaggctgagcttgccaattgaggcatggccctagatataatttggtcagtttagatttatctctagtttggactcatatacttattcattatagtatatataactattttggtgtaatggtgttattgatgctttggattttgtcaaattttaatgagaagtgagaacataactattttactttgaaaaagttatgaaaataatcagtgttatgagaaagtgatatgaaaaaggataattgtttgaatgtttacagtttacatgtatgcatgtgtgtattttgaggtgtcctcactgagtcttagtagactccctcttctaatagggatgtgaagaatgttgtattattccaattttatttattaagtctatactagttttgttaacccttttgatttgaattgctataaactatgacattaatgattttgtttcaaaaagttattattcatgaaggttattatcaagttttgcaaaagtgacttgtaaattaggaggaaatgataagctttggaattatgaagatgtctctactcttggctagtcatagacaatagatttggtccatgataataatggattaatatgaaggaaggatattgttagatatgaaatcattcattagcattcaagcaacggcttacattggtgcattattttgaaggtcttgtgtgcttaacttaatatatttttcataaactaagttctctcatggagttatattaatgataacgtttcctacttacaagatttacatcaagttttggaaatgagatttgtctgtgtggaataattatgcacggcctgataaatgtcgtttaggttctgttgttttacacatggatgtctcattgatgatctttttttttttttttgcacagatgtctgttgtgtttgacatgagttttgatgtccaattcagttttgttcatgttgatgctatctgtacgtaggttcctagttgcttggattgttcctctgggtggtggagactttgtgtatttttaaaatattgacaattcaaa

SEQ ID NO: 2894 - DNA, 5837 bp, Glycine max
  Intron number 1 from transcript Glyma13g07180.1 (locus Gly ma13g07180) derived from phytozome v7.0 (chr-ID Gm13; pos 7346460 to 7352296)
atttgcctcctttcaagggtaagttactaaacactctctcttctaaattctaaaatcatctacctgaaaattctaaaattctgcatccacaattattattattattactatcactactgtgattgtgatcacttgttggtttcccatttgcttttttgtcttttttctatttgatttttttaatacatcgctttggtgttacgtaatttggcatctgattacagaacaatactaataaatctttgcttttaacccaaaactttaaagtgaaaaataccttcattcagttatactcttttccttttcaatgacaatatccatactatatgggattttcataatagtgaaaagcaatcattattcttcgctgttacacatagagacttgtcaagagattatagccatcaataatgttcaacacccatccatataataaatctctaacttaacttctaattagaacattatttcagcaataaatcttgatttcaatactatttaacaaacttagttaatgtacacattattttaattattattgttattatttaaaataagtaaatttataaatattaattatttggatacaaaagtaacatgcatgtgatatataatgatcaagatagcatgcatgccaaaaggaatcgaatctttggtctgaaaaatctggcgatcacattgaatgtactgtagcatggcttgtcccgaacctggccacatgaaacagagtgtagtcagtgttcttcataatatgcccccagttcttgcttttgtctactttcgagttcccagcaattttttttattttataaaattagtacagcagagcgaggctgactctgaaatatacctgcacaacactcgggaattgagattgagagagttatttaaggttttttttttcttctatatttaatttttttttatcttctctcttttttttattattatcttttctcccaacgtatttcaattgttttttttttcttctgtgtcgttcacagcgatgttatctgatttgaacagaatttttttttatcaaaattatatgtggtctatataaaaaatatccttttttaaacaatacaatcctctcatttctttcttatcatttaattatatgtgatatccatcataatttttgtattttctttctcttttcttttaatttcttctttctattcacccattcctcttaatgagttttaaaacaagcattatattactatactatttatataatattatatttgtctgccatttttcaatatatgatttttttatcacattaattagcttgtcttatactattctctgttgttttttcttattttacttttttgttataaaaagagttgtttttattttgtttttttcattaagacagtatttattatttttagctgctaaaaaatgcaccatctcttaaattctttatttatagaaatgtattaggacttttttgagtaagattatccaaaagcatttctacaagaagaaaggaataaaaaatgaaatgagatgttaaaattagcttatggacaaattaattaattagtagaaattctctcgtataacttctttaaaaaaaatgagagaatttctattgtacatatgttaatatgagtttatacataaatttatttctttttcttcttatttttaaaaaatacaatttgtgttaacttattcataaacttttctgtcggtacatttaattaaatctctgcggatgacaacattaatataatgaagagatcaatcatgtcatcacctaatccagctcttaattaagtctacaactaattataattgttgagtcctaacaaggtccacgcgtagtagaacttgttgagacgtcacagttgaaagatatacacaaaggaaaaaaaacaaaatgcatgccactgcaatacttcataattcatattctagctttcttattcctcagtctcggtgatacttatctctttcggcatgtgagactagtttgaattcgtctagaacactgaattttttattgtaaatgtccaacaagttacatgactcaatttgatttattagcttatttattgtactagtattttaactgaagtttttttatattaaaatattctcataaactattactgtcactctgtcaggatgctcttataaattgctttgacctgttgttaaccaaattttcatgggatactactattattatgattattattattattattattggtttgggttggctaatattatcacaacttgatttagacttgagtcggtgagattacaaatgtttgaaataatatcaaatgagaattcttgtttaatttagaaatattactataaattgatttaagacatacaattatacatgaatagtcagcattaaaaattagttagtgattacatgatcatttaaaaaaattaaatatatttatcttttaattttgattatttaaatataatctaatagtcttattattattttcattttgtaaaataacgaagagttgttacttaataaattttagataaaattttgttcaatttattattgcattaatgaaaataaaaataaaaacacgagggaaccaaaagtgaactagagtctgaagtagttgttgactaatctaccaaaggaaggaaaacaactgatgcttactgttgtttgacaaatccaactaacaaatcctttgggcctaagttgttgtttgtatgtgaaaaatgaataattgcttttggaatcccagacgaaataatctgatgggggcccttaaattatttaagtagataactatgctaagaaattgaatgagtgattcacaaaaaaaaataaaaaatgaatgagtgtgtatgtgcatgtaacctaattttatgttgcaatgaattgatgttttaagatgatagagagaataaaacttttttttataacgtataattattccctctattacaaagcaattatatcgttttacgtattagctagcccttcatatgaagattgtctaaatcatgttattttctaatattaagaaagtatatattacttctttttttcaattttattcttttctttccgcacttataaatattttatcttgatatttgtaaaattaggttttcattatcctttaaggaaatataatattaagaatatataattttaataaaagaataatttaatcttatcattaacttttttctaaattttagaaatattattattatttttttatttttgggctagctctcccaaacgaaaattattttaaaataaaagcagtagatgaaagatagtattatgaaaagtgcattaaaattaaaacttattataaaaatatgtacctatttttttcatctcattttttatgtcactttctcatcacattacttattattatatttattaaattctttttttcctatttttctttttctttccgcccaatccatctaaaatgagttatactttttggtattttcctaattaaatacatatcgtaaagttagctgtcaaattctcttgtcattaacaaacaaaaatatagttatctatgggctggatccttcgagtgtgtaacatgcaccataatggggacctgtaagtttggctcgaattgcaatgattacaaatgtgatgttacttaaaaaaaatcaactctgtggaatgtttggggcctatgggctaagtttagaagatttaaaatcagtacatggtacatagtacatatagcatagaaatagacagcagtgagactccaattatagaaatatcaggttaaattaaacatgtctttaggggaaattgaaatttagggtgctctctcttgttcctttgctcctatctttgtcatgatcaaatgaaatattagtattacttaattaatttaaaacatagttaaagtaagaatatgtgtccttaccataaaaagaaaagaaagaggaagaatgtgtacttttacgtagttgataactttattgaaagttaaatgaagattaataatatcttaatagtgggaatggtgagtgatttcaatactttatattctcacggcaaatgcaatataattataacaatcaataaatattgagttttttctaaccagtgtcctgaaggtattattgttaaagaactaaaaataaaaaatatttattatgtaaatcataggaaattaaattaaatgtaaaaaaattatgagtataacctgatttttcatctctcaaaaaaaatatttctactttaaattttaattaataccttaaagcactggttaacatttatcataaatatttatgcagtaaaattttttataaattgatcaagatgtgaaacacacataaaataagaataaatagtcattttcgtcctcattgataaatttgttttcgaaaaatagaaattcaaatgttaatttccaaaagtaaaaaaagtataatttatcagcactctacatatttagggatggaaaagatcatttatccaaaatataatttaatgttcatatttcccctctttttttaatcgttgcaaacataacatcacaataaataattaaaaaataacaaaacaaatataagttacaacaaatataataataaacatactattgattaataagcataatttgtttattgttctaaaatatgagactcaaataaaagaacacactcattaagttaatccttacaaaataaatgagactcaactttattttatcactacttgtcacaatagatttcagaccaataggtcgattatgcttattaatcaatattatacttattattatgtttgttgtaactcatgcttgatttcctattttttaaattgattattgtaatattatgcttgcaacgattaaaaaaaaaagaaaatataaaaattaaattatatttgataaatagtgattttcgtcctttaatgtgcagagcgctaacaaattcgtacttgaatgtgtcacttaggctcgatctttcattaatagtaacggatagaagttaacaaatggatgaatttgtccactttttttacttttaaaaactaaaattgaacttttatctttcgagaataaatttatcaatcttttacatgtgtaggacaaaatggttatttaacccataaagtaattaacatacatgcactgtgtcaataaagattgatatggacccaattaacatatcttagacctactaattatggtttgattgaatatactgtgttgtgtgtatgaaaaacaaacacgtgtgccggaattgacaaatctcataattgtgggtcaagttgtattgtggtctggtttaaattttctttttatatgtgcgttaaaaaaattgtgtattcccatagctttgatagtaaatatcctaaattatatgtttgtatttgtctggaaacttttagcgtttcaggactctcgtttacttaaaaattagatacaaatagttttattaaaattaatttgtttaaaattacgtttcaatcagatacaattatttttggttatggcaataataataagtttaaaacttataacctcacataaattaatttaagtttcaaataagtatagaaattagctattagtgcttgattggaatcagttcaaataataataattatattacaattgtctaatgtaaattatcacaaacccaagttataattttttgaaaacagtgtaaccaaagtatttgaacaattttaatactttttttcctatactaacatctgcttgagccctctctttatgtcaacaagtaagctggacactcttttcttttttgcatttatttgaataaatttttaaaatttaattttctttaacttgtcaggtgga

SEQ ID NO: 2895 - DNA, 1572 bp, Glycine max
  Intron number 3 from transcript Glyma03g27110.1 (locus Gly ma03g27110) derived from phytozome v7.0 (chr-ID Gm03; pos 34640152 to 34641723 reverse strand)
cgtactggacaaagtcgcatttccattttccaaaggtattgtttatcaactcaatctaaatgtgattttttctgataagcccttaaaaatacaccccccccccccccccccccccccccaaagaaaaataaaaattatgaagctgaattcttatgatttgccgttgttgaattaaggtacagttattttaattttcaatttgtatttttgcgagtatttcataaaataatttccattacaatatatgtatttgggaaaaagtatgtgaaggtgtcgctatacatttttttctctttatttccttttccttttttaatgggtttattttttttgcatgaacaaaagtgttttataaaaaaaagttacaggaaaggcttattaacaaaagttacattaagtgctgctaggaaacattttgtggctgcattagaaaggtgtaggataggaaacattgttgcttggtggtgaagttattatacatattgggaaaaaatcaaagtcccacattgactagagataaggtcaagatagagtatataagtgaggtgcaactctcactctatgagttaacttttggggttgagttaagcccaaaatccacattctaagaatacagactatggtattgtgaactgtaagcttacaaatttagacttttaaggaaattgactggttctccatatatcatttcctcttttttgggtgcatctctggctaaactgtaaactgtttaaacgcatgaacaccaagagaaatgaatttgagaaaccttcatgaaaaatccatggtatctcttatttgtttctggtagattactgttacctgtaaaaaaacattatatcctctctttctaaagtatccatattcagtttttattcttccatttttgagtctttatttgtttattttttgctgttttttccaagttgtttcctttccaggaatcatagataaaacaaaaatttgattgtaggatactatattctcaacgagtaaatttgtcaactgtttttacctatttgcaagttctttctcaattagttagaatgaaattagccatactaggtaccatacatattatcattactggagaagttgattgttgaaatgacaattgttaatagtttccaaaacttcagatgagaacaaatggtgtgagcaaattttattgttctttttttttaaaaaaaaatcaaaaatatttttaaaaacagtattcaaagaggctccaaaatggttcttttctgttctaaatattttaaaatgtatcgtaaatcaattaatcaaatattgtgcccaaatgattgaaagatatggtttaagctctgccactgtgcttactgttaaggccaccttaagattaaacgcttctgttttccttgtcgtacatgtcattggaatttttaatgttgctttcttcaccttaactagaattcttttatttttaaattttgtcatggaaccatctaaactaagaattgtaaagccctattggcaattaacataggggtggtaaactgtgtttttattacttcagcctaattgatcgtgctcgaaggaccgtgcgaggat

SEQ ID NO: 2896 - DNA, 4128 bp, Glycine max
  Intron number 3 from transcript Glyma06g02550.1 (locus Gly ma06g02550) derived from phytozome v7.0 (chr-ID Gm06; pos 1703754 to 1707881 reverse strand)
cacttttggatatagtgactgctgcaaccatacaggtattcagatatttcaactttctgttataacaattgttcaggtttttttatgataaattaggctagatcataagacactggctctgtatttttaaggttaccatgggacaagattttgttttaaggttgctttctcagtttgagttaccatgtgatagataacaagaccagaggtccaaaagtaaaggaaagcagagaacaagctgaattatatctactctactgtactgataaaagttgggttaataatatgtgaaagatagatgaacaagaatataaaaatactgatggctcaggcagtttcaagagtgcccgattctctcccttcctaaacctttagcagttatcacacttttcatccccaagtcagcattgtagttaattgtgcacattagtggtagtagcactatcatgccatcatggcctcctgccactcctccaacccccatcatcatgtcacacgtggttatcttagctagacttgtgccttttgtggccaatcatgaccatcataggtgctacgcaggtgacatgttaagttcaattttgcccctgaaaccggtgttgttttacggttttattgggggcaaacttggaaacttgcctgtcctaataatctgttctcttgtgtttgtttatcacttcctttatcatcagtctgccctagcctctgttttctgttctgtgaacaaaccagccatgctcctcacctctgctctatctttctccacccgcacacttctgacacaactctttcagaccaactcacaccatgtagaactttggcacatcgttttgcactttttgttcacatctctctgctcatcagccatctcatgccctttcttgttgtacttttcttttcttttatattttctgacttttcttcttattaacttttgtatgtcttattgggataaggctttgttgttgttgttgttgttgtggtattatgacttttaactatacttgaatttaagtgtgaggaaatttcactcacatgactcttgatattcatgtttcagcttacaatttatagagtacaaagcataagagagagaaagggggaaaagacagcctagcctagtctatgtgacagcctagtctagtctatgtctgctgacttctaaaacaaggaaaaaatatttagtaatgatgcatacaaatctaatttagaaaccccaaaagatattcaacactccccctcaagctggagcatatagatcatatgcaccaagcttggaacaaatagactgaatcctaggtcctcgcaataacttagtcaaaatatctgctggctgatcattagagctaatgaactcagtgataatttctttggacaatagcttctcccgaatgaaatgacagtcaatttctatgtgtttggttctctcatgaaagactggatttgaagcaatatggagagcggcttggttatcacaatataacttcatctgcccaacttcacagaatctcaattcatgaagtagttgtttgatccacataagttcacatgtagccatggccatagatctatattcagcctctgcactggatcaggcaacaacagtttgcttcttgctcttccaagagatagcattccctccaatggaaacacaatatccggatgtggatctcctatccataggacaaccagcccaatctggatcacaatacccagatacttgtgtattacctttgtcttcataaagtaatccttgtcttgaagctctcttaatgtatctaagaatacgcataacaacattccaatgatcaacacgaggattttgcataaattggctcaccactccaacaacaaaggaaatatcaggtcttgtaatggtgagataaatgagtttttccacaagtcttctatatctctcgggatcaggacacatttcactctgatctgccaggagcttcagatttggatccataggactatcaacaggtctacaattctgcatgcctgtttcctccaaaatgtcaagggcatacttcctctgagagatcacaacaccatctcctgactgagtcacctcaataccaaggaagtacttcaaatatcccaggtctttggtctggaaatgactgaataagtgctcttttagctgaacaatcttagtagcatcattccctgtaatcactatatcatcaacgtatactatcaaataaacacatttcccaggggatgaatgacaataaaaaacagaatgatcagccttacttcatttcaacccaaaaagttgaacaatatgactgaatttaccaaaccaagcccgaggggattgcttcaacccatagagagatcgacacagcttacaaacaagaccatactccccctgagcaacaaacccaggaggttgctccatataaatcttctcctcaagatcaccatggaggaaagcattcttaatgtcaagctgatgaagaggccaataacgcatggctgccatagcaagaaacagacgagcagtggtgattttagccataggagaaaaggtgtcacaataatcaaggccataaatctgaatatagcctttagctaccgatcgagccttaagttgatcaaccttaccattaggcccaactttaactgcatagacccatctacaacccacagtcttcttgccaggtggaagaggaacaagttcccaagtaccattattttcaagggcctgcatttcatcaatcatagcctgtcgccatccaggatgactaagtgcctcatgaacattagaaggaacatggtgtgaggatacagagaaaacaaaggaagaatatgaaggagacaagcgatggtaactcaaaaacttataaataggatgagggttgcgagtggatcgagtaccttttcggatggcaatgggccaggctgaatcagagtgatgagagacaggtgaggaagcaggatccatggttggaggactagttggagaaggatgagaatcacgaggggagacgcagtgcttactgcgtgcttcttaattaataggatgccttcttcttctcttgataccaacttgaatttaagtgtgaggaaatttcactcacatgactcttgatattcatgtttcagcttacaatttatagagttcaaagcataagagagagaaagggggaaaagacagcctagccgagtctatgtgacagcctagtctagtctatgtctgctgacttctaaaacaaggaaaaaatatttagtaatgatgcatacaaatctaatttagaaaccccaaaagatattcaacaactattaatctgaacatgcctttaataatgcgtatttttatagcatttatatatgtaatactacctgtcccttaatataagactcttttaactaattcatactgtttaagaaagttggtttatttatttagaagtattaaatttgttagcaatttatattatttttcatacttatcgttagaattattgggactcatgatctctctctttctgcttaattactttctacctaattaattaatgtgtgttagcctttttctccaatctttgtaagagagagaatacatttatatttttaattcatagcatttattgtaaaagtaatttggggtattttagtaaaaaaataattaatgcaaaagacaacttgaagagagccttataaaaagggacaagcaaatttttaaagaagtcttatatttagggacggagtgacgaaggtagtataaatatttagtttacatctagattctagaaatttcataatagtggttatcctgctgtccgctatctcactgtaccagttttggggtctgctgctttgtgccactatctgggattttaataattattactctggttcatattcttaaaatcagttatagtatctgcaatgtctgcaataatagaaaaaatcgtctgttaacattatttatggtcgcctaaatctattttaattattaaattctacacaggttttctagttaaatagcttttcatttttccttttcttgggttctttggctacttatcaacaactaaattgttttaaatattgggattatatgatatatatgtcttaattacctttattttctttttcttaatgcagttcaaggaa

SEQ ID NO: 2897 - DNA, 6734 bp, Glycine max
  Intron number 1 from transcript Glyma04g34960.2 (locus Gly ma04g34960) derived from phytozome v7.0 (chr-ID Gm04; pos 41252843 to 41259576 reverse strand)
caacctctctttctcgtctccgtccgtgcaacctggtaagtcctccatttggtcctgctttgttcgtttccgtatcgtttctcacaaaattttcgaataacaaaaccttttcgttcttgctcctcaatttttcatttgaatttccagtgagtttgaaatcccaactaatttggttctgctgccaaatcaaattcgtcctccattgcgttggttaaacagcttgttaatgctattgttttggttgtggttatggctgttggggtttgtatcatgcggatctctaatctttgggttcagttttttaggaaaagaagggggaaatcggaggagataattagggaaagaatactattgttctaaatactggtaattttttaatcgagtctggaaggaagtgctttgaaggtttcgttttagttttagatagtgatgaaaatggggttttgtttcacgatgaagggactttctcctagaaaatggggttttgatttatgttggggacttcatctactgggatatggcttggtttcttaagtggtttttttgccaaaatatagccctgaaatattaagagtgtttgttttccttaccttgtaatgttaccaatgaaatgaacttttgtaaattgcacccaaatggcttctacaattcaaaaggagtttttctgctgttgtatccaaatgctgaaaatattctgcataacgggcttctaaaaacatttcaaaatcccagtggctttggcttgttcttttagaaggtaagaataaaattgctcaatgtcatacttccaggatttatctaaatctgtgttgagtttccaattaaaattttgtcagctataatttcttaaatgctcaagttttttttttcttaactcctgtttagagttaacagttccccgtaccccctttttttgaaaaaaatgttgatttttttggctgtaagtattctatttttgcagctaagttaatttacttatgatttgattcatatttaaagaatattcatatcaactagacaactatgtattgactgcaatgttcttggaagatgaagtttttctctcatggttttagaattcttgcaaacaagttgccgtaattggaggtttaaaacttctctagttcctagtgttaagtgctacttgtgtaatggaagaagactgaatatgggttgggctaaaatgaaaataatttttgaaaagttggtgaacacattttcagacaccatcggcttgaatttcttctagatagtttataatgctattgcttttggagtgttattgttttcagtttcactctacataatcttggcatgtaagcatttacgtttatgtgcaactgaaaacagtgcaaaaatgtctcccaaaacaagtaaatatctttttgggcctttttacctgttgtcaattatttgtagtttagacatgcaatacttttgtatttactgcacttttcatatttgggaacattctgatagaactcacagataaattgtatgaattaaacagtgtaaatggtaaagagaatgaaacggttttttgattaatggaaatattgggaaaactacagcaaatatccagagcaaatgctcctccagagaaaagattctcctcgtacaatgataacaataaacgtgcatgcccacaaacactactcctccccccatatattactcacggctaaccacttcctataattcagggatattcacggattccctttgccacaccactaacagaatggttccccaccttcttactcctacgaacgtacactctccacacagcaggattgggcctttcagcaggattgggcctttcattaatactaggcccagcagtggttctatcattgcctcccccagaagcaacagtcttgtcctcaagactgaaggagggaaattgacttttcagaactgattcgtcctcccaagtggtgtcttctatcgttcgtcccttccaacgcactaaccattgtcgcacgcgctgtccaccttccgtgaccgaccttgaagccaaaacttcttccggctcttctaagtcctctggctccacctctaatccttctggtaattgtggttcagctgaataattccctatagccttcttaagttgagatatatgaaacacagcatgaattctacttccttcaggcagcttcagcttataggacacagctcctactttcttaaggataggaaaagggccaaagtatcgtggagcaagtttttgattaatgcgtcgtgtcaccgtctgttgtcgatgaggtcgaagcttcagaaatacccactcaccaacctcaaacgaatactcctttctgttcttgtcagcatatcgcttcatctgttcctgtgctcgaatcaagtgatactttaattgacgtaaagcctcgtcacgatcaatcaactctgtagctacagcctccaccttagtttctccttgaagaaatctcaccacagtaggtggttttcttccatacactgtttcaaacggtgttgtacccgtagacacatgaaatgtggtattataccacaattctgcccaagaaatccatcgtgaccactccttcggttgttctgatgcaaaacaacgaagatatgcttccaaacaccgatttaccacctcggtttgcccatccgtttccgggtgataggaagaactcatactcaacaccgtcccttgcaaacggaataactctttccaaaataagctgacaaataaggggtcacggtcgctgacaatagattgaggcataccatgaagacgcaccacctccttggtgaaaatctcagccacctttcttgcggtgtatggatgctttaagggaataaagtgtccatacttagataatctatccactactacaaaaatagcctcatacccctttgattttggtagaccagttatgaagtccattgagatgtcatcccaaatccgctccggaattggtaatggctgcaacagacccatgggagaagatgcagaatatttttggcgttgacacacatcacaactctgcacaaatttctgaactgattttctcatccctacccaataaagatttccagctattcttcgatacgtgcgcaaaaaccccgaatggccaccagtagcggaagaatgaaattccttcaacattaaaggtatgcaatcagaacttgaagacaacaccaacctgttatgataaaacagccttccttttatcaattggaaccccggttgagaggtaggattttgttgtaaatcagtcaccactttttgcaaataaggatcattcctgacttcatgttgaatttgttgctcttgcaaacatatagggaatgaagttattccttttaattctacttcttcatgaatccttgatagtgcatcagcggctttattttcaggaccaggtttgtaaactacttcaaagtgatagcctagtaacttagctatccaattctgctgatcagctgtagtgatacgttgttgtagcaagtgacgtaagctcttctggtcagaatacaccacaaatcttcttcccaacaaataagggcgccaatgttgaacagccagcaccaatgccattaactctttctcatatgctgacttgctcagattatttttagataaagccttgctgaagtaagcgatgggtttctttttctgcattaataccgcaccaattcctctcccagatgcatcacattcaatctcgaaaggttgtgtaaaatctggaagggttaagaccggggcttgaatcataacgctctttaaattctcaaaggccttctgttcttctggtccccaatgaaacccatctttcttagttaactcggttaacggtttagctattttgccataaccaacaatgaatttccgatagtacccggtcaaccccaagaatcctctcactcctttaacattgtgagggattggccattctaaaatgctattagtcttagctggatctactgccaccccctgttcagaaattacatggcccagatattccacctttctactcgcaaaactgcacttcttttgattaactacaaaacagtgatgctgcaacacttctagcacttgagacaaatgtgctaaatgctcttgccaacttttactatatactaagatgtcgtcaaagaaaactaggacaaacttacggaggtgtggcttgaaaatctgattcataatggattggaaagtggccggtgcgtttgtcaatccaaacggcatcaccaagaattcgtaatgaccttcatgcgttcggaatgctgttttctgcacgtcttcttccttcactctaatctgatggtaaccggattttaaatccagtttagaaaaatacttagtcccatgtaactcatccaatagttcatccaccacaggtatagggtatcggtccggaactgtgaccttattcagctccctataatcgatacacatcctccatgaatcatctttcttcttaactaaaatgacaggacttgaaaaagcactggaactgtttcgaatgataccttgactcaacatatcttgaacttgcctttcaatctcccccttgtggtgatgagggtaacgatagggccttacactaactggtcctgcctccttttgtagttcaatggtatgattaatctcccgttctggcggcagccctttgtgctcttcgaaaactcctttgaatttgctcaacaattcatcaagttcctgtttctgtgccccaatcaactctggtgtgtctttattcactgctggtaccatctctgcttctaacaagctgtgcaaggaatccattgaagtatgaattgtgttgttcgttgatacatcctgggtggtgaaaaattggccctgcaactctaccctttctccttcccaaacaaaactaatggtcattttctcccaatcgaaagtcacctttccaaacctttgtaaccaagccactcccaagatcatatctagatcacccaattccagaacaaaagcatcaatttgagtggtaaacttacccaaatgtacttccatattcctacatctcccctttgttgttactcggtgaccgtcacccaattttactcccatggatcttccatgttccacatttaaccccaatgcagtggccacatgaggtgaaacgaaattatgactggcgccactatcaattaggaccacaatcgatattccattcaaacttcccttgaggcgtagtgtagtaggagggttattgctcaatgttgtttttgattcagtgattccacacaatcccatagagttgcaatctagcacttcttcctcatcttccttaacttcaatggctattacctcaccttcttcattaatgatagaaccattgctgggcctagtattaatgaaaggcccaatcctgctgaaaggcccaatcctgctgacccacttcctttccaattgcgtggcccaccaacaccacccctaggcaataacgacccacgcatctccgtctccacatcacgagcaatcttcatcgcctgagttcttgaacgtggattcagtgtccgcaccttcagtcgaatatccgtcttgagtcctcccatgaagtaacccaagtactgctcctctggtagtctccctacctgtgacgacacatactcaaaagcagtgatgtactcatccaccgtccctgtttgctgcaaatctttcatttcttcgtaagggttatcactttgccttccaccatacctctccattaaggcttgtttcagcttcaaccacgtcaggtcgtcctctgtctcccttaacaagttgaaccaatgaattgtagctccttccatacttagcttcgccagtctaatcttcacttcttctgatgtaccttgaacctcaaagtacgtttcagcacgcgtgatccatcccactgggtcttcaccatcaaacgatggtaattccaccttcttcactgccatccgatattctgacatcgtctcttccgccgccgacgacaccggagttgtttcaggctcacggcgaaaacttgcaaactcttctgtcaaggtgttacggaattctgtaaacgtttgacgaaaagtttcttccaacgccgatactcgctcttcaaacgtcttctccatggatgttacccgatcctccaactcgtccagtcttgtcatcttctttggcataaatcacccttcactggttcctttcgaacgatccggcaggtcggaccaatgatagaactcacagataaattgtatgaattaaacagtgtaaatggtaaagagaatgaaacggttttttgattaatggaaatattgggaaaactacagcaaatatccagagcaaatgctcctccagagaaaagattctcctcgtacaatgataacaataaacgtgcatgcccacaaacactactcctccccccatatattactcacggctaaccacttcctataattcagggatattcacggattccctttgccacaccactaacagaatggttccccaccttcttactcctacgaacgtacactctccacacagcaggattgggcctttcagcaggattgggcctttcattaatactaggcccagcagtggttctatcacattctacaaagttattgtggaataggatttcatttgaacacctgcttttccatttatactacttcaagcggtagcagtagcattgttaggctacaccttttttttctctgccttgtgatgaggtaaaatctcacaaatattataactttgatctagggaagca

SEQ ID NO: 2898 - DNA, 2588 bp, Glycine max
  Intron number 4 from transcript Glyma19g37980.2 (locus Gly ma19g37980) derived from phytozome v7.0 (chr-ID Gm19; pos 45036837 to 45039424)
tcctcgtcttttggggcctggtttaaataaggcaggcaagttgattgccttgctatttgctcttgtttggttctgcgtaaaatatgtgagttctcaaaccaaataatgtcaataagagaaataccgcagaagctataaactgtagcttctgttgtgacacacgcccgattgggtaaaacaatcaaatagaacagtttcagtgtttcctgtttgtgttcttagcttggttccagaactttccttcacttatcttgaagaaacggtgtttcttttggcttctttggttgtcttttatgatatgcattgggatttagggagaacttattgatcacattctctgtatttatatccctgcaactttgtcaagagtagacgaatattgcactgatgataatactaaggacaggtgaatcctcaaaaataaaaacaattcagctttcaaccttggaaatttatgttgattaaaagttttgattgcctatccttaagttgcagaatgtccactaatggattctttgtttattatttttgccttgtaatttcttacaattgtgaaggtgttaggatataaggagaaggaagagttaattaatatagttagactactaacgagtgagttagttagttagttagaggagtttattagatataaatagaggaagaaggataggagagagcgggatcttatcatttgtagattgagcattagctctttgtgaatggagagttcctttgtgaagggaaacccttggaggagagtttttctcctattttctgtctttttcttactagtcaataaaatcttttattttcttcctcatttcaattcttggttcctaacaaattggtccgacctgccggatcttcaaggggaagctagtgttagagatggaggaagcgcaaatttgggctaagaaggtggagctgccagcgttcataggaacatacccaattggttggattgctaggactgaaaaattctttgaggtacaagaaattccttcgttccataagctgcaatatgcattcatgagcatgaagggtgctgcgacacattggttctacatttggagccaaaacaacccagattcagattgggagtcattttccacacctttgatcaaaagattcggagatcgccatggtaaccacatctttgaaagattgagtatcttgaagcaagaaaagccaactgaaacagaaacccacatcaaaaaatgggagacttccacaaagttcttgaaagggaggaccaacatttcagagtggaaacacatgttgtgcaagatattgaatgaagaagttgattcacatgcttctcaacaagacaaaaatagcatggagggaagtgggtcagaattcagtgaagcaaaggctagttcttgggcaagaaaggtggaactacccagctttgatagaagcatagaagggggaactgatttgaagggtagcagttttgagtgtgacaatgacccattgcagttcttgaaatcagaaaacaaaagtaaagaagttcagtaatcaagaaccactccctttgtggtggagaagaaaccaaaaatgattaagcaaagttagcaagagaaaaaaagattgaaaaggttatggaggaagaagttgatccattgataaagagggagaagcacaaggaaaatggagtgacgaatgtgggctgcgaagacgattttcttgataacccaattacagatttgatcaagaaggaagtcgaaactggtgattcaaccaagccacattgttttcaagattcagatttccataaaaagattgttattgtgaaacaaaaatcattcatgaaggtggttggaacaacaatggtgctggaatcttggaatgtcaacttgttggatgagcctttagcattaaattttgttgcatctatggctgacagcttagccatggagctaaggcagaaggaatgtactaagccagtcaagctgattaaagttatatggagtccacccttgttcctcccaccaccgaagccaccagacctcagtttgcatgcaggggcagtgggtcgttcctagttaagctacaaggggtgcaattgtcttccagcaatcaaacaaaactttaggaagtttcagtgtgcaattccagttttcagattccaaccttgaggacaaggttgatttttaagagagatgtattgttaggatataaggagaaggaagagttagttaatatagttagactactaatgggttagttagttagttagaggggtttattagatataaatagaggaagaaggataggagagagggagatcttatcatttgtagattgaattgtgaaaggagaaatcctttgtgaaggggaaacccttggaggagagttttctctcctattttctattcttttcttactagtcaataaaatcttttattttcttccccatttcaatttttggttcctaacagaaggttgcatattaatgtggctgtgatggttgaaacttcagttcttgtactttttgattgataccctattgtttatctgctatatgactgtatgagcacatgaatgcaggtaaatttccaacattagtgactcatcaggagtcc

SEQ ID NO: 2899 - DNA, 1385 bp, Glycine max
  Intron number 1 from transcript Glyma03g19840.1 (locus Gly ma03g19840) derived from phytozome v7.0 (chr-ID Gm03; pos 25188117 to 25189501)
ttgttgttattatagtcctcgaattgtgtttttcggtaaatcctgcgctgttttgaactaattgtatatatgggctcagtttttgtagattttgacaacagaattgagttgctcgtgtttgaaaacatagggtttatttaaaattttcatgaaatggagttctacaactcttggaatttagaaaccaagtttgtgaactttataggtcaagtgcagggaatttttgaaatatgaccaaacgggagtgaatttggaggattttgagtccaaaactgaatttcttacattcaataacctttagaaacctatatggtttgtcccaattggatttccacatcaataggaacgttgattttaaaagtaagtaattaagtgcaattccaaatgagaaagtgtcttatatgtgtagatgtgcatgaaaaatatgatatgaattagtgaatgaattgcttgttttgattgagaattattatgtggaattgttatgattaaatgttgtaagaccaagtgagtgtgatcacttggcaagacatgtttcatgatatgaactgttatgatattgatcatgaactgttgtactttaggattgggtctggggtgtccgaccactaagtgttatttgttattagaatgtctcatgatgaattaatattttggattggtagttatgaatgtgcaagtggtcttgttcacttaaaaggccattttgatgatgaccctagagaggattatttcccctcttctcttgtaatgtttgtgtgtgtgtacacaacgaaggatacttgtagtcagggacatcatgaggatagacatgcagtacaaggaaattgcagaagaatgaggtaatgtgtttgtgttagagttagagggattgttgaattgggagttggtgcatgaccttatactcaattggaatagatactctaatttatattcactagtatcaacgcatcattgtttatacttctcatcatgaagaatgagcgagaattcgttaagtgaaggtggatgatacacagtaggaacactgggggacgattcaaatggttcaaaggaatttggggaaatgttgagtggtgataatcggactaagggcatttttcggttagattgggggactcattcgcctcatcacttggcattcctaactagaatagagttgtaaccatggttggtgagaacgtcatgtcatgtatcggcatgtgacatgtcctcccaatcgtcatctatatgttgcataagaccatgaaagctgggaggcttagtggtagtgttgggcccaaggtaagaataatgagagagaagaatgcagaataagatgtcatgagtgatgtttactaggttatgtgtgggacttaatgttcgtgtttgtggttttgaaaggg

SEQ ID NO: 2900 - DNA, 1177 bp, Glycine max
  Intron number 8 from transcript Glyma15g16470.3 (locus Gly ma15g16470) derived from phytozome v7.0 (chr-ID Gm15; pos 12774922 to 12776098)
cagtgagtaccaagaaggtattattccttattattctgtagttttctttatttttggttggtagagttgtcctctcctgcaataatcattgaaaagactgatatgcttgatttttaaatcctaagtctcagtattgaagtatttaaaattcttactcaatagtggactgatggtaaataaataagatgaagtgataattttcaactttggtgtagattaccttactgttcacatatcatggcatgaagttttctgtcttcaattaatttatgaaacactgtttcagatgctaagagaatgtaaaagggatttctgtcaggttatcttgaatatttcatttacaactaaagaagtgcaaatatatgtttataacgctgaaatgtgtttaggaatattttctacacaactgttggagccatggtttgtatgaattagttttattgctggaggatgtgtcatgtgccacatttccgactaaagaagagcagattaatgcttataacttgaaattgtatttaaaaatattttatacgtagacagctagagccacatggatatgatttattgacctctcttaagtcttaacacagggtgtatgtgaatttgttctattgccatgtgacatggagaaacaatctgtgtttttgtatatacatggaaatcagtagctctttaactgctatttaccaaggaaaacaagtataaaaatcataacagtagtaaattaataattatatattatattatatgttgtgatttagagaccattgtatcagtattctgcaatcattgaacgagacagagacatgtatacgtttacaattttggtgatttgtgataattgtttgggaaaaataaaggaaagacacaaagttggtcttcctcatcatgagaaaacctgagatctcatcgcattcaattccagaagttactggacatgtatgtgttttggtctacactgatgttactaactggttctgtagtagtagtagtagtagtagctcttctcctggcattttgttgtttcaatattctcatttctcgagcaaatttgtttctaattaatagtgaatcatggaacaatttaagtttgctgctgagtgctgacacttctgttaccctttaaattaaaatgtttacaggcggagaaaaaggatattgttggtttacaggagca

SEQ ID NO: 2901 - DNA, 5772 bp, Glycine max
  Intron number 4 from transcript Glyma15g26120.1 (locus Gly ma15g26120) derived from phytozome v7.0 (chr-ID Gm15; pos 27583234 to 27589005)
ttagaggaaagaactatctaaaagataattctaaggtgagttaaccatttaaattcattgagtatatgttggaatcatgggacatgattatggtgtggtttgccttcctaaacaaatgataatgatgatgataccaacagatttgaagacttgtgatatattcaaatcaataagtgttttaattctttggagtgagatttgtgagtgaacttactatagtataaaataaaagggtgataaacatttagttagtgattttttttatcaaatttaagtatgaaaaaggtgatggtactcacaaaccaagaaggggctgggtgaattggttttcgaaacaaagtaaacttttaaaaccagagttgcaaaaacatcttttgtacggatcgtctcacaaaactttcataaaccaaacttaatcaatcaaccctttacacaagatcattgttaaagttctttcttccgaaaagatattttcttgaatctttagtaaactgattaagactagaatgagaaagaaagataagatcaacagaagaaatacacaatctttttatactggttcactctctatcactagagaagctaatccagttatctaatccaaactcaaattagattttcactatgtatatagaattcttacaagcaatcaaaagcaatctcagttcccatcccagaaaaagggacttaggcacccaacactagggtcctctgtgaataagagcctaagagaaacctacccttagcccaaactagaaacacttattctagcatgctttcaaaaactcatgcacaaacaagagatgtgtaaaaccatacatgaaaactagagtcaaagatagacacaacctgatcaatcctttctgcaaaaccttgcttgactgaataaggtggcttcttgaactcaagaaagtaatacaactcacttatcacaaaatatcttcaccatcaaaagattttaagttatgagttacttttttctaagcactttattctcttctttctttaactaataacaacacgtgatccaagctcttcaaaagctcaaaatgttgtgttgttagagagaacacaaggtggttatttatagagaaaataattataatttcctgtaatcgattaaatctataatgtgatcgattaattgaatgatgtaatcgattagattatctttttaatccattaaagtgttcttcccaaaaactggaaacaactcaagaacaatgtaatagaatagatacctaaagaaatcgattatatcacattgtagtcgattaaagtagagactcttgaataaatcaatcaatgtctcaaaaataattgtgtaatcgattataataaggctgtaattgattaaactgataaaaaatgtatctgtgcaagctcaagacaacttgtgtaatcgattacgataaggataaggctgcaatcgactgaaaaaaaaatagtttttccttatgaataattaataatgtttgaacaattaacaactcactatttactttcttaataaacaatgttttgtcaaattggtctctagtgaaagattactcaattagaaaactgctcaatctatcataccatgaccttggtgcttgtttcaatccatatagatccttttccagtctatatgaacagattcttccacacttagagttttcctattgaatactcactatgctttactatgcaatgagtaaccaagaaaaatagtctcatcggcctttgcatcaaatttaccaagactctttaccgttgttttaaacaaaacatttgcaaccaaaaaatcttaggtgagatatatttggttttcttcctttatatagttcataaggagctttctttaaaataggtgtaataagtactatgttcaaagtgtagcaaatagtatgtatagtgtcagcccaaaagtacttaggtaactttgtatcatttagaaggtttcatgcacgttcttcaagggatctatttttcctctccacaacaccattttgttggggtgttcttggagcagaaaaattgttgtgaattctattttcttcgcaaaagttttcaaaagacttattttgaaattcagcttgatgattacttctaagtgaaacaacgtcgggacctttttccttttgaataaccttggcaagtttgcgaaaagcatcaaaagcttcatttttggttttcaaaaacaaagtccatgtgaaccttgagtaatcatctactataactaagccatagtaattaccacccaaactcattgttctatagggaccaaataaatcaatgtgaagtagttcaaggggttttgaggtagaaacaatgtttttaatttgaaaagatattttaacttgcttccctttttgacaagcttcacacaatttatttttttcaaacttgagttttggaagacaaattactaagtcttttctaactaaatgatgcatgttcaatgtttaacatatagatattacatatccttttgccaatatggacaatctcaccagacatagctttactaataagacaacaattcttgttgaaatcaattttgaagcctttgtcacatggttgattaatgctcttgaggttatgctttagtccatcatcatatagaacattctttatctgtgttttgtactgatttccaatatttccttctcttataattttccctttattgttgtctctaaaaataacatatcctccttcttttgagataaagttagtgagtttgaacttgtcacccgtcatgtgcctagagcaactatccaagtaccatagtgagtcccttgcttttaggcacacctacaagacaaaatcaatgatagagaggtggtacctaatttaagttgggtccaatggggttaattttcacaaataaatcttttgtaattcaaatacattttcctctaggaacatcaaatctcctaacatagcatttatatgatgtatgtcctcttttcatgcaataatgacaggtctttaaatttttcttagaatgcactatgttcttcttttgaggatacaaactcagttttcttggaaaaggtagtttgcttattataccctaaaccagtcttattagtagtatgcttttgcacactgagcatgtgattgagatcattctttcctttgtttagttttctaaaacgatctttaagacaggaaagctcagtttgcaacttcataagttcagcatagtgatcctttttgagattttcaaattcaatttgcaaagacttgtaatcatccatgttaaaagaagtaaaggtactatcacaactaggggctttatagcttgaaaaaactttctcattttcttgctttaatttatccagctcactctgtgttgaagccaatttagtgagatgtaattttagattgctttttagctttttgtttaacacaacaagcctttgagcttcttcatgtatttcattaaatgcttccaaaacttcttcaagtttaggatttaccttagtttcttcaatggttgatgagtcatccattgactttcccattaagcatacatttgctacttcttcatcactagaagagtcgaaggatgtagatgcattatcttcccacgctgtgtaggctttcttttgttttctgtccttctttcctttcttttcaccaacttgttttcttaggtagataggacattcaaatttgatgcgaccttagttaccacatttgaagcatgtgaagttgttgttgttgttgttctcaattttcatggaggatttagagaattttttgtctttggacttgagaaattttccaaacttctttaccattaggttgaaattctctgccttttcctcactgttggaactgtccttgtaatcttcctttgaggagttaactttgagtggaattccttttcttttcttttctatttcttctacatgagattgttgaatcatttcatgttcatatgcaagcaatttactgatgagagcttccatcatcatatattgtagctaagtccttggattccttgattgttgtaatctttgattcccaagttcttgttagactattgaggatcttgatgttcagctcatcatcttcaaacattttcccagaccaaggagatgattcacaatatgagtgaatctttggtttatccattcttaattcagaacgcttcatattcggatacaagagtgtgctttcttgctcttctcacatccactatgccttcatgagtgacttcaagcttatttcgaatttcctttgcacttttccaccttgaagtatgaaagaattcatcaaaagataaaccaaaagttaagatgtttttagcttttttatcatctttcaactcatcccattctttaggtaccaattcaccattcacttctttagttggtataaaaggacctttaacaatggtattccatgcacgggatcatttgattgaataaagatttgcattctcttttgccaaaaagaaaaatgttcatcctttatatgaatagattcctacccaaaaaaaggagacttaggcacccaacacaagggtcctctgtgaataagagcctaagagaaacctacccttagcccaaactagaaacacctattctagcttgctttcagaattcatgcacaaataagtcatgggtaaaaccatacacggaaaactggagtcaaagatagatacaacctgatcaatcctttccacaaaaccttgcttgactgaataaggtggcttcttgaactcaagaaagtaacacaactcacttatcacaatcaaaagatttgaagttgtgagttactgtttctaagcacttttcttctcttctttctttaactaataacaacaagtgatccaagctcttcaaaagatcaaaatgttgtgttgttagagatagcacaagttggttatttatagagaaaacaactataactggctgtaatcaattaaatctacaaggtaatcaatcaattcaatgatgtaatcgattagattatcattttaatcgattaaattgttcttctcaaaaattggaaagaacataagaacaatgtaatcaattagatactcaaagtaatcaattaaagtgttcttgttcacttctgaaacacttatagaaagggaagtaatcgattatatgacatggtaatcgattaaagtagagactcttgaataaatcagtcattatctcaaaaacaattgtgtaatcgattatgataagactataattggttaaaccaatatgagacataattctacaagcttaagataacttgtgtaattgattacaataaggctgtaatcgattaaaaaagagagtttttccttctgaagaaattttttatctttagaaattttattctccctcactcataataaggcatgatgcacaaaagatatgatatggactaagattcaacattcaatataacaatcaatataaataccactcaagagttgagcatgtaaaagacaaaaattcttcaaacttcaagctccaagcttaagtcttcatgttgctccctctatctctaacaaagtatagcattagtaaagcatcaaattttggtttgtcccttaattttttttcgatgattaaaaattataacattttaggcatattggtaattcaaacaccaatatttgaaagaactaaatctttatatcttaatctatggaaaaagtgatgacaaagggcgttatatattattattttttttggctaaatgtcatggatatcatatgatatatctcatgcaggtaattggaggtgaccctcttctcaagctcatagc

SEQ ID NO: 2902 - DNA, 2694 bp, Glycine max
  Intron number 2 from transcript Glyma07g00330.1 (locus Gly ma07g00330) derived from phytozome v7.0 (chr-ID Gm07; pos 128582 to 131275)
aaattgcaggtcctctcttctttcttcctcctttggtaagtactcactactcactacattagtttatcatcgtgtttctcttttattaattccatctcataaataacaaaactaaatccatttgattccagttttgcttaggagtaaaactaattcaaatgaatcaatcatattactgaatcatgttagtgtacaaacacgcgcgcattcaccttacctacttttatgtttctcttgtaagctactttatgttacttctgccttaattaataacatcctaaacatttttttggattatttgtctctttaattctattatagtcattttttcatttcgtatagtttatattttagtttttttttattcttagtttatattttaattttttttaattttgaaagtgatatttttagttcctataatttatattttaattatcttttaattcatggtaaataaaatataaaaataattaattataaattcttaactattttttattacaaattatcttgcaataaattaattataaattatttgttaatatttttataattaattataataaaaaatattaattatattttgatgataatgactaaaataaaattaaaatataaaatacaagattaaaaaaaactactttaaaattatatggattaaaatagaattaaaatgtaaattataaagaataaaaatatcattttcttttacctaaatgaaaaaaaaaattaaaatataaattataaggattaaaatattattttcaaataactaaaaagtataaattataaaattataaagaataaataaataattattttctttttgtttcaagatatcctaaacatacgcttcattgttatatatatatataatccaaataaaaccaatatgaccagtttaagctagtgggtaggcgcatattaaaataaaaaacacgaattattattattattattattattattattattattattattattattattattattattatatgttttaaagaactctgtcctcaatcattgtctaatataagttatttgttcatcaacaatcgagatagtaatcaaatcagttagaaatgttgatattgcattttatatcaatgtttatatgcttttattgtttaatctttacatcttcaaatttatttaagatatgaggacaaaataaataaaatgaaaggcatgttgggataagaagaaatttttaattagcaaaaaaatagttatttctaaaataattttttattttattcgattaaatttttttacaacaaaatttagatataaatatctagatttttttgtttgattctttaatttaaatgaaaattttatctcactaatttatgtcaatatttaatgtaaacttttatcatgtaaatgattgatgtaaaattctaattttgattacaataatataaaaaaaagactgtttcgtaggtttgacgtttttaatacattttaaaattttacgtcaaatcaatattagatgcgcaaaattcagattggacgtggatctacacgcacgtagcgttaatgacgagggtgttggcataaataagaaatatacaaaaatgaaagacgtcactatcattatctaaaatggatagtttacaggcttgttgatcataataatttattggattaattagtttttttttagtatttataaaattttaaatttcaagtattagtctctataaaaaaaattatttagtctcattaattttattgctcgtattaatttctgagctaaaattttctcttattgcctattcttagatccttctctctggactaattataaacaataaaaataaacaatacacccaaaaattagaggcagttctttatgtcaattctatacaataaatcctcagtaagctcatagtatactcttttaaaaaaatacaagtaatcactttcgtattctctgaccaaatttactatcaatttaatttttaaataataataattattagagagtatagataaattagctgatgatgcatgtctgggatatatcaattttgtgaatattaaaaataaaataaaattatacattgataaaataagataataattttacatcatcataacaaatcattattatgataagtttattaatttttataataactatcttaataatcatactaataatgaattataactatcttaataattcatatgaacaatgaattataattattagatgtaatgtaaaattattttagattgtcagtacattgattattaaatttttatttttattttttttaaagaaattagaaaattgaaattaaattaaatatgcagcttaggtaataaaaaaattaatatccttggtctcttttttacggaactaaacttataaaagaatgaaatagggatttattcattaacagaataattcaggtcatcattttatgccatactcgaccattaaatgaacataaaaacttagttattgtacatgaaattgaaaatgatcactataattaagaatccaaaattattttcattttttgtttgctcacaagtactcctcttttttacataatcatgaaatatctcagatattttgaacatcatatatataaaattcaagttcattatgcatatgcaataacaaacattaatttttacttgttgaaaatattgcaggttttttgt

SEQ ID NO: 2903 - DNA, 3060 bp, Glycine max
  Intron number 1 from transcript Glyma11g35300.1 (locus Gly ma11g35300) derived from phytozome v7.0 (chr-ID Gm11; pos 36985111 to 36988170)
acgatttcaatagccccatcaaatctcaggtcatttctctatactcctctttctttccccagaaaaataatatttaagcaaggtttttaatccttttcttcaggatctcatacaatttgccccatgatttgtttggcttaatagaaacaaataagagaaaggtaatcaaatactttgaaactttgaatgtgttttttttgttagtgtttgaatgtttttatttttagagaaaaaaaattatatgataaaaagttttatagtattatctaatcataattatatattttaaatttattaatttttataataattattcaactataaattataattataggacaatgtaaaaaatccattaatctcttatctcttattctacaaagcagtttatagcaaagtttaacgtaaaatattctattcaacatatattatttaatgttttttaaactcaaaattaattttagaccttatattatttttttaatgtgagaccaatcatgttcatatttacctactaaaatacattaattagtattttaacttgattttgaacccaaacacagatgttctgaaagtgtaaaaattagaatttgatatatttatgaattttattataatttattaatactatacgcagttttttaacattattattaaattatagatagattagctcatggttagattttttgtgtgttgaaagtcatatggttagattgtttatttatgtaataattattttaaaaattatatttaacttgacttttgattagttaatagtgttaaaatctttctattaataattataagaaatatttttatatttattatatagcgttaatttatatactttaagtaaagtatctaacagaaatttgtctttttactatattgtattaataaatattataacatgataaataaatattttttattaaatatttgtgtaggctcttggatttgaggattataatgctagaagaatcaaattctttatgtagttgtaataaaaaagaaaaaaaaatctttatggttttattattgctaataaaacagtttggtaaagcaagtttttttttttggttgtctgatgggttaagtgaagctagttaatggagttatcttgcttgagttgttttgagtcctagttaacttttattacgtaataacaggagtaactttaaatatttttgcacaattgggggctttggggcatccattcttaaacactaaaactattttttaaggaaatttattaaatataattaaaatgagtatttaaattaagcttagtcaaataaacactaaaccatctataatgcgttattctaatttttattcatttgcctccttattttgccatctaatgggacccatgttaactaaagaagatcgaagcaaaatgttactactgttttaaacatatgaaactgggaatagcatgagcttgtgggaattttttggagtcccactagaaagtcagatgtttacagtgattaaaataaataaaattgagactcatcttatgtgttcgggaaaagtttaatagaacctaacgcttgtcaacttcaatccaacactttttttttttttttttccgttcagtgtttaggaaagtgcaaacgaacattcttaggctttgaattttttttttcctgagtttcttaggctttgaaatggtaacctaaatgtagtatactctattttcatttatttacttattttctttcttatttctaacaatcttatttctttccttcttaacaaacacatcctaagagagaatttttttcacttgttgagggagtagtgtgtaaaatgtatctgccaaagagaaaagaaagcgaatgttatgtttatttgagagtagtatatggagaattgtgtgttctaaattgtaatatatatttcaggagtataattaattttgacgtgagattcatagttttttttaaatatatatgtatatatacttaaaaatattgctttcaaattctcttaatattaatttttgaaattaattctttcaaaattttaggatgggtttggctgtgtagaagaggaaagaatggaagaaaagtgtagagaaatatttgaattaaaataaagagattctctctggtggaactcacaaaattttgatttttttttctttattctcttatttcttcactaccaaacatacagtaaagaatgaaattatgaaatttactttatctttcccgtttttactttagggacagtttctttattacttgattccatcataagtggcaaaattgacattgcaagtatttatataaatatcttacaaacattgaatatagggccctggcctagtctatatcgttcattgcaattctcagataataaatcctgatatattaatcataggattttgttttgtcttctgtgtgtatatcgtgtaggggacaagtttacaatatgtatcatgaatcatgaatatgatgccataataaatcccaactaaaaagcagatcgagaattttaataaggaatagatggagaaatcaatagaaagcagaagccatgatgatttcaattacgaaaataagaatgcacacgttgagtttacttgtattagttgtatatactatgcattagcccaatcagcattatatagtcatccactgcaagaatctctcttcaattggatcttacatttgaaattgtaacatttcatttgttcatgttgtgacaatgatatatgaacaatcaaaagctatacacttgaactcgtgtttaaaattaaatcttcaatatctttatctttgttaaaacccatttgcagctttagaaagccaacaggaacagaaaaatatataagaaaggaattcattcaataaatcaacttcaagattagtggtgtattatttatttattttggtgaatttagtagtcttattcttttgcatatagtatggatgttgtctacccattttaatgggggagtacttttggattttgatgcatattcaaacgaacaatgattcggatattttcttgacaatacgaatggtatcttattccaggtacatc

SEQ ID NO: 2904 - DNA, 2295 bp, Glycine max
  Intron number 1 from transcript Glyma12g01360.1 (locus Gly ma12g01360) derived from phytozome v7.0 (chr-ID Gm12; pos 812192 to 814486 reverse strand)
tgacgccgaacaaaagcgcaagaagctccaggcacgtattcattccaattccaatacctcacagtagatcaaaatccgattgcttttgctcctttacaaatttccgtttttcataacattggtagcgtgaaatgaaagctagttttaagtgtaattaagttcttattaaaccagttacgtacatcatgatttagaaaccctgtaattttttttagctataatcatcatgcatgtacgcaaatttatcttaataataaaatcttacatgatccgtaccggagaattaattcctcctaaaataaacagatcagacgtatctttcttcacacggtttcccgaaattcattttttcttcttgaaagcctaattttcttccgccatatcaaaatcacagccttttaagtttactaggattttgtcaaaacttaaagggttttgtttagttattgaaaaattctctctttcacctactttctctgtggaggtatttaaacttatttaattattgattaaaaaataacagtagcatattcaaacataggaattgagtctgatagaagggttagtgcatgtttgcttgggtgttttgtatgcacatggcttcaatctttccacgtttaaatcaaattttaggtggaagctacaaggttaggaggaggagctacttccatttgacgtgaagaatcgcatctcaaaattcaaactaaaaatatgctactttagtttctcacaatttaattaataaatctgttgaaaaatatgttcatatttagtgtttaatcacatctgcaaattggattgtctaaaaaaaactttctcccataagaattaatgtagaagaaatttcctaactttctccttgaatttttccgtctgcttttcacacacctacctcgacttgagaattcaatttttatgaaaattaaaaatgagagtgacggacattgaaatttcttgttttatgaatcaagtttctcgaaagcttaactgactcaatatattgcatcaagtaccgttcaaacaaattagtctcaatctttcaaagataggcaaacttttttcataccggttgccatagtcgggaaacaatttgatatagtcaaatcaaatggctgtcaataggatggcacatgttctccaccatccacctacatgttaaagcttctaatctttatctttttgtctcgttgaattgtagtttttcaacataaagctcgtctttttgtgcttcctagttctacatatattctaattgtttccattatgaaactcaaacaaaacaaaattagttgcatgacgaaattaagatatcatgcatacgtatatctttaagttaacccatgcaaccatgcatgaccacttgttctatcatatgctatatgcaatgtaaaacagcaaagattcgtgttactaccctactttgagtcattttcttctttgtcttgggtgcctattctttagtctttggtgctaccctactagtgtttctatcattttcggtgtatttccaaagcaacttcacttggtcgtactgattttataaaatttatcataatcataatatttatattactattaattacaaaaaaatgacatgagttgtatgcttaggatttgtaagaaatttcatacaactcctggcctagcaaatcaataaaattatgttatataccgtcctgattaatttgacaactgtcatctcaattttgtatttgttaggaaacagatacaacaacaaatcacacataattgttatatctggtgctttgagtaatttaaatttcttttcctacttcgttaggcaattggttcatgtacattctttaaaaaaaaggcaattggtttatgtacataacttacctttcattgaaattactgtatgatagaactgctatattaccatttaatgtgtgatagaaaaagagggtgtatttctctgctttcgtttcaagttgattttaattataattgtgatatgtaccagtattttcaattttcaaatatctcgttcttcagagccataacaacttatcgtctgatctaaccctcatgatgctttatcagcttgagggtgaagacgatagattatacttattgaatttaaaattattctccaacattattagctaaactatcatagtttttggacttatttatttaagggtagtaatatatagacactcatatatcacaaacactcctttgatattctttatttttttatttatgtttttcttcttattcattatatcactttttcttttttttctcttttttttttaggtgccaaacagc

SEQ ID NO: 2905 - DNA, 739 bp, Glycine max
  Intron number 1 from transcript Glyma07g04760.1 (locus Gly ma07g04760) derived from phytozome v7.0 (chr-ID Gm07; pos 3511264 to 3512002 reverse strand)
cgaggtgttagaagtccaacctcaaatgtgaatgtgcaagatgctaatgaagaaagaaaaggaaatgattttgagaatggtgtagatagtaagaaggtggcatctgcaaaagtaaaacttaagaaattacaggtcaggtatgattcttatcttggatttgcattttttaagtctcaagaatttatggttttagaatttggcctttatatagttatagtgtggtctggatttaaaagcagcatggcaacaactataactggcccctagaatgaaaattataaagaatttaaataaacagaataacagatgacttttataaccagttgaataaattatttgaccaaatactatacttgttttaaccaataacttacctattgttagccgcttaactacctatacctagttgcaacaatgtcataaaccttgttcattataagcagatttctagttaaataagtttgacatgttttttggtgaataaataagtttgacatttataatggaaagtgatgtacagtgtgtctctagcattgctctcacaagtaagatttttctccaacaatgattaaataagtcaaagctgcggaagtacacattaccataaagggaatattcagttagacaaaaatgtagtgtgacataacaaacatatgaagaatgaggatagaaaaagtaattccattatctttattttttgtttgccctggaactgaaaacaattcagctgcaaagttca

SEQ ID NO: 2906 - DNA, 2033 bp, Glycine max
  Intron number 1 from transcript Glyma01g23830.1 (locus Gly ma01g23830) derived from phytozome v7.0 (chr-ID Gm01; pos 30834452 to 30836484)
aaccagcctcaccagatcttttacctccatttccagtaagcttctcttttccccccttttctgccaattatattacgcaaaactttatccttatcttcgctcacatttatttatttacttttttttttatttcttcttcataaataaacataacaagttggcttcgtatgacacatggttcactcgattaataacaaacgattttattagctttgtgtaatttactattgcaagctctgtcattttttcatgttattgtgtctgatagcacgaccgtttcttcttcttcgaatcttgcgttttggattttatctttctttctggcttttcgagtttttgtttcggttttttgtgacataatttggaattttgagcttgaagtgaaaataatggtatttatgctgtgtgttgagttgaacttagatttcaaattggggaattgtgatgggaaaggaaccaaattcaactttatattgttagggatttgatctgcatagtgattgtttcttgattcagcttcttgccgatctttaatatgctctcttcaatttataatggacctatattcttgtatgttagatattagtggaaattactttaaggcagataggttctgttggttttttcgttgtagaccatttagtggacgtcacgagtaagacgagacaagttattgtaaaacatgatgtagacttgggaatattttttcttttgtagatagaggcatatgcttgtttgactaatggaaatgggtttgtaatagtttaatctttgagaacttactctttttaaagccttgttaaaaggacttaggtatcttctaagttctaaccaaggctaaagaatatgtaagcagtttgcttattctgattctattttttttatacttaaattgctgtcgattatttgtctacacctgaatttaagttcctctacgtgagtggagtctctttcatggtatttttgtagttattattatttgtttagggattgtttgaggggaggggaggggaggtagccctttccgtgtttggttcatgaggggaggagagggattttaaaaattaatttacttttgtatccttataattttaaatttcaagacataagatattttagttacttgaaaagttttaaatcccctctccctccccttcaaagtccaaatctgcccaatattggaggggataaaaaattgaacaaggagggattttgctcccctcccctcttcgaaattgaaaagatcagtctcagttagtatgaatgcctaaagataattaatatgaattgtttttgtttgctgctcgaagtacattattcacttggagctctgcaaacacacacgagtgtgcacacttccacacacaaaacaaattaaaagggatttaattagccaggagtgtcctaaccgaaatctagttattggtcttgagattgtttacaccttttatcttatgataataattatagataccatttataaacttttcaagtagttaatggctatgttttccaggcattatttgtatggatactttgggggatgccatgtagagagggctgggggatatgtattctgttgcaatgatttggattggcctgaattagttttctaataatatgatattttctaccactaagtattcattcttttcataccaaaataaacacatttgcacttatatgactgtatctttaacaacacttgttccataattcatatcctaactacaaatatgtattttcttaattcataacaagttgggaaaaatgtgagttcacttcctgttctctctagttggaaatggggtttttccattattgtggtatactctgttttgggagagttcctattttctcttgcattgtattccatgtctctctcaatgaatttttcttttatgtatttgttttaagaataaaaacatttcaaattgtggtaccagtagtttgcatggttgttcttaaaagttgtattaacactatgaacttttgcaggtgcatcacaccttagcttcaagccatcacaagtt

SEQ ID NO: 2907 - DNA, 1562 bp, Glycine max
  Intron number 3 from transcript Glyma03g35790.1 (locus Gly ma03g35790) derived from phytozome v7.0 (chr-ID Gm03; pos 42896253 to 42897814)
aaactggagtggtatgattcttagtttttaacacgctttcagctatttacatgtttcaattcattgggtgctgtggtaggagccatgagggggtatacacaatgctaactgctgtgtttttcattttgctttctcaattgatgtgggaaataaatatgagatgtatgcaagagtgtgttgggaactcacgttgacttgtaatgtggcctaaatagtgtatataagtagggagtaactgattcgggttagaatgaagctcctttcaagtaggagtgaactccagaaaaataagagagaaaaggtaaattagaaggctaactttgcatgtaaattcattgctccctttctatcattcattacaagagtatatataacagtatgccacaccgtagaacaaaaatgcaataacagaaagcatatcagaatgctcaaatgctttctagaaccctactgacttatatacttgtgcctaacaatagacacaactattataatactctattgggcctaacaatagaacttgggtcgtaacagtaactcttaccccgatgaactaacttttgaagattagtaactctcacccccatgagtctatcctagtgattgttgttggatgtaatgatctatcaagtcacttgtaatcagttgttattggacaacctgcagtggcagatgtttaatcttgcaaacttcacgttgcccagttttgacatgaggagtgtgtgttggagattctacattgattagtgatatgtcaaaataatatatataaccttgtgagctagtttttggaattgagttaggctcaaaccctaattctaagggagtaatttgaactctaagaagggaataatatgtagaggggtttgaggaacactctcttgttggttaaaattattgaaaacttggttgatacactcttccatgttggttaaaatttattgaaaactacaaaatcaagagaggttattatcatttctcatgtatgtgttgatttcatcatgccctgatgaaaaaaaatacaggttgcttcatctacataccattgccatcctacttttcttaatcataacataaaacttggttgatacatccttattccaagtctactagaaatttggaactttggaagagtaagcatgggttgaacttgaatgggcccagaaatgtggttggatcactcttatattcaaggagtaataagggagaaatgtggttggaaggcttggggagatggagggagtagggatctgcaccaggacttgggacacagattattgtttggggagattgggagcaaagggttgagaagttaggcaacaattgagtgctctggcacttggaaccccttcttatctttctccagatcatttcttttttgtagttgttaacattgttatgcattttcccaggtctcccttgtattcatgaactagtttgccaatacatatactcctattattagtccctgatacaaacttgataataaattcctaatttagatttatggatttgtaattgaaacaggttgaatcaaagaaatttggtcttcttgcaaattg

SEQ ID NO: 2908 - DNA, 1253 bp, Glycine max
  Intron number 3 from transcript Glyma18g07970.1 (locus Gly ma18g07970) derived from phytozome v7.0 (chr-ID Gm18; pos 6707040 to 6708292 reverse strand)
ctgttaatttgcataagggtaagttcttacaatttcaatttcaacagcaccaacatgattcatatcgtgttatatttgttttgtttgttagtactatttccatgtacatgttatctgttttgatcacttcaatttgtgcgtgatctgataagataaagtggaggaaatcatggatgaagtttcttttcttgttgccttatattaacaaataaaattgtggtgaatgtgatggtgataagggaaaacgtggctttgacttggaccaatggtaacgtgagtgagtgtgatgtgtcccgtatctaactagttcagttgtgtcacggcaaccatatcctctgcttctgttgtgtgcagattgagatcacaatcgatccttttgaatgcttccacatggatcttgctcattacactttcatcattctctctctcttcattaggccacacggaaccacataaaaaagatagagaaatcattcactgcttgaaagtgatattcattttcttaatattttacttggctctaccaataatatatttcagtatctcttatacagaattttcctttaagaatttatttggtaccgcacgtatataaaatatatttgagttataagcctataacaaagaacaatgagctattagattcaataattctttaacaatacaataacaaaaggtaggcatgaaatccttattataagggcatggtgattttttgaggttataatatatttttatttttctaccagaaagaaaaaaatattgccttcttaatcatcaactgttgatgctgagttaaaaaattaagagaattatacaagttacctttactaatttaatagtgagatatatcctcacaaggttaacattgtagttatgattaatgagaggtcgggtgaaaggcatcatggtgatggtggtggtgataatgaaagcaatggcagatgagccatggtgatattgatagttgtgcggagctatggtaggttagaagttactctttaattagtgaacatagttcttttggcttctttcctttcatagcattgaagcttaacatgtattagtgtcagtttaccaagtgttaaaatttcatctagtaagttttttatatcaattttgatcaaatatgctagcatatttggaacagcatcttgatatgtttctagtggcaaaactgctctacggatgatcctaattggatggttacattgcaggggaagggaatagtcgcttctgtgctgtttttgtga

SEQ ID NO: 2909 - DNA, 404 bp, Glycine max
  Intron number 5 from transcript Glyma15g10620.1 (locus Gly ma15g10620) derived from phytozome v7.0 (chr-ID Gm15; pos 7710847 to 7711250)
tggataactgtaagggttcaacttgatgttctttacattatgtggttcttgtgtcatggttaagtggtcttattaccagttacctgccacaatattggactaataaactgtatggttctttgttctgctcattattctgggcagtttttgctaaattttgctgattgagatgcttatttgtgctctaatctactaattagtatttactatataccatctgatacatattccctcttttaatttgatgattctagaacttgatacttcaactaaaatagaagaaaatttgctttccctcatttttcaagtttttacggactttgatttgttaactttttttctcctgatttcattttttctttctcttttatggaccaaccagttattgaaagactctttggagt

SEQ ID NO: 2910 - DNA, 4263 bp, Glycine max
  Intron number 1 from transcript Glyma08g28580.1 (locus Gly ma08g28580) derived from phytozome v7.0 (chr-ID Gm08; pos 22898404 to 22902666)
atttgccttttatcaagggtaagtctctcttctgcctaattacttagatgaaaattagatgcttccatggttataaagtttcgagttaaattgttaacttttacgagttcatttattttgtgtgaattaatttgtctgtaaacttttttataataaatgttgggtagactcaggaaattctaaataaattcgggaatttaccaacgagtcaataaattaaaaaaatataagtcattttgagttatcttttgtctgtttagtgttcaacataccttcttttagtatgttattttcaaatcgaaaaattctcagtactaataatatcaaatatttattctttaataacatcaaaccctcgataggaatgttctaacactactataacatatgtaagttttattatccagtaggaatgcattactagacttgattatttaactattatgaaatttataatttactattttactttattatattgttgaaatgtttaattgatatgttatttatagatattttgttattatttttatataaagtggattcttaccgatctacaaattgagtatagaattttcacgagtctatttatactctcgagtttgataatttggatgcttttatcgataattacttttctttcttttttacttttctctctctaacattttcaaccaactattatatatatatatatatatatatatatatatatatatatatatatatatatatatatatatatatatatgttttattgtttcttaattaatattttttttttatcttatggtaagagtactgcgattctttgaagtaaatttttgatccattgagagcatatcagctagttatagcttgttgttttgttttcttaaagatcttttaatttgaaaaaaaaatgtttttcatttataatttataaaaacatgaattatttttttatcttgctgttttcctaacttattatacaaataaattaaaaataagaactcaaatattattggaaggagtctcatttgaacgcttgaccctagtttgagagaatattattatttttttcatctagacaaaataatacttaaaaagaaaaaactaaacttgtaaactttaggctaaactttaaaattagtttagaatctgatcacatgacaagactatctttacctgaaattcagagccataaatattaaatatcttaataattgaataatatctttatggaaatctaaggttcgtaaatttttaaatttaaaaattcgaagtggagtagatgggatttcaaatctgtggacagacatccttactattcttctaatgtctgtagactcgtgaagattagacgtcaataaggttttaaccaaaattacccataaattattatcttaactttatcttcaacatattatttcaccaataattaaaccttattttttgaaagctatgtaatatatacacttaatcagtacgcattgggtttgctccaagtgtctttatcccaactcttattataacgatgagttgttatccatataataatatgctataacactttttataatatcatgattttttttcatcacatcattcatcttattaaatatctcttttttttttgttcttatctctttttcattttacaattttttatgaaaaaatataaatacaataccttatccttttacttgtagctggttagttcacctaagcccattatgacattcaactaattcaaggattaggtaaatgatcaaatggaagtaacatgcatgaaagcatcaagcatgcatgccgaggaaatcgaatcttttcccgggaaaatgtgtcaatcacattcaccgcaccctgtcctcctcgtctgtgtctaccacatgaaattaagaaaatgtctaaccttaaattagtgacggtaaattccttcaccaaaatcatctaagtttatcacttcagtgatagtaattcgtttcactaagaaaagattcagtattctatactgaaaaagaaaaaaaggtgtccgtctaattcttgacccttcaagtatatatactagtacctaactagctaaacttaaattagtccaaaattcaaaacgagatttaaaaaattctcatatctaaaaattactataccaaactttgatgtctcaactatactcaattgtactcccacaatcagcctatgcacgaagctactctgacatgacttagtcactgttggtggtagtagtatttttctttctgttggcctcctctttagaatatacgagtattatgaagagtctgtgtcaacttgcacttcagtttgcaataattgttccaagtcctgccaaactagaaagtagaaatggttgagaattgagctttcacatttaattatacgatggcgttaaaacataattattaagagaaatttatggaagaaactaaataaagaatgtagaaaactcatataatttagtactatgacacacataaaatgtacctaacatgtaaagaacgtgttatagagtatttactagcatttctcctgaatgacacaagggaaaagaaaacacatggtgacccagcttcttgttgttttatgtcagattgtcttttgacattccaaccaatatgcatagggctattagctaagtggttgtttgaatagtataattattatactgcgtttggttgtttttataaaacagttctgagtttgtcttcatccctttttacaatattccttctaaattgtttttgacaataaatgctttttttcttctataaaaatacttttaagtaggtatgtacgtagtattattatagctagatagatagtagagagtgattatttctatagctttagcataattctgaaaattatgtaaatatgagggtctgtgtataagaacaaagtaattaccaaaatcaagcagttagggggatttgctatataggttaagttgtaacatcaaattctatctaaaagaaaaagagagagaacaaaaggtggtctggagagctcaataattatttattgaagctcaaccaaaataatagatctggttgagaggtcacatttctgaaaaaagaaaaaactagaaatgcttttgtccacgtcaaatactcttgataatattacgacttcgcattgggctaagtcgttaattggttgaatatgaaattaatgccgaattaaagcttgcccaactaaatccatatatgcatggacaaaatttcttattagttagtttttgaagaaaatccaagatgagggaccggatgggaccactcaattattttatttactctaaataaaaaagtgaatatgtcataatgtattattggcattagcgtaatgcattattaatgagattagctattcatttatgtcttttgtggaaaagttcacatgtaaacaatgtagctatgagctggatcctccgagtttgtaacatacagggtttccttcttttcactggaaacagaaaaacatgacttaagatacacctatatatatataataaaggtggccaaaaggaatggttctataagtgattttacacatagaataatttgagaatttggacagtgtttaagagtttaaaagtatagtagtacatatagtacgaagatggctgaaagagaggactcctcgcataaaactaaaagaatatgattttgaaacttaaaaaacttttacaagtgacctgttgcttgactgtatataattttgcaatactttattataacacgtctttataatatatatttttttgtttatctacattatactactttatttttatcttatatgtctctatttttttgttgcaaaattatttgagaagcttatgtaaaaatagcattagttactcttaattgaatggatctgaatagtttcttcaagtttgaattttcttttgtaaacagcgtatataattaagctaataaaaaatttgataaattattgttgttgttattagcaaatgaaaaaaaaaaacatatatcaattaaatattatatcacctcaaattattgtacaataacaaacatttcaaagaaacgacacgtagcttttgtttggtaccaaatgatgctttatttgatgaactaccttatttaccattcttgctccttacttttatggggggaggtgtaatttacaggagagaggtgtaatgttccttacttttattttgtttagcaaaattgcatctttcattttgttccttagtacaaccattcactaatcaattttttaaaaaacttctcaggtgga

SEQ ID NO: 2911 - DNA, 1456 bp, Glycine max
  Intron number 11 from transcript Glyma14g01920.1 (locus Gl yma14g01920) derived from phytozome v7.0 (chr-ID Gm14; pos 1119989 to 1121444)
actcaaaggtaaatgcttgtgcttaatctttactttgtttcttttaaatatatttttaaataactgaaagtgaagcatatattgaattcctccatctttactctgtttcacccaaataaagaaacaaaggatcttttttattctgcactctttgttcaacaacagttttgtgtggaatatttatttgacctgactgcataatctttgtatacctttctcggttatttttattgtctaagaactatcaacaatttagatgctgacaaatctactgtttaatggctactggtggtgctttgctaaaagtccagcttgtgttttaggctatctattttcatggcttcagatttatataattcaaatcagttaaaaagtttcacgttttttcaagtaatacaacatgaacgaactttatagtgtaaattaacagaatttccagaagtatagaaagaggtcaaactattgagatggatctgtttttatttgaggaatgtgggtttacgatgttatttcataactaggaagtcttgtttggtataaataaataaaagtaaataaattgttcttggccatgttcaatgttcaaatacaaactcttcaaagcatcatagtgtaaatatgagtacgaaattaaagtaaatgagagggtaagcagtaatgatgtgtaaacgtgataataatgcatgtaagtacaagaaaggttctgggaagatgtcaagatagaattcaactttgttagcaaaacagagatcagtatacaatttaagctaggtttgattctgaggttgcatgtaattctacacataatttctgggtaactgataaaaactaactcagactgaagatagaaaatgatttgtatgctgaatactaacactcaaaagtctcaaactactgatatcagtcggatatcacatcaatactatccataacatggacttgaagaggaacgttgaacacaaattatgaaaagaaatacagatagttccatacaaattatagtccagcctagtagattatttatcaacatcttaacctttttgataaacaaaatgcagcaaaaaaatctcttttgggagttgtaagtgggcattctagatttgattgtgttaaataatttcatttagtatattattcgtgttaggatgccctcagtagccagagtgcaagttctgccaggaagaaaaaacaaaattatacattctgttcaattctatcattcctataagtttagtgtacattgcttactcttaatgtttaactgttcaagtcattgtctctaacagcagtaggacattaatgcactttgaatttagatattatcgcctaattatgcatttgattgttgatgactataactatttgtttgctaatttttcatttaagaacgtttttacattctgtcctggtgattcctacaggaggagatacagaaaaaaactggctacatagtaat

SEQ ID NO: 2912 - DNA, 1412 bp, Glycine max
  Intron number 2 from transcript Glyma08g14790.1 (locus Gly ma08g14790) derived from phytozome v7.0 (chr-ID Gm08; pos 10774643 to 10776054)
gtccaagctcaacagcacccagcagtgcattgaaagtatcctttttttggaaaattactaagaaaaaaagttgataaatttgtttactcagtaaatgtgcttttttttgtatacattatgtaattatttgctttgcttcatcaaattgggatatgtatgttgggggggtggaagtgattctgtatatgttgcaatcaattctggaaggtgtgtgatatttggcgtgttaatttgggatttggtctcggaataaataccattgctgtaattggaattactgtattcgtttataatatgcaattatatcttcaggtgttatggtaattgtgaactaggtcaatcttttcagtttgtacgtgatttctaaagtgggaagaactaaagaactactaaattgtgactggttctgtgaattacacgtgtattgttgccctagaaattagaattgtatgttattgattctttttcgtgtttgaatggcttgaacatcttaccaattttgttttgtgaaatttctgaaagttaatgttgttcttaggataggcaaagtaggaagataaataaaatacatcataggccaaaaaccattgggcaaattcttgtcaagtttggaagtagcactagaattgctaagcaaccataggactaggagggagcttttatttgtaaagtcacatgttgtactaaagtcatgctaaaagttatggagtattatttaaaacgcagatgtttttcagtgtttcatgtgatccatatgccaaggagatgaacaagttaatggccatattaatttgattttttacaatgagtgtaattctgcacagttgcttctttggtttattactgttttgcttcagctgtgggaagttctagaaggtctgtccttcttttagacctacaaggaattgactcttaaacattttaatgccatccattgtcttcctcgtgtatttttctttcttcttttttttacgcattttactgttccttttctctctctctctctctctctctctctctctctctatgatttgggacctgcagtgacacccactattgatcagaacaatgtccatcttgaaaaggatttgtctagtgcagtggcatccctagcttttggagaacttatttatctttctatcactaagtcagatgtttgatgcatcaaaattttgttgcactcacagttttaagctgaacttgttagggcttggccaatgtaacttggagtgtgagtttctgaattagtatttttgcatggattttgtctttagtttaaaagtggtttagttttgctgcttactattaagttgactgtttaaaatgcatgaattagttgttgatgccatatactgtgatccttaatttttttaatagctttatcacattggtgtatatttcaccgaagcaaa

SEQ ID NO: 2913 - DNA, 1124 bp, Glycine max
  Intron number 1 from transcript Glyma02g18380.2 (locus Gly ma02g18380) derived from phytozome v7.0 (chr-ID Gm02; pos 17173172 to 17174295 reverse strand)
aagtcgattaatatttacagagtgaagattttatttttctttctttctttggaagataaagaatgggttctaagtccgaaaccgtttgcgttactggggcttctggttacatcggatcatggcttgtcatgagactcatcgagcgtggctataccgttcgagccaccgtactcgacccaggtctgattcttaatttcatcaacttaatttcttcttattctctaaattcacctgtttaaattatcaagataatatacatcaggagtgctctttgctctttattacgaaaatatttagtatgaatttgcacatgaataaattataagatttgatttagtgattgaaaagataatttaagagtttaagagagagtcatagaagaagaagattctaagttcgaatttatccactaacacaatcaagtttctttacgaaatccgaattcgtactattcagtgtctttgaatatataatataacgtgttatatgtagtttatagcaatgaaatgataattatacgggagatgtgggaaattagttttatatataattagttatattatgaaggtggatgaaaggaataaaattaattgtatattagaataatttaggaataaaaaatatatataataaaatggataattgttataaatgaatacttatttttcttttagttatatgcatacaattgaatatatgcgaaattattaagggtaaaataggcaaaaataacatgaaatcaaatggggttataagattattgattttattataagtatagaagcgtaaattattaataatatacatgattagtatagaactatagaatattacagagtcaatcaccaattttgaaaatataataaccagtcatcaagttggttcttaaaattaatatagtggaaaaatggtctttaaaattatatattattaatcaatttagtttttgagattgtaataaacagtcaaattggtgtctaaaatataataaaattaaaaaataattcctaaagttgtaaattattatttgtatagattattacattacattaatgcttatgcatgtgccctgcagctgatatgagggaggtgaagcatttgctggatctgccaggtgcagagag

SEQ ID NO: 2914 - DNA, 7987 bp, Glycine max
  Intron number 10 from transcript Glyma20g25180.1 (locus Gl yma20g25180) derived from phytozome v7.0 (chr-ID Gm20; pos 34928312 to 34936298 reverse strand)
aagtgacagacagatacacaaaagaaaaacaatctgtacgtacacttcctatttgtgctacggctgcaacaccaatgtatatctagaaatacatgcatttgcatgattttaatattaattttgcccacagcttagttgataattagttgaaaaaattgtatctgttccattaagttgtggcaagctagacctgccacaaatttttctcacttggctggccaaaaataggatcaataatcagtagtgattataaatgtataattaaaaagggtggtgggggaggctcgaccaagaaaagggaaaaaggaaacaatccaactgttgtgccataagatgcccagattttatctttaatatacattatcacgtgatgatgatgtattcaatttcaaagaattaactattttaataataaacctgttagtgagcccctaaataaaatagttattgaatcttcccttgttaagcaacaggatgtggtcaactagtcatgttggagaaagacataatttaatcataattagtaggtcttagaataaattattttgggtctttatctaatactaaaaaattacatccttcctctattatgaccatattttgctactcaatgatacagtaggatccaaattctagttactttggcttgaagcatcaagcatgaacaatgtacagtcccactcagaccttgggctgaaattatagtttccaggcaactagcagatcctatcactcggttgatgatgttcctttgccaattaaagaacccctactcctagagaaattattaggtagtctgggactgttatggtcctaactaatctccatgtgacatattttttttttttgcacgacaaatatcaatatattatatatgaaattcagtactaggtgtactgaaaatacaatgataaagacaaggcatatacagtctaaaccccactaggaggaatcaatagacaggccacaatacaatacaaacccagcccctctaggaaaaagcatccttcaaattagttgaccagaaattaaaatgcagttggaagcccttctccacacacttaagccaggaccaagtgtggaataaggcatcatccatgaccttttcaggattaaaaggctggttattgaaaaccatgccatttctgtgatgccaaatggacaaggacagagctatccacaggaattcccatctcttgattgtacaagtttgcctattccactgagagaattgcaaaaagtgattctttgggtctatggggagaggacccactctattaacccatctcattggctcccaccaaagactcctagtcttggagcagttgaacataagatgattgaccgattcttcttcatgctcacatagagggcagctgtatgaatgcaatgtcacttgcctccttctgagattatccctagtaggaagcctgttcttgaatagtctccaagaaaaagcactcgctcttgggggaattttcattctccacataatcttggaggccctgtcttcattagcattattatgagcctcctgcagcactttgtaggcagactgtgttgaaaatagaccattagggtcaggcttccaccaaaggaaatccctgctggattgatggatgtggccagactcaatctcagctaggagagcagctaccatgtcaatttcatgattaaaaaaattccttctccatgttagcttccattcccatctgtcctccacaaaatcccccatagaattgattgaagaagtctgctgtttgcttattaaatatagattaggatattttgcttggagattataattgtcccctagccacttatccttccagaaactgattttggagccacatcccaccctccactttaggttattgagaaagcaattgttgtgctgctgctgaaagatagtctttaggtcctgccaccatggggaagagaatttactctttccaccagagatcagctccttccacccaccatatttggagagtaaaattctagtccaaggttgattgtgattattagccagctcccacccccatttgccaagtagagcctcattaaatttagataaatctttaatccctaggccccctttgttcttaggaaggaaaactgtgtcccacttcacccaaggaatcttactagcctcttgatgacctccccaaaggaaatttctctggatggaaacaatcttgtgcaccactttattgagaatcttaaagaaagatagtaaatagataggtaaggctgataagactgaattaatgagagtgattctgccccccatagataaacttctttgcttccattttgcaagtttggcttcaaacttccttataataggctgccacacgatccagctcttagaagacacccctattggaattccaagataagaaaaaggaaaatccatattactgcagttgaggaattgagctgcatccctgcaccaacttccagatttacccagacaaccaaagtggcttttagaatagtttatcttgaggccagaagcctcttcaaagcacctcagaatacattttaaagttctaacattatgctgagtggcatctctaaaaaacagagtatcatcagcatattggaagatgttcacttcctcttttaaagatcccacttggtagcttctgaaaagattcttggacacagctgacctcatcaaacctgtgagaccttccactacaatattgaagagaagaggtgcaaggggatcaccttgccttagacctctcttaggagcaaattccttagaagggcttccattaattaaaatggatatggttgcagtggacaaacaaccattaatccatttcctccacctttcacaaaagcccatcctcatgagcatgtagtcaagaaaaccccaagaaaccgaatcatatgccttttcaaaatccgctttgaagaccatgcaaggtttatttctagccttggcctcagctaaagcctcattggcaatcaaaacaccatgaagaatgtgcctccccttcataaaagccgtctgcctttcatctataagatgaggtaacacaagggccaacctcttggccaaaactttagccacaattttatagacacaccctataagggagatgggtctataatcattgaaagactgagggtcattaagctttgggatgagggctatgaatgaagcattggttcctgttggaaaggatccattgatgtaaaattcatccatgaacctgatgaaatctggtttcaaaatctcccagaaatgcttaatgaaattgaaatttaagtcatccgggccaggacttttgtcccccccacaatcccaaactgctgatttgatctccaattcagaaaatctagacacaaggctttctttatctcttagatcaagagaagagaactggacaccatccaaggttggtctactagaacattcctccgaaaatctgtccttgaaatagaggatagctgcatttttaacactgcaaggttcatgtacccacacaccatctatggagataccttgaataacattttttcttcttctatgattgatcaatctatggaaataggtagagttgttgtccccttcttttaaccacttaattctagccttctgtctcaacatagattcatatgcataagctacatcccacaattggacttgaagggatttcttgagagtcacttccacttgagatagaggtctgtcatttaatccggtctctaaagcattcaactcctttttaatattctggacttttctagcattaacttcaccatttgataagctccactgctttaaacattgtttaaggagttttattttatgattcagaacatatcctccccagtccccatccaggagggtgataattgccccattgctgctccactagatgctggaaccccttatccttcaaccaccaatccataaccttgaaaggttttggcccccaatcaatgttctttgacttcaagaggatagggcagtggtcagagtagtccctgtcaagcacaaactgagtagaatgaggccattgcaccaaccagtcatcggataagaggaacctgcccaatctactcatagcactgccattaggtctacaccaagtgaatcttctcccaacagacctaacctcctctaaagccatatctgaaatccaagaattgaattcataaatgctagagtcaaaacccgctgactgagctgagctcactctctcatcttggtgccttatagagttgaagtcacctaatacacaccagaggcctgcttgagaagctgtcttcagctgaagaatctcatcccattgctgtctcttcccttgtagatcacagggagcataaacattgattatggatactctcttattatctttaatccacagcccttccaacagaataaatcctctccccactacctttttgtcaactgaaaaagaatcattattccatatgcaaatgaggccaccaacagcattaattgaaggtgcacattccgaagaagcattacagtcagcccataaatactgacatagccttctatcaatagactccatttttgtttcttggatgcaaagaacatcaagattgttggtcaatgtcaactttctaatggctgaccttttgacaccactacccagccctctagaattgaaagataaaatattcatgaggcaatattatcctttcccatcatagctggtgaagctgctgcattctcactaatatccttgacaatcttcgtgttatcagaagagggcttatgctcatcaaaggataggcccaaatgtctggctaattcctggtggaagtcctcctcagcctctaaaaaaactttgttaaaactgcttgaaggagtggggctgagacagagctggacctgatttggagccacctcagctgcatccacaccccctgacacgtcatcttccttatgtatagtgtcactatctgcaaagtccagaggtggtggcttgttgtcgtcccttctggtcttagaagcaagtattttatttatatgggccaaagaatttcttcctgcaccctcctttcttctagagtaaacttttaagttaaaaactgtttcctctccatttgatattgggtcattggtaatcaggcccaagtcctgcatgaccccttctttccccagcttctgagtgttattgttcgagccacatatctctttaattgagagatttgaatttggtttgaccaaagggcataactcagggttaatatcctctggaccatgttgaaaggcccgaaggtcagcccctttgacagagtcaacatccttgggaccttcatcaactttttcctcaaacatcacctgcttctgaccaagggagatggtcctacgatcctcccttccatatccatgcaaagggctatggaggggaccgttgggatcctcctgacgcacggaacaggatggcaggcccacagcaggaggagcctcccaatggtgagacgacacgtcgttgtctgagaaagcttcggactccgcgcgccaaaggttgatgaccttggtccaccgtcgccgacgtgtgtcccctaagcagtccgacgatgctccgttgggtaagcgtgatgtcatgtcttcatcggaatcctccattgctgtcgtgaacggtgatggcggaaaaacctccaattccggctgacgctgccattttcctttatctcgagacacctcctccctcaaaaacaaatgatgttctatatcgttgaccataaccaccattgatttggagaagataggtttctcctttgtgcgtatcagtacctgcgcgacgtcaagtctcgaacgatccgccgtctcctcgtcgagttcgataatttctccatatgtcgaaagcaaggtcgcaaaatggtcagcgtcccatacctccaagggaacaccccagatatgaatccatattaaatggaattcgggcttcatctccggcgtccatttctggattgagtataagggtgtctctccgttagattgttctctgaggttgatcttatctgctttgtcttcgtccatgtcgtgaaggataatcatgtcatccccccaatatgacaccttcacctctgctcctaccacctcctgaacctcctccaccgccctctcaaacatcccttttgttttttagacgacccacccaaagttgatccaaccatttagtattctcatttgcagtctgaaacgttacggatgcaacaggagcttctgaaccattcttcccggacaaaggcacctcagtctccttccctttcatagtatgattgtgtttaacagcttccacgtacgatttcatgctggtggatggcatactgttgtgtctcggttgtttgggttccatagaattcgtagggttcttcctggctctattaacgtctccccctgagctcgccacttcccttatacctcctctctgaagctttggtttgttaacaaacagcttcatcccttctatgtatatattattgtcctgttgtctctccaatctgccttcttcctctacgcctttaaaacgaacaaagccgtatctttgaccttgtttgttctttgatttaggtacgaaaacctcccacacttttccccattcctggaataacttccagagatatgtttcattaacggagtttgggaaatgagagaaatagaaggaagttatgtcctgtttattcctccatgataggggtctgtgtttttcgcttttcgggtatgcatgaaaatcactctgtcggcgtgatcttgctccttgttcgttttttttctgtagccgagccttcctcctacctcccacttgaatccaaggttcctcctggtatttgttatcgatgactctgtgagtgtcatctgctctgatgaaatctctttcatcaatgacgtggcctcttctccccctaccctccttactcgttctgtatctggcccttccattaagactccctttcaggtctctggcactcgaacgtcctctctctcgcacaggctccctctcatactctttcactccctttctctttgactctctctctctctctctctgtatctttctctatctctccctccctctcgttctctgtttctctctctaaccatctctctaaacatttatgaattccaacagccagaaattgtaaataaacatcatcatagattgggttaaagtcacaaagatcacatgatgatagatatagcaaaggcattctggcatcccgagtacaaaatagtattttccatcctaatgggttattttctctgtttatcttatctattggttgcaaatttgcaatgcaatgcttctaatatcaaatgtttctccatgtgacatataattaagtattattaattctttcttgtaaatttaaaaagttgaatgtgttatagagattggttggaaccaaaaacacacacatggtcagaggctacctaataacttcttctttctgaatgcttgagatactctttgggtgcaggccatagaatggcttgcctatagctagactcgagttacctagcactcactgacattgagtcactaacctggaagacatgtatatatactccacaaatctattgaggaaattgtaaatatttttggagattatgcttctttatgcttccttataaaatgttatttctgattgctttgagttacaaaactcaaaattctatcttgtggagactgtgtttggtttttttgtttgtgtttggtttgttttgttttaaatttaagtacatgtgttttgatttctgttacgaacatggtatgttattttcacatcatttcttgtgttgaagacattggggaaattgttaaaacatgatttagatttcactatttcctttgcatttaaaaaaaaaatagaaaataaagtgaaaacaaggtaatacttttgtagttattggtgaactaaaaataaattaaaggttatatctatgtgacattattgaggcctatctgctttggtatccaggtag

SEQ ID NO: 2915 - DNA, 3042 bp, Glycine max
  Intron number 2 from transcript Glyma15g11410.1 (locus Gly ma15g11410) derived from phytozome v7.0 (chr-ID Gm15; pos 8356810 to 8359851 reverse strand)
aaccctcaactctctcttgattctatctcagtttggtaagtactaatgctttcattaatcaattactttcttaaacttgcttcctctccaccttatcagaaaccaagatataaaatcatgatcacggtacgtttattacccagaagttataaagttaacttgctgataaaaaaaaattaaggagattcaaggattgaaggaagaaaaaggaaaaatttgtagtttcaattttttttttctaacattctaacaaaaaaaataacaactaaactgatgttggcatataagaaattatttattataaaaaaattaaagacaattgtgattaatacaactacaattataattgtgtcaccttgcaaacacctctaaaaccagttagaactatggtcgtagaatgtcttttaaaatcttataagaaaggataaaagttatatacaatttcatacatgtttcatgtttgtgttgttttctaatcaacattagagtttgtctgtaaactacaaaattgaacttcaattttaattaaaaaaaaagagtacaactaaaacttaggaaatatatccaaatttgtcttaaaaaatctaatataaaattatcatgatcttaaacaattttcatatgacatgtaataaaattttattaaccttttttataaattaaaaaaactcaaatacatatatatcacttagtggggttagttataattatagataaatgataatattaaatcatgtaataatttctcagaagacgtacgttaaaaatattaaaggaaagaaacacgaggcagtgttgggctgaaataaaacacatgggaaggtgaggtgagactgagagtgagaccacttgtaccatatgtgtattttactttgtcgttcagtggtgcagagaaagtcttgcactgtgttttcctttgcctaattaggcctttttctttttcatatgcacaaaagtcaaaactaatataggtacgagcactttactctgtcaagttcgttgtgtcgggacactgaaagtctgaaactgccttttttatatagcttaaattaattgattttaaatcgtgtaaaacgttcatttagataatacggtaaaatttaaacaatatacttactcaaattaatttagaccataataagactgaacaaaaaaattagaagagtaaatcaatcaatttaaaaaaatatatcaaattgaactcgaaaaaaaaatgaagaatcaaattaaatgtaaaaaacaaattaaaggagaaaaaaaattaatttaaccctttttaaatatatttctataacattgtcttctattttttatcacgttaattatattatataatacgtttttttttctggatgaaaaattgatataatttctcttattaaaatgaaattacacaatatcaattctccaaacaagctcaagcatgaagaatatataatgatcagttttaatacctcaacgtacataactaataacttagagaggctaggctcgtaccttatattagttggataattctaatcccacgacatttctcttcatatcgtaaattatttttagaattgaaaagggagatcagaaaagacaatgaggataaaatagatgatatttatgaaaagagacaaaaaaaatggatggtaaaaaaattgtaaaatattgttgtagaaatagtattacccttttcacaacacatcctcacaacatgaacatccttacaataaggagagaaacagggagaaagaaagagaaaaatatttttaaaaaagtgatataaagaactgagttataaaacaatgtcatgctttttttatagtaaaaataacatctgttaatgatttttataggaccatggtataaggaatctggtctgagatcgtcaagtaaaaatatttttgattaatgatcgtaaatatttctaaaatgtttaaattaaaattgtagggtactctggttaaattaaccattttatttcgtcatccaaacaaagcacaatggatcgaaacgaaatctttcaaaactcaggaattaataaaagaaataaaagaatagttggcacttggccgctgtcatgttgttataagacaagaaaggtatttatccaagttgccagtcacatagtaatgacattacgttacgtctcttcataggtaagtcgttgggtcacttttaacaatgataaataaaaggatatcatggtatacttatgtcctgataaaactctgaatcgagttaaaatttctttcttcgattcaaaatcaaagaattaaaataaaaaatactaattgaaccttatcgatcctctgtagtttcaacttaaattaagaaacctgtatttaagtttatattactgggattcatacaactttcaggataactctgaagtgtcaaaatctgaatttttaattacttggattcatacaatttagattaaataattttaacttctcagacttgaattttaatatttgttttacactcttatctctctattacggtgtaaacatttccattatgaaaggaatagttttgacatctaatcaattgttatagcccataaaaaagacactgataaattgttatagcacatccattgatgtgccccccttcacctaatgatgatattttgttatggtgtgtgtgatcgagttttagaagtatttcttaatatcttttatcttttaacttttttttatatcttttctatcttttattaaatttagatttttttagatttaatttaataaattttctctattaataaaaaatcatgggttaggaatataattactatatgtgcattgaagaatagggagaaatataacctgttaaaataatttcgttttattttatccaatacccttttctttctatctaatttgaaggaatggaataaaatcatctatctttcccattttcatctcattttgttttgtattacacaccaccattaacttctttcaaccataattaatctgaacgtaatatgacgtacagcatgattaatcacgtacatttactatggttatgacttgtgagtgcagc

SEQ ID NO: 2916 - DNA, 1073 bp, Glycine max
  Intron number 8 from transcript Glyma20g01490.1 (locus Gly ma20g01490) derived from phytozome v7.0 (chr-ID Gm20; pos 1018027 to 1019099 reverse strand)
tctgagggttgccggaaagagaggacaatttcaaggtaagtgtactgtgtgtcttatgtcagtatgttggaaggatctatcgctgcttctttttgtaactttctttgatcaatatgcaatagtcagtgtctttgcccatattctcaaagttggtggtttcagttagaaatgaccactggtacatatttttctctttcattatagtagttgaatagctatcaacaaagaattatttggaattaccatgatgctaactaacaactgtaaattggtaacgtgacttatgccgcgtcaaatacttaattgtaatatacattcagactcttgtgattgttgtgaacatatgtatttccatttgtgtaaaatgatgaatgatgaattattatcaaaaggcaccgactctgagattccaaggtgcaatagaagacacttggttattgatatttggttaaaagaagacacttggttatcaacagagatgactaattcaaaaccgaagaataacaaatcctcccaatgcaaagaaataataggaggttaaatatttaaagaaaattatatcagctcagcttaaaaggattcttagttatgaaacagtaaatattctatttcagtttgactaaagagaagatgcataattgagggatttcttgctaaattatggcaatttgttccaacgaaatgcacctcatcctagttatattctcttgtatctgcaaatctagctatccatttatattttctcttcactctctaaataagactatttcatctagctttccatttatattttctcgtcacatccgagagggatttctgtattagctttcagtagctcagagtaggagttgtaggcttgtagcagatattagataccttattatgtagccatactatggttccttttcaaactacattagttttatttttgaaccatgagtatggacctaactttttgtacttagtacctctggtacttctatcaatatattaatatttttgccgatcaaaaaaaaaaaaaaaaagactatttcatttgaaaaagacatacattgtggtggcagctattggat

SEQ ID NO: 2917 - DNA, 2763 bp, Glycine max
  Intron number 2 from transcript Glyma09g26070.1 (locus Gly ma09g26070) derived from phytozome v7.0 (chr-ID Gm09; pos 32331839 to 32334601)
tctgttcaagaacagaccaaaggctctcatttctagtaagatttatctttcctttccttccattaaccccctctttggaatatatttttcgttttgtagaggacagttgtgaagcaacatatgacactagaaaaagtgtctcaacaacatttccaaacttttggtgtcttcattgttagagattctaaggaacattaaggtgtcaacgtgtgtgacgtcgattattataatctcttactttaaatcctagatctcatttatttatttttagtgctaatcctcacataattgctatagcttgttctatagtactatggatgcttttttatatccggggtacttcagaatttcttcctttggtttagggtttaggggaaaagttgttaatatttatactaaatcttggtccctcttgctacttttaccacttttgagaaaagagagagaaaaaggacgtgaagtgagactgttctggattgttttgttctcttaaataatagttggtgcaagagaaaaatatatggatttagtagtttaaataaaaataggaaaagattttgttagaaaaaaataaaatccacttcaataatttgcgtgaaaaggattagtctttttaccgtggagtaagatatttttatgtacataatgacaaacaagtcttttcccactaaataaggttttaatactaagaatagcaaagttgtgaatttagaaaacaacctgttatctctttggattagtgagtaacggattagtggtcactgggcacttctctttcttctaagtttgagattagaaccaacttatatacctacaaaaaatagacttcccactggtataggatttaattttactttattgacagtgtaaaatattattccctaatcatttattgtcacatcatttaaaaagataacttaattaattctttaaaaagctaaacttttttttatgatgtatcaacaaatgattgaacggtactgtataaacttttaccgttgatcaaaagtaccagtaacatttcctatttctctttattcgtctcttttatcacatcgtatccattatatctattatttttctcgtttgtgtctttctctccagagatgtagagtaccatgtgtgtacaagaaacatttttccaaaagtaaactcttgatagactagttttatattactgtgagtggtgattttcctcaacaccgtgaagtttcaatttaattgagcaagatatgatgcagactagtatagttggaaattgaaattcttccctttagggctctttccctgtatacatatgtccatgaataagattctgttattgcatccgagtctatcttactgtgggtctcacatggttgctgtacagcttatgttgcaacagccacaggggtcattgccttttattggcattgcaagaaaaaaaaaaaaaaccctttaattattcttacactatctatttggacacgttactttttcttcttcttatcttgttctatttgttgaatctatactatcactcctacccgtaaaaaagtgtttcgcaatctttgtgaatcgatagtggtttcctctccacttcaatcaagcaatcctaactttgaaaaactctcaaaatttctctttacgtgcttgtttactagtatatgtccttctcatctttaatttagatgcttttccacagtcttgttttcaagtaacccaatattcaatttataatataatgaatagtaggtgggggcatgttgcatattactccttgaagttcatcctaaaagatcacatctattttaattaactacaaaaagcaacaatcctaacacattttatcatactgatactaagaggctcaatttaaatatctagatgtccaatctcagtagcattctgatctaatctacctgtttctaaattattgatctaaatctagacctttaataatatttaattaaaagactgtacaatccaaaaggttttcccatacgcaatagcttacaactcacacaccaaggtggagaaagaagaacttagcagattcttggagtaaagtgatagctgtttttggcatttctttcaatcaccattagttacacacttacacatactttctttccaaatcaaaaaatgaatcattttatgtttaatatgctagaataagcattttataatttatttacaaggcagcttgaataagaacatacatgggaacctgccataaattagttgctacaatcataggcaagcatataggatttgcattgcggataatatgcaaattcaacctcattctgccacatagaaagacctggcaaagctgccatttcctttttaaaagggtggaaagctgcggcagtttccattttagcctaattagatggctaaaataatcttcaaataaattaccttatcatatacattaaaatacgctaaatttttacatttaatattttttacatgtagtttgcatattgtgtttggtaatgatttgtgcgtggctccgtttatcatacaagtgtgtctcttgcatagttgtgaagataatataggtcatcaaatagtaacatattgatgctttgaatgctaacaaacaatagtttaggacatgcaatttttgcatttgctatttcttttgtctcttccattttccgtgccttacatttattttgtgaaattggaggctaaatactaataatgtcaacatccttccttattttccttgcttttcaagagccacagataacatccagggaaagacaaaagcct

SEQ ID NO: 2918 - DNA, 2557 bp, Glycine max
  Intron number 4 from transcript Glyma04g38320.1 (locus Gly ma04g38320) derived from phytozome v7.0 (chr-ID Gm04; pos 44719820 to 44722376 reverse strand)
gcaaacaccccaatactcaactctttgctgtcgtgagtataatataatgactttattatgtatagttattcataaacttttgtgtggatttctaaacattttaatataaataggggtttattagactattaatgaattagttagttagttagttagttagaggggtttattagatataaataggggaagaaggataggagagaggggagatttgttgtcattgtaaattgagcattagctctttgtgaaaggagaaatcctttgtgaaggggaaacccttggaggagagtttttctcctattttttgtttttttcttactagtcaataaaatcctttcttttcttcctcatttcaattcttggttcctaacaaattggtccgacctgccggatcttcgagggaaagtcagtgttagagatggaggaagcgcaaatttgggctaagaaggtggagctgccagcgttcatggggacagacccaattggttggattgctagggctgaaaaattcttgaggtacaagaaattccttcgttccataagctgcagtatgcattcatgagcatggagggtgctacaacacattggttctacatttgaagccaaaacaacccagatttagattgggcgtcattttccacagctttgatcaaaaggtttagagatcgctatggtaaccatgtctttgaaagattgagtatcttgaagcaagaaaagaaaactgagatggaaacccacatcaaaaaatgagagacttccacagagttcttgaaagagaggaccaacatttcggagctgaaacacatgttgcacaagatattgaatgaagaagttgattcccatgcctctcaacaagacaaaaatagcatggagggaagtgggttagaattcagtgaagcaaaggctagttcttgggcaagaaaggtggaactacccagctttgatagaagcatagaagggggaactgatttgaagggtaacagttttgagtgtgacagtgacccattgcagttcttcaaatcagaaaacagaagtaaagaagattcagtaatcaagaatcacaccctttgtggtggagaagaaaccaaaaatgatgaagcaaaattagcaagagaaaaaaagactgaaaagattatggaggaagaagttgatccatcgataaagagggagaagcacaaggaaaatggagtgacgaatgtgggctgcgtagacgattttcttgataacccaattacaaatttgatcaaaaaggaagtcgaagctggtgatgcaaccaagccacattgttttcaagattcagatttccataaaaagattgttatggtgaaacaaaaatcattcatgaaggtggttggaacatcaatggtgcttgaatcttggaatgccaacttgttgggtgagcctttagcattaaattttgttgtgtctatggatgacagctcgacattggagccaaggcagaagggagctactgagacagtcatgatgattcaaattatacggagtccaccctcatccccaccaccactgaagctgccggacctgagtttgcatgaagttgccagcgggttcacagttgatcccccatggagggacaccaaagaggcacaccctgttagtgtaaatgattcagttttgaaggatgagaaagaggaagggggagttttggagttctgcaaaggaggtccaactttttacatagtgggtcatgcccaaatgggctatagaaatgggattcataaaagaggagcagaaacttggaattcaaactgggtggcaggatttatactgctaaagttggatgtttgtgtacctgatgacatgttaaaagagcagaggtggaaagagattgaagcatcacacatggaggtccagtttaatcaaaatttgcttccatcctgacctccatcggagccaccaaactcaacccacatgcaggggcaatgggtcgttccctgtcaagctacaaggggtgcaaatgtcttctagcaatcggagaaaacttgaggaggtttcaatgtgcaattccaattttcaaatttcaaccttgaggacaaggttgatttttaggaggggtgtattgttaggatataaggagaagggagagttagctaagatagttagactattaatgagttagttagttagttagaggggtttattagatataaacaggggaaggaggataggagagagggagatttgttgtcattgtaaattgagcattagctctttgttaaaggagaaatcctttgtgaagtggaaacccttggaggagagtttttctcctattttctattcttttcttactagtcaataaaatcctttcttttcttccacatttcaattcttggttcctaacagtatagttattcataaacttttgtgtggattgctaaacgttttacctatactgaaaaactaatataaagacagttttcgctacagaagcttggttatttgactttcttgtgttgaatatttacatttcttgctttcctgttctgtagtgttttactgagtcatctttgatctattgattttctagttgctggaa

SEQ ID NO: 2919 - DNA, 2712 bp, Glycine max
  Intron number 1 from transcript Glyma01g33200.1 (locus Gly ma01g33200) derived from phytozome v7.0 (chr-ID Gm01; pos 44963041 to 44965752)
gaagcccgtgctctgcccagcgacttagccaaaaggtcactctccattttcttcctttgaatttcactatcttctgtttttcttttcgctctgaatttcaatgattttttttttcgtatcttttgttgctccctgtttggttgatgggattttgttagttttcttcacctatgttggaattaggctagtgattgcaaaagggctattagggcatactctaatagtcttgttagttgtaaaatttagacttgcaatatatgtgaactgatagagctgagggaatcatgaatataatatttgttcatttactaatttttaatattgataaagaaataattgtagtagctcaatgaaaaggggtattggagtttagctaaacttgttgccgtgacgatgaagtttggttctgatgatactctgaccatttaacacaagtttgtgtgttttaggtacttccttgttctggaaatgtatatgcttttagatattcggctttgttttagcttatgttagtgtgtttgagttaggtcatccagatgatggcataagacagccaagaagacagtccttttttataaagaaaaaaattatccttgtcatctaggtttttctgccagatggaatgtcagagcatttaggttcgtatatatagtattgtggcacttggaggaatatgtgaacttgactattgtttgattgattcggtggtggtgttctttgtttgtaaaaagtgatccaattggtgaaatatgttgcagcaggatagttggtattcaattaacgaattgccctggaaattttgagatggttgaagtaaaagttgtttttgatgagatctttgcatatgagtattttggtgtaacattttgtcaaatagatggtggctatataaaaagcaatggtctagcagtgtataatctgcattttcagttatgcagttttaattactatgttatatttccagcagtcaacagatactagagaaaataactggagtatcgttttggggaaaggctgtacagttgggtagttttctttgttttcttttaagtgcttttagctttatggcaaggggagtggggatgtttatggcctttgtaaaggcagagcaaggttgttctatgtaatcatgtttgtaccagtatatggcacttcttgtggcattttctggtctatgttttaataaaatttcttttgcttctaaaaaaaagggtaattttatatttgtatacaattggagctgtttgttgtcatgctatctatgtaattgacctcatctagtgggataagggtttttgttgttgattattgtacgattgtagctatttaattacattgttagtccttgcgtgattaccttaaggtggtttttgggataaggaatgtttgaacattgttaggaaattggcatggggataaaagttttgtagaagagaatgaacatacttctaggaaccagaaccgtattgctgatagtaacctcgtttcctggtttccagtaaagtagtttagttaagaatgaaagatttattttaccaaatgccacttaaataataagtattttgatacagaatgggtataccggtgacataaatcccagaaagtttaaattttgaatgtctgaactctgaaatcttcaaattcagagaattctatccgacttaaattaaattttcatttgccagattgtgcttcaagttcagtagatttggtttgctgttgacaagaaaatgttttatgatgtgaactgtttttcatggaaaaatagtcaattacattgttatcttagttgaatagaaatttttcgcagttaactaaattgtctttccagctgactaaaatccccaagaaattaaattaaaatcctaagagtttataactgccttgtttttacttttaggtctttttatgtaactagtttcatatttcagtatttccacttactgcattggtatttaagctgagtgatttgttaaaaaaatgaagaaactagctaactaatttagaaaactgctcctttattgcctaatgaggtattgattaaccgctgcttgtgcttattgatctgattcagtgccattttagtacacctacacccatttcatataaaagatttcacttctggttttctttctttgtccttgctaataacaacagtttttaaaccttcaccactttatatgacttcattactctgaaatctgcttaagtttatgtttttcacctggattgtatctgttacacttgggagtatatcttccaatattttcctttttgcttgttcggagttgatgagaaaagaaaaatgaaagtgaagctgaaaatagaattgaattttagttttatcttgttaggggacatctggtgtaactgaaggtgtcccaatctcattctcgagaacagtactatttgtgtgccactttctgcattgatgaacagtctttggtagcagagttcctgtattcactttgctcatgtttcttgataactcttttgtttgttttacatttttccttttaaattgttagacttactcactgtcttcttaaggtagcatccaagttggtgatgtatgctttcttatcacattactctctcactccaacagtccacaatttcttgatttttggaggttaacagtgtttgttatcaacattttggtatttcttaacttcaggtgcaactgaacaaagagcataaaatcctttagag

SEQ ID NO: 2920 - DNA, 746 bp, Glycine max
  Intron number 17 from transcript Glyma17g03570.1 (locus Gl yma17g03570) derived from phytozome v7.0 (chr-ID Gm17; pos 2394147 to 2394892)
cacattgtctggaccacaggttcatgtttctgctattttctggaacatgtcaatttttaccttgtttgtaacttgtttttttatgaccattattcttcttgactgaaatatatttgtgtttcttatgtagttcttaatttttaaggagaggtcttatctttgacttaaaatttctcaactcaattccatatcctgatacttgttgttttgcatttgtatcccttttttatggctgtattttatttaaatggtaattttctttgctcttattattaatgaatagtaactgttatgttgatagtttagggcagatagtttgaatcagttacatgttattaattatgtttgtaataagggaatagggggatagatgtgttatctggtaatttggacagtgaaaacatctaagagtcttttttactctgggacagcaaattcttctgtattttgtgtgatttaaaaatactattcttcaatttattaactggtgttccatcaattttttcttgctttgattttgaagtcaacatactaagttttgtttgtgcagggataagttttgaatgttgagttgtattttataatatatctgctgaattgttggaaaaacttgtcagttaaagtttcacgtaagatgaaagtctatttctatgtttgtatgataggtgttcctgaacttgttttattgactgttttagtttcatctgacagagggacactattattgacatattctttgagaggca

SEQ ID NO: 2921 - DNA, 6353 bp, Glycine max
  Intron number 1 from transcript Glyma15g37520.1 (locus Gly ma15g37520) derived from phytozome v7.0 (chr-ID Gm15; pos 43375099 to 43381451 reverse strand)
ggcttaacacatctcaaaggttggttaatgtctttactataatatttaaatctaaactttattcgtaagtaaatatttctttttaactgctagctgattttaattttgcaagtatatatagatattgggtattctacatactcacataatatatgtaatatattttataattaaaaattaattatatgtgtattagtaatacttttcaattaattgagctgtatatattattttgtcttcttttattgactttccatcattaactttaaaactatatataagaacattcaagttttagtaattcgttatatatattccgagaaacctaacttagttgaataaaatacatgagttggtataaattcttagtatctgtctcccattcctataaataggaaattactaaaacttgaatgtttttatagttttaaaattaatgtattaattttaaagtaatcaaaatttgtattatttttttaaaagtaaaatagttttattcctctaaatattaaggtgttattgtgttagtcattcaaagatttttattattagaaattcattaaatactaaattgttgtcgtgcttcttttaactttttattagattaattcttcaaatatataaaataacatcaaatttgttcatatgtaaaattaaaaaatttatataaaagacgaattggtgataattttatatttttgaggaagtaatttgatgaaaaaatctataaaagaaaataatatgatgacagtttaatatatatttaaggaattaatatgaccgtagattaaagtgatccatgcttttcagcttttccataataagtaccgttaaaaatttacttccactatagtggaaggaacactggaatcatgtgttcaaagaaacaaactgttgctaatggacttgctaagcatgccaatagcttagtattgagttctttatgtagtttattgggtataagaagaagagaaaaaaacttcctgacaaaaattcatataagagtaacgttctagcacccaaattaatattagaagtttaaattgagggatttttcaaaacattatcaccatattttgaaaaggagaagcatatttataataatcacgtgaaatatatatatatatatatatatatatatatatatatatatatatatatatatatatatatatatacacacacatttttctaatttttctatacattgaattaaaaaaattctgagtcagagaacaagactaatataatttaattggtagatattatattagagatttaaaaatatatactattaatgcaaaaaaaaatctactgataataaaaaaaattaataaatttgtatgaattttaagataattattataaaatttaataaattcattatacatgttgaatattatagaaaatattaccctaagtgcatttattatttactcataaataaatatgactaatatttttcttatatatatacatgtttgagggaaagagagggaataaatgatacagaggaataaatcgagaacaaagtcgcactgtcagtaaaaaatttaagggttttctagattaacaattataggaaatcaacatgatcttgaaatctatgattctcacaagtaatagataatagataaacaatacatatctttctccattatgaggcttctctcatgtgcattttgattttttggaaaaggagagaaacaagatttcactctctggattattctttttatctctctatgtttgtgatgaccagagattagaaataacactctttagtcaggatggagaccttgtttcatgttagttggtattaatccccttttataactactactcccatcaagtagcagttatctttagaaacttctcatatttaacccaattattatttagtctctaattattaattatttatttattaatccctacataagtcacatgagacattaattctaacattctctcacttgactcatgtgacattaataaacattatggactaaataaataaatagattaaactaacataatgcgcattaaaatgactaaattattctatacattgggtacatcataaattcataattaagaataagaaccaattcgagtcatgacggttgtacatcacttaatcgacatagtcccttccatgtactacaaattagtcttctcctttcctgagactggtgaaaatgtctctttataatcaatgtcatctttctgagtaaatcccttaataacaagtctagccttgtaactttcaagattgtcatgagagtcacgtttagtcttgaaaacccacttacaaccaactctcttgcaatcctttagcaattctacaaggtcccaaatattattatgttctatggaatttatctcttctttcgtggcatttaaccatttttcagaattatcacagcttgcaacttgtgaaaatgaaactggatcattaccattaatgcttaagtatatttttgtttcatgtaggtataccacataatcattcaaaatagctagtcttatttctctttgagatatctttaatgctacttcttgtggttcttccataataggttcattatgtatcatgggctcattattgtgttactcctcttcattattttttggaacaactaaaggaacaatcacattcctgttagaggcatatgctaaagggacttgtactctaacttctttaatttccacatctcgtggaactgtactcccactgattttatcgttttcaatgaaccttgcatttccagttttaacaattctcatactatgattaggacaataaaacatatacccctttgacttttctggataaccaatgaaatatccactaattgttcttgcatccaattttctttcttgcggattataaatctttatttatgtctgacaacctcaaacatgcaagtgccttatactaggtgtcatatttgtccacagttcaaaagttgtctttggaactgtcttactaggaaccctattcaacaaataaatgacagttttcaagacatacatccacaaagatacgggtaaagttgaattgattaaatactctcaaccatatccattaaagttctattacacctttctgatacaccattttgttgtggtgttctgggcattgtgtaatgcgcacaaatgtcacgtttctgaagaagcttagcaaatggacttgagttttgcctagtttcatcgtatcttccgtaatactcacctcctctatcaaatctaataattttcacctttctgtctaattgtcttctacttcattcaagtaaatttctaagacatccattgcctaagatttctcatgttgtaggtagacataaccgtaacgtgaatagtcatcaataaaggtaataaaatatattttctttccaaaagaattaacatcaaaaggtccataaatagcagtatgcacaatttcaagaaactgagtgcttcttgtagctcctttctttgtatgttttgtttgttttcccttaatgcaatccatacaaatatttagatccgtaaaatctagatcaggaagaatttcattctttttttatctttcaatcctttctttagaaatgtgacgtaaaagtttatgccacaagaaagcagttcgttcatttactaaactacgcttagtgttaacattatgatacagagttaaaacgatttcaccatacaaaccatctaattttaatttatataaaccatcacaaagaacacctataccaatgagatgattatgcttaaataaactacaacattcattaccaaaattaaaagagtgtccagtaacatcaagtttagataatgaaactaaattcctagataaactaggtacataaaaagtttacagtaaatataaatgatgtctactgtcgaattttaaacgataagtcccgactgcttccaatggagctttcactctattccccatgaagacaaacttctcatttgggtttatggtttggattgtaaggaatcttcgcatagtattagaaacatgagttgtacatccagaatcaatccatcgtgtattatagggaacttcagttaagtttgattcaaaacatacaagaacattaagttcaccttttttttcgaatcaagacttacgctttaggaaatccttctgaaagtatccagatttctcacaaaattggcaattattgtcctttgataccttcttttggatttgcaaagagtcgtcattgatctttaatgacactttgcctttatcatgcttcttcataaatttctttttagctccttgattcccttggtggcttacataatggactgagtgacttcctaaattcttaagcctcgtttcttcctaaactaacatattggacaattcatgcacattccatttatctttcatggtattataactcatttagaacaggccatactcagacaataacgagttcaaaataaactgaacaaggaagttcttatttacagtcattcccaaggtcttaagtcttgctgcaatgtttgtcatctcaatgacatattcatgcatagtacgtgaaccatcaaacttcaggtgatcaatgtactcattaatgtctcagcaagagacttattagttgtttgagaaagctttcccactaatcccataaactctttagcattatcgatcttagggagagttgtcttaatactgtctgcaacaatcattctcatgaacattaggctaagtttatggactttatcttcataataaaattcataaagtgttttgagacataaaacacatgtcatacatatgattcgttcaaataacagtcaatgtatattgatgttctcctttggctgatacaccatcacatgacatacaaacatgatgatgctaataaaattcttaacattatttgacaattaaatatgcgtcaattagtagtacttatttccttcgagtacataaataaaactaataataaacacagatcccctacaattatattcattaattattagaacaactaatcaacctttggacgatccataaatgttttataacaatgaattttaatgcacccataaatcaataatcatataatttaacatccattattctatgagtaattgaaataatcattaatttgaaattaaataaccttatagacttggtcaccttggtgactaacaaatctatcatacacttaatttcaaccaaatatatggcttgcacatacttattgttattaacaattcatagccattttattaatttcatttcaggccaaataaataccatacatttacattataaccaataaaataataaaagttcaatcacattgaagcaaatgtataggatatacatatttaatgctatcgataattttaaagcattcacgttaatttaattacagggcataaattttcaatcctttaattacactcaacaataatattcaggaaaaaaaattgagcaagtgggattgagaatagcaaaaagtggattgcaaataacaatttcaaagaattccttttcaaattgtttcagaaacgtacacataggcctgcttttcattccaggaaggaaaaagaacaacatagaaggactttcgctatccttctccatgattggaagataccactttaatagagattttcaactcagaaatagacggctttcgttcacgcaatgtaacaccacttcgtacagctcgtttcgaaaattcaacaataataaaatatcttacatagcagcctaaaaataaaattcttaaattttataattaggattcatttataattgaaacaaaaataaattattattatagagtcataagttttataacctatgcgtgtcataaattaacaattataaaaaatcaacaggatcttgatcttgaaacctatgattctcacaaataatagataatagataaataatgtatatctttttccctaatgagattttctcctgtacactttgattttttagaagaggagaaaaacaaaatttcaccctctatttatgatggccaaagataacatttttaaatgagaaagaagaccttgttttgcgatggtgggtattaatcccaaccactgcttccatcagatagcatttacctttacaaactttccctatttaatctaattataatttaatttctaattattaattatttatttattaattcctcccgaagtcatatatctctatgagacattaaatctaagaccgtggagttcatttatatattaaggagttatctacattgaaaacttagttgatacacatgagtttaacaaagtgattttgtggttgacatgcagactcaagttacttagaaaattccatcgattgggta

SEQ ID NO: 2922 - DNA, 2070 bp, Glycine max
  Intron number 1 from transcript Glyma09g06720.1 (locus Gly ma09g06720) derived from phytozome v7.0 (chr-ID Gm09; pos 5462177 to 5464246)
tccacgcccaggagcacgctcagcagcatcactgattccatccaccttcaggtagcacctttctttcccaatacgatgacgccgtttttttgtttgtttcgatcttcgaggaattagatagatcatgtgcttgagtggtttgtttttattgaaatttgaagggtttttttttcttctgcggttttcgtttgtgattattgtaagagcatgattaggaatccgtttgtgattagttacccaacaattatgttttcttaacatccagaacattgaaacttttcttagtaattattcagaatacattctagttttccaaatctggaaacaaccactttgcacatgctagggtaaggctgcatataatgaccctcctccaattttcatataaaaaaagggtactttagttagtggcattctacttatacaaatttttagttggtgatgtctgatgaaacaatatctcaattctattgctgtcaatgcacattacttttggtttttattaactcgatgtgggtaatgtattgttttatgtttggtgattgatatctacgtaatttattgttgttgttgttgtattgaagatggtttccttgcttgatctcagatcatttttgaaaaatcatggcaggagcttactgtcatctttgatgtatttaattggttacgttagatgataaaatgagctctctatgatacaatcacgaatgaatttttttggacttttgtgataattgagtgcatgaaagaggatggaattttttatttggttgcagtgctttagtctcctaactgcatatgttttgattactatttgcatttgaatcttgcatgtcatttggactgtgttcatgttcatgatgaatcaagtggttcttaggcttgccttgtcaaaatgtgtgagattttgtttttccaaacactaaatctatatcacctatggggacttcagactttagtcatcttgcagaagaaaaagtgaaagggtcaatgctacaacaaatatgtttggaaaaggcgcatatacaaattttgtttggcatctcctctgttgtcccctctcataaattgtttttatcaccattctcagatgtttgaagaggaagttgggacataaataacattcttaggaaacctatactgaccaaggtgtatgttaggtataataatggatgaccaaagtccacacattagtagatcctctttgttagtttctgttaatgaaatttgttagttaggagtctctgactgaaattgttagggggaaggagggaatattaggtaataaaaagtggtgaacaagaggagggagttcagactggaaagtggtgggtagtggggctagaattatcagctttctggaattgagaggagacagagcttctttttgtagaggagacatagcataaagcatcctatttctatgatctgcaatcttcttgattcatacctgggaataggggacttgctcaataaagtttctagtttctttttagttatttcctacttctaatccacattttaaggcatatatttccatatttattttcagttgatgtgtttccatttacaattataagaatgctatcttgttttctttttaattcttattttcaaaattgtgaaggaggtagtgaaaacaaagaaatgtttattttcaccatttcctttactaatcttgaaaacaaaaagcataatgaaaacaagatgacatgtttgtagttattactgaaatttataatgaaaagcacaacaaaccaaacacctccaaaagttccatcataattttgggatgctggcctttgaatataaattgaccaaagtaactgccgggcaaagcagtttttatggcatcccaaacatcaaattatttttagttatttttcaaaatacattctacttaatcttaatgcaaattctaagccagtgatattctgcgattctattgttaatatgcaatgtatcttctttaacttggaagtacctatttgctttatatttgtggctaatatatatattttatttttgttagcaggatcctggttgaattggaggtggttggcttgcttg

SEQ ID NO: 2923 - DNA, 2332 bp, Glycine max
  Intron number 6 from transcript Glyma07g35460.1 (locus Gly ma07g35460) derived from phytozome v7.0 (chr-ID Gm07; pos 40639113 to 40641444)
gatattgtcaggtatggtgtcctaccatatctatcttttttatttttttcttctaaaaagaaattaagaatagaagggatatacataagaggaggataggaggaaattatcttaactatgaacaattaagcacataaaaaacaaattagcccaaaagtgctctcctattatctttacatctgttatataacacccagcagtttgttgaagaactgtggcattgagttcctgccacagaagctccttatttctcttctaccccttctaggccagaaaccttcaacttcactctcttattgttcaaagtcctctctataattaggatatcagctagcttgcctacttccaccattatccatcctaaatctcgttttaagcttgtaatttccttactctgcctatgcaattttatttcttctaacacagtattcatgcattctaaacttctaattgttgatgcatagctttcaagatcaatgcaacttcttattcttccatgtagcttgatttagaagtcatgataaaatctctgcataaaatgttagtcaacaaaaaagaaagtcacacaataatattctcatgtttatgcactcaaataatgacctcacacactcatatttgttcacttgatttcagttccaccacttaatttctttaaaggagagatcaaatatcactaaataagatcaagaagagtaagatcctggtagcaagttttctgagaaatcaagaagatcactagacaaaaaattatgaacacaaggaaactagaaaggagtaacaatcaaaccacttagacaaaaaaggacttaggaccactccaaacactattatggtctaaagatcaaaatataatatttttttattctttttaattatatttttcctttttttttctcttttttcttttgccttttctgtttcctttttttagaatgctatagtaaaagtgaaacaattcagaattatagaaatataagggaaaagatttggattatcacatgtgatcaaatctcgaatatctaagatagatgaacaagaaagagatgagcgcgacaaccttatggtcacaaactaacaactaatagataatgatgtataaacaagaagaattgatgaggatatctactaatagaaacaacaataattgataaggactacgtgataataattaataaggatatgaaagagataggtacgattctatgacaaattgtcaactaacagaaaaggatgtaggaacaagaaaataatttgatgaatcgaaggaatatcaaatgcagaagtgttttattttcttttttgtttttgttattctttttgaaaatataaagtcacaaaacaaataatatttagctaacaatcaggaaccttagataccaaactgatacagaaaagaagatggataaagatatgtggacacaagaaaaacatgaattgaaatttgattctgactacgtatgagtctaattcctaaaacccacaataatattcaccggcgaaccaaaattgatcaactttgacccagtgagaacttttgcaatcacatactctaaggagaggaactttgcacaagatttctactcatgattctcaataacattctagtagaattttacaacccctgagaagaaaataaactgccaccaatggagaagagaatccaaaatttcttatccaaagtaatgttcaactcctaaaagcaatgttttctttagcttatgtagccaaaaagtaaccaatacaattttggtcttaagtaaagctcaaaacatggaagctaactgaaaatccttaaccaactaatgaaaataagtcctaaaccattacaagtccaaaattcataattaactaacaaaagtacgcctaaactactagaagcccaaattaggccatattgaatttgcaaggctcatatgaatttcaactcattatttaagtcttacttcacttattaacatagcctaaactactccatttagtctttcaaagcttcaatctagtagacccatgctgttctattgctatccaagactgttgtacaaattttagcaactaggtttgccatagtccctttacttctcatagcccaagctcttgtcattggactaacatgaatcacaaatgtatcgcttgtattttgctttggctagcctccttgatctctataaaatactatgaccagtgtatatctaagccaatttcacacatcctgtatttaatcatctgagataatagaattaggaaatctagaagaatttgtctatattcagctttgcttaatctcatcactatgctaatatatgatttgtgaatattgttttgtagagga

SEQ ID NO: 2924 - DNA, 951 bp, Glycine max
  Intron number 1 from transcript Glyma12g10780.2 (locus Gly ma12g10780) derived from phytozome v7.0 (chr-ID Gm12; pos 8767223 to 8768173 reverse strand)
ccttcatccgtaagcataataatacccttgatttttgctttgctttcttcacagtttattggatttccttatttcttgaatttcccttgtgtgcaacagctggtttaatgcaaattaattgaattattctttgagtgttaatgtcaaattcatcataattgttgttcatataaaagacttgttttgaccttgaattttggaaaaaaaaattatatgattcatgtgttgtttgttgaatgacttattggggtttttacttttattttctctttttgttatatatgtatgaaccttgtgcaaaccagcatcctaaattgccagcaatcttattaggctgaaaaaggatttgtgtcatgttatgcaatggtttttcactaatttgtggaattagctagctcgaatctacgaagcactcagatttcatcattgttttcttttagttgctccctagccagagatggaaaaatgattgaagttcaacccccttttttttcaaggagaatgtggcagttctgtctaattgataatattggtagttattggattactattatacgaatatcagtgcttgaagaatacaaaattattgtactacacaatgcaaacctcttttgtttgggttttttgtatcatactttttgttttccacttttgtctagcaattgcagaatataaattgtacatatagcttgtttgatttttgaagaaaaatattgctgagttctgattttgcaatcatggacaagaagaagaaaagtgttaagattgattgatttcccattctgtgactttgtgacttcaagagactaaactggtcctaaaaactatacccataaaaacatatcatgtatgctatgtatatggaatggctgagatcatggtttagtgaatggtaatgcaaattatgtatgaacagatagtggacgaagaagcgaggtttgaagccgaagt

SEQ ID NO: 2925 - DNA, 2340 bp, Glycine max
  Intron number 3 from transcript Glyma15g22140.2 (locus Gly ma15g22140) derived from phytozome v7.0 (chr-ID Gm15; pos 20786246 to 20788585)
ctgctgtcacactattaaccttgtaccagtactaggtacctaccatatatttctctgttgccagatttgtgaagcttattagctcaatatttattttgctctactaaatgctgatttgcttgacaaactatttacatttataaactgtaacagtagtgatgttttggtggttttcttgatcatgaaatatgcttaattcattgatggtgatcccaaatcctggtattggattcagcaggggagcagtgaggggatccttttttcctttcctcattaccttgctgttggaataggccatatgttgatttgaaatgaactcaagaatgtaaaccaactgtttgtgcacatatttgaaaatgtattcgttactaaaagaataggctgtttggtgaaggatcatgaatgacttttatatctttaagcatctcttcatgcaacaaccctttgggcttaaagtttggacattgtacaagcccactctctagtctctaccttgtgctgaaattcagtttattttatttagaagagtgggagtgacaataattgaacccttgactaattttgcataaagactctgatacatgtcaactaccaattctcctaaaagcctaatgagtttagtaaacgctcatgaatggtttttatatctttatctagtacaaattgtaaacacaaaaaatatccagcaaaccatatctaggtagcaggaaaatgaacaaacttgaatgcaaaccttgtggttctccacagctttctttttgatttgtaactatcataagattataattttcttctgatcattcccaactttctggtcaaaattctatttaataaatttcataaaacattaatgaaatgccacaaccacatatgttgttattaaacaaataattatgatcaactgtcttagggaagacctaatgccggatttaaacccttgcaattctcaatttccttagctaagccaactcttcccatgcccttatcactttttagaacctaacagtaataattctggtcaaacatgcattgtttccaactttagaaccttaattttttatattctcctttttggaaactatttatgatagtactgactccttagtactaggaaaatgctcagctgacaaggaaaaaatagtttgtgctagctttgatatagagctgatgctataagctataaagtaaactgtataaattgaggtcaacagtactaccatgcatatttacattcttctttgagtaatatttcatccaaattaaattaatgatccaaattagctcaatgcatggaattgcttgctgcatgcagaccatgaaaatgaaaaaggtctatcaacagttgtaatatttgtcaagaaccaactaccctgtaagcatattagttagtcccaaatagtggtgtggagtggctgctccccaaaaacgctaaagcgggatagcagatagcagagctactgctattttgaatcctaaaatgtacctgaaattaaaaacattcatagttaatgattaaaacatattaataacatatacaaaaagagttttataaccaaatgcatgccaaattgtcaattgtcaatgacaaaataaaagtggtcaactaaatattcaaaatcaaatacaatgctaatatctatcatcaatcttcatttccaaggccagctatctcttcatcatcaatcgcctctttgagtgcatttgggatcgagcagttcatctagctgactagcttctttgtggtgttctgctaggaggtgtctttttcagatcttcaggtagattgacatgtgtcacatgtttcttgttcttaattcttgttttttcccttttattccttgaggatttcttatcctttttgtacctctcttttctctcttaataaacctttatttataataaaaaataaagtcaaacaaaacaaatcaacaaataatgtcaagttagttcacaacctgaaaatcacaaaactagagtgacatccagattcagttgaatataaacatgacccaaaacctggattaatgttaatttgattttgtattttatccttcaagacagtttgtattggtgaatgctgtcatcaattgacagagctctgtaataaggttattttatgcacaaaattctactgcataaactacaggatgttgggtgtttgatgtgtcatttaataggtttcattttctttatcttatgtctttccaatgatgaattccttgttttactgtaatattttttgcttattaatttgcttaaatattttactgatttattgttgatgggctgtgtcttcatcaaaaagaatctaatcaagtcattcattgtacgaactgccgg

SEQ ID NO: 2926 - DNA, 3270 bp, Glycine max
  Intron number 5 from transcript Glyma13g07550.1 (locus Gly ma13g07550) derived from phytozome v7.0 (chr-ID Gm13; pos 7743167 to 7746436)
gggggacctgcaaaacaaaagactctgatactcaagtaagaatataagttaggagaataaagcaagtatattcttaagtaaagctcgagtgagcgagagagaggcacaaacttattgctcgtgtgctgagtgtgtgatggaatcgtgtagaggagtttgatagaacatgtatttatagtagttgagcgtgactaccggtccttgtttgtagggtttgttatagcctttacagataatttatgacctgtagataatagtcggaagcttatagataatgttagagataaacatttgtttatagataaaaggtagaagataatcataccttgtaaataatgtgtgaccttatagataatcaattacctgccaatagataaaatattcaaatatatttgaatattagtagattagagattgtgacaccctctacccttacaattataactaactaactaaataaatcatacaaaatttatttaaaagattataaacacataataataaaagaaagaaaaaaaaacatgcaaaattaattaataatttttctttttaaacacatttaatttaaatcaattcaaaaggataaaggttcacatccacttagtgaaaacataataaatttttttttaataaaagataagattatcccagctcaaaacaagaccgtcaactctaaataaataataaaaagaaactaaagtagaaaagtataacgcaattatatcattcagtaaatcataacatgcgaaaatcataatatgcgaagtaaaatcctatgccccaatgtcacacatatcagagcatatccctatcacaaactaagtctctccatctctagcatgtgactcatcatatgaaggctcacctgaaacaaagtgacaatcagcccaaacacaaacacacaccgggagtaagttatcacattcgtatataataaaatattagagcttgtgaaacatataatacttaaagctgactttatataaataacattaccgcacaacatctcacacattattcacacccattcaagttcgcatactccataaaataacatcaaccacatttgttaattcaatgaaattcaaacacaagcgttatgcaacaattatactaagactcaagcctatatgcaatgtggtaccatgtcagtgaaaaatgacattggggcgcttaggagtacatgacaaagcacaccacacaatgggtatactcggtcactctcactaagtaacatcataaggtgaccagtcaggattactctgttttgcgagaatgccccaaccacatgggatcaacatgggcttaaaggagcactcaaaccgagtatctttagccccaaggcctagactccgaagaatccgtttgggcctcaccttcctgatccaggtccaacccctaaaatatttttttacacgcagacactgtttatgagttatataatacccacgacctcacttttatatttcaaacatatttaacaaattgcgccatagtttaacccttcaggattctaactaggaatcctacaatttcctttagtactgcgcataaaagttctctcaagataaacattggtcgggttactgtataactcataactcacatgacaagtaatattactacaaatatcaatcacacactcattcacaaccatatttcatgtctacagtttaacatttcacattttaactaactacaaaatatactcaacaattaaataacaatgtatcataataataataacatacaatatttaacttcaaggcttataaataaataactataaaatatatatatatatatatatatatatatatatatatatatatatatatatatatatataacaaataaaaagtattaaatatatattaatataaaataatcacaataatatcaaatatatcattaagtaaatacaaattatatataacaataaaatatatactcatattgatttatatgaacaacatgtatacttatattctaaatatatctcaactaagttaccaacatcaagaaaatgcctaattgcaatgtgaatacaactttagttaatttctttaaatgattttagtcaatttaattatccaacaatccctacacatatgaatttcatgacgagaaatcacacacgtgaaatgaaatataaagtttgtaaaaaaaacagtatcaatatatatgtacactatacactgcggtgtgaaaaaaaataaaaagaacaagattgaaagaccaacatatctggtataaacaaaatcaccaccacacaatttttatgctaattataaagaattccaattcctaaggtacacacctaacacaggaacacatcaattctacaacaaactcgcaacagaacaccaattggttcatcaaacacactcaatccgcgattaaacatgaaaacataattaaacttcataaacaccccaaaataacccaaaaattgatcatctagggatctctacacattcattataatccccaagcgtgagtaactcatcccttacctcgatgtagtcgcttaaatgttctctattaacaattgtggcgtctctgatgctctctagagttcctcttctgattgctctgggttcttgtgcgtcagaaaagaagaaaggaacataatgcgttttttaaaaaactgctttaggttaacatttggtttatatagtgagaatttatgacctaataattttttttacttatttattaatttattaattacttattaaaagttactgttgttacagagataacctatttgttggggagtccagctgttaagaatcaggtgtccatgctcctataacagggtagtcacatgtctctgagtgtcatgtaagatgccacatgtattttgtgggtcctgtacaatacacatctattagttatatttggtttttcgtttggggagtttcaaatccagagtagagagaaaatttgttttggtggtatgtttgattatctttaaaagtacctttatacataaaaaaaatttggctaaaaaactcagttttatagaagcagaacttggattacttttgcaatttgcaaactttaattcaaatatacgctgcatcatagaaagaaactagtagtattgaagttaaatagacaaataaaaaattatttatatataacacttcttttttgtactcgctaataacattgtaatatatatacaatactctatataattctttttatatttgtctattttaaaatataataaatacgttgatggagttgcagagtctcacc

SEQ ID NO: 2927 - DNA, 3190 bp, Glycine max
  Intron number 10 from transcript Glyma13g10450.1 (locus Gl yma13g10450) derived from phytozome v7.0 (chr-ID Gm13; pos 12291780 to 12294969)
cattctgcattagaaaggggacgaacattagaaaggtacttcatatttttgtatcacatctagttttattttagatatgattagaagtttaacagaccgttttatgaaattgaagtcagatcctgttatagtttcccaaatattgtcagacagttacaagttagcgacagcagaggatctgtaattagttaaaatagttagttacaagattttgaatgatgttctattgagtattatgatgtattacaatctgatggtatgttcataaaacctagagtactatcccttatttttactaatcataattctaactaagaaacaaatcatgcgataaggaaatatggtgactaatcttaatagataattaggaaatggggaaagtaatcctaaaggataatctaatataccactaagatatgaacgatataatattgaatattttcatctattctaacacttccactcaagctaaagcttaagatactcaagggtatgatcaataaaatattggacattttcatcaaatctaatacctcccctcaagctatagcttactaagttatgaacatgttacaaataaacccttctagaaaaaaagataaaaaaatatagtgtgactatgaacatgttgcaaataaacccttctagaaaaaaagatcaaaagatatagtgtgactatagaatggcaggaccagactgctctatctggggctgttgttggccaggatgattttctgggatagttgagggaccatgatgattccataacgattctcttggaatgttgtggggtggggttgattctctggggaaactatgaacacaaggggagtaagacaagtttggttcaatttaagcaatgtctcaagatggattttgcaaaagacactaaaacaaaggcaaaaagtgaacagttaaaggaaatgcttctaaacaaaaggtaactgaatacaagacaaagaatgtgcatgtataggcacatgaggactctagtgacaacaaaatcggtggggttggtccaacactggagagatgaattggacatgggtagttggcatctagaactaatgatggatggcaaatgaggtggctagaaaaatgatgctagacaggagaagaaacactaggaagagatggtggaaggatgttatggtaaggccaaaaaactcaagaatgatgacttggactataataagaaagatggctaatttgaaggaaggcaaaaatagaatagtgctttgaatctgaggaaccttgttataagaacacagggagaacgacaccacaaaatctagttgttatagttggagatccaagaccttataaaacccacacttgaatctcatacttctaatttgggatttaagtcccatatgctctgcagcctcaatacccatgcgggctggctatgcacaagccctttgactagtcctaggtgaacactgcaatgttggcaccaccacctgcattgtttgtttgcagctaagagaccaagtggaaggctttgctactaattgataataagaaccttgggagaaccacaccacaaaggctaactgttgtagttagagagtccatggtcttataaacccaccccacactagaatcccatatttccaatgtgggactcaagtccaatatgttgcaattggatcctaacaactttgtagtagaaatatgggatacatcataaaggatggtgttgctcttaccataccgtattgaaattattatagcaggcgagaataaaataaatattgacttttgaatgatgttctattgagtattatgatgctgtgtaatatgatgatattgttaattaaacctagagtgtcaatctttacttatactaatcataatccttactaaataagaaacaaatcatgagataaaaaaatatgataactaattcttggagataatgaagaaataaggaaactaatcctaaaggataatctaatatattatacggtcaaaatagtattggatgttttcatatattctatagctatataccagttatataccaaaataattttttaaaaaaagtaggtatatagcttgggtagaactccaatgtgattgggtatcacttggatactaactagttcatttttccctcaaaaaaggactgtttttggtcaagactagagatttttcccatttctattttctgttttttccccataatcaattagacccactcatccttacagtgagctgtgagtgaagtgtctatggtggcgaggtcgacccaactaatgatggtagtgcacaattttgaagcaatgagcacactaatttgattttggtttatgagtttgttaataataaatgttattttctaaaaacaattatgtttttatcttaatgtaattttgtctttttttattatcatatacaattgtgtgtgtgtggcttttattgcttttgttattgatgctttttatttgtctttcctattaacctagaagatgtttggatacgccaaaattgccagcatattcagaaatgtttatccaatactatatatgtattgccagagtattattagttgaggatgagtttctgacataacagtaccaagatacattaaaacattttacttctaatattttttaggtagaatgcttgaactaagtaaggttgaaatataatattctgttctatatagtgagttttgttatggtaattcaacatcacctggaaggaatgaagaatatgggaaaatgaggatgcaccttcaaaaaagtaagcttgggatatgctctccatttggaattgcagttgacaatatggagaataattcacaaatcttgcttttaatttttttttaggatcaaagttgtaattctagctactaatttataaataaaaaaaattagcgacacagtcaatcaattttgtttatttttcattatgaattttaagcattgtttttatctaaaggtgtaagtttgaagccaattgtgaagaatatgtaggcatgaaagttttatttttccctcatatgttccgagttgtctatgactataagtatgtaatttgaagtttaaatttaaggatccattgtcctatgtgcttctttccatttcttactgatgcttcagtgtgattgttgtttacttgtcaatatcatcatattttacttgataaaacatttaatgctttattatttttaggcttgaga

SEQ ID NO: 2928 - DNA, 1113 bp, Glycine max
  Intron number 5 from transcript Glyma10g32970.1 (locus Gly ma10g32970) derived from phytozome v7.0 (chr-ID Gm10; pos 41332142 to 41333254)
gtgccactaagaccacggtttgtgactcttccaacaaatttattataaagttttgcgatcaattacctcccaaaaataagagaaaaatatattttatgaacatcttaattattgttttaatttgcttctaacatctaacatcatacataatttaatttacgtgacatgcaattaagttttttaatttagcgaaaaacaaattgattaaattgttatgagtcatgtagagattagttggaaatttgaacaccagttattttagaacatatcgtaatttctcctaattgagacactaggaagagtaaaaacttaattctcaaaattataattctaatttataatataaaaattatagaccataaaataagtacatatagaatttatagatacagacacaaatttacaacatataatccatggaaaattaaataattattttttttcaaaaaataaataaatgcaaacataatttaaggctatgtttgacaaaactagaaaagccagcttaaagttagaaattagtagcagaaagttaaaaaaattaacttattaaattataagtgttaaataaaattaattattaaaataacttaaaagtataaaatgattgaaaaataataaaatcatgatttatttaaaaaaaagtaagtaaaaactaaaatttgataaatatattaaggataaaaaaaatataaaaaaatagaaactaacgttttaattcaagtaatattttaaaaatgttaaaagctattggaaagctactataaaatattcaattatcaaataattaaataaactttttaagctactaaaaaaattaaaaactaactgaaaattctgtaaatgaaaattatttgacattaactaaatctaaaaggatatctaatgctaaagaataagtgcaaaatcattcgtgcgttacactgatggtttataaaacataaaatactaagaaacgacgatttattttaaaactaaaattgtgtatgattttctaaaaaacaaatgcacaagatgtccatttttcttgattcatgtgtagcctttgttatttatggattttgattcatttgtttcttgggcaggtcgaaatcactgagctcaagaagaagc

SEQ ID NO: 2929 - DNA, 912 bp, Glycine max
  Intron number 12 from transcript Glyma19g32360.1 (locus Gl yma19g32360) derived from phytozome v7.0 (chr-ID Gm19; pos 40114435 to 40115346)
aagcctagaccttacacagtctactggagataaaggtattatttttttcctacttccaacatcacaatttgacagactatgcatttcattgctttgctaattctattttctatatcaacatttatagaaggtaggttgagcatttattgacacgtgtaatagtaggttagttttatactgtttaataacttctcaaggatgcattttcatgaaaatctcctgttagttggatgccattgatttgtagatctttttttttttttttgtaaaattccataccaatttcaagcagtttttttatggctgtatcttctaaagctaaagttcatcaagtttttgaacacagtttgttgtggaaagtaatgctttcttagtttctccctttgaaatagtgcaagatcatccacttgttgctatccagaagtcatagatatgaaaatcacattctgcattttaaataatcgtgtaagattgccaaatttttattggtgctaactgattttaactggctcttcgaatgtgggtttaggcttaactcaatcccaaaatctagctcatagggtgagggttgccctcacttatatactctatcttgacactatctctaaccgatgtgggatttgagtttttctcaatactggcttatataaggatgtataaaactgtacgagtacatgtcacttcaatgtgttatattttcaagatgcacacacacacacactcaatactgttcacttcaaattgtgataatttcttattatttttcttattcacaactgtgactataatattgagcaacttgtaatatcagtttctcagttatgcacttctgttttatattcttattagttaaaaatactgcatccattatgttctcatttgttttttatttgatgtcagggtcaaagttgg

SEQ ID NO: 2930 - DNA, 2279 bp, Glycine max
  Intron number 2 from transcript Glyma06g46920.1 (locus Gly ma06g46920) derived from phytozome v7.0 (chr-ID Gm06; pos 49451891 to 49454169)
agtgtccacaacctcttaaggttttttaccattatcatttaaattaatatatgctattttcattttcataattatcaagtgagaactctttttatcgtgagaaatgataattataaataaaagtctctaaatcatacttgaatggtcaaataaatacacatgattttttttaagtagtcatgtaattactaagtagtcaaataaacacacatgatttatatgattatatatatatatatatatatatatatatcttaatttccagaataagaaaaaattatcatttgataactccacacacacatcaaaggtagtagataatttaatttatacaattaaatgctatactcataaaatatagtatatttgttaatttttttattcggtgtaatatatttattatatagttgtttctttataaaagagtttgataactataaacatttgtcagtgtaagaaatcttatattgtcactaagcctaaaaattattgttgataagagagttttcgattggatgacaacatatattttacagtatcatatcaatgaacaaattatttactcttcataaattcatttaaaacaactataactaaacaaaagaaagtaactaatgcaaaatttattctctaaaatcatatattaaaaatttcatgatttttttgttattttttagaaaataaattccaaaatatatttcaaaataataaaatctaaattcacgatagtataataaatagaaatttaaaaatatatgtaacagtttaaataaatttttaatattgttacttcagataaaataatagaagttattcaaaatttaaatagatataaaaatattcaaatatttaattattttattcataaaatctgtaacagtaaaaaaaccatatttaaataattttaaaattatttaaaattttaaatattagcattagtttaatataatttttttaatcattgaaatttattttatgtttttaatcatagtaatttaaattttagttgttacaacaacttatacgatcttttaaatgttagaagaatttaccatattttgtatacagtaaatacaagatataaaaagatataaagcttgcatgtattaatacaattataataaataaaaatttcaaatattatgatattaaaaattcatttcccattttgtatggtaaaaatattaagccaaatttaaagattaatatattattttacatcttttattatttaattaaatagcatacatgttttttttttattgtcccatacctacttttctttacaacttaacattttgcattactatattacacataaaaggtacaactcaagaggtttcaaatattgttcgatatttaattaaataggacttgtttaaataaataattatgtgtttattgtagtttatttcgtaaaagtaataaatctttggctaactttttcaaacgttaatttttaaaaacatttattttcaaaatttcatatttatttttacttattctcgtaaaattttcattcactttgagtaaaacgactttaatttttttaatgcatatttgtttagttttaaaaattaaaaatttaaaagtaatcaagtttattattatttttgaaaatttaatttgaataatttttttaaataaagttacaattattaatgtctttaaaataaaaactactttcatagttgtattcaaaatggaaaataaaatttaatttaagtaaaatatttaaaaatggattattattattattatatatatatatatatatatatatatatatatatatatatatatattctttaaatcatttaaaaaaaaacaagtccttatgcacaatgaaatgtatgttttattaacaaaagtgacatagtaaaaatgccaacagttcttattgttgtgtaagataaaaaaaaagtgtatagataacatttttttagtgttgtatataataaagtgttttaatgtaattaatttgtggtatttcactataaaaattaacatattatattgtcaatcatactggaaaatatacacattatactcaaaataattatacattaataaaaattatttttaatatatgaactatgtgttcatatttaaataaacccatgttaatgagtcacattcttgtcaattacttctgcttttaatactacttacataaatatcttgaaatatataagaacatattctatgtgaattttcaatgcaaactttagattttgttgattcaattttgatacagttttatattggtgtaggatatt

SEQ ID NO: 2931 - DNA, 1409 bp, Glycine max
  Intron number 2 from transcript Glyma03g02480.1 (locus Gly ma03g02480) derived from phytozome v7.0 (chr-ID Gm03; pos 2239808 to 2241216)
agaagcaggctgcaacggtaaccctttcttactgtcactcaatgtgtgtctgtgtatgcctgttttgaatattctgttcagtgtatgctttggtgaatgttcgtaaaattgattttcaatgaaattgattttgatgtgaagtaatttatgattggatgttgcagtgtcaaggttttggaggtctctgcaatcgcagtgcgactgcattggtagcgtttgtcccctatttcttgcaatatcaaggattgtgataattttttaaaaaccttgttactctaaaagcatgttaatagtcgtgaacttagtgcaattttttttatccaaggcaataattgcctgaaggttcttcacctcaaaatcaattttggatccaaaatcaatttttgaatgtcagacccaagatgtaaatatgtacctaaaatcacttaacttgtattttaacgtggttttggataattgatcgcttaaccaaacatgcacttattctctgtttgttttagattttggtagaattgaatttggtgaaattcagtttcaatattgttggacctgattgtgatgtatgcttaaattaaacttgattataagttttacattggaaggtgtgctatggtgtgtcaagggagtgtttggtttaagaaaaaaatttgttttcgttttattattctgtttttactgttttctacacaaaattttgaaaccatgacataaaagtggtgacaaggtgtgaaagtttattggttttacttgtatattatgggtacttagtcaaataaggctggtttcttgacttggttttacctagagtagtgacttatgatgttgtgaaggttcatcttgtgtaaccttttcatttctacatgatacccttcctgattttaatgccattctaactaactattgataatgctttgatctggccttcttttggaggtagcttaactgtgtcttagttgctgaatgattaacattttcattggttctagccttctaggcattgtgttagattattgggttttgacttttgagacaaaaatgagggagagcataaagaagccatagtttgttcagtgagaaattaattaaataactggagagattggatggtaacagagcagaactcttctttacaattaattaagtactatcaagttatgatatgcttgttattatgtggctgtagaacttattgtattgaaatgctgtgaaatatggaaccataaagaaattgagtgaaaatgcattagaaatttttcttagtgggatttatgttatattctatgcttgtcactaaactactttttttttttaagcaagtcttgtgtatttttgtattatgttgagtcgtaactttctttcatttgaaaattttagtatattttaagcctcacaaaggcattggcatattg

SEQ ID NO: 2932 - DNA, 1041 bp, Glycine max
  Intron number 2 from transcript Glyma06g07500.1 (locus Gly ma06g07500) derived from phytozome v7.0 (chr-ID Gm06; pos 5455904 to 5456944)
gtttctgcgtcattcattaacattgaattccagcagtaagttacttcttttgcttttatttcatcattaatttattgcttatgtttccgtgttggttttgtttggtgacctattattgcctacatatcaaggttagttgttgaaaaatcaaacgttgaatgcttatgactactctccttacctacaaaaaaaaaaaaaaaaattcaaaaatctagaatacttcgtagacttctgaattacactgtttcatttttgttcctgttatgtcttaaatcactgtgaaggttatggtaggaaatagaaggagtgaatcaaaagattcacaacagattgaaatagtgtaagtagtaattaaaatgtcaattattactaattaatcattggtctatgtggtattagacttaatttttttaagtaaaaatttaaatttgaatcttgtgctcagatttcttaatatatattaatcatcaataaaattaataaatattttataacaaatcattatatgtacctttaaataatctgatcaacacaaaaagaataaacagtgacctaaatacctttttaatggacaaacaactcacacacaaattgtattctgatcccccacacgcaaatgcaaatgcatcgttttgggaattcttaacaacttgcaaaaagaaaaggtgtatataaaagccaaataagagggtagaaaacgagagtagctagcaaagagtattacaagttttattgcaggagtatagagctcttcctagacacacccgtgtagtcgtgtctcaaactgaacttatgagctggctttgtaaattaaataacacaataccatcaattaataaaaacttccaattaaatatattcattcattccctttaatcgtaacaaaaaatttatatattcattcatttgtgaactttttttattccagtctttgaatgcttattggttttatcaaaatgtgaaagaaaataatttttatcgacactgaaaatactgtaatttgtccatttgcagggtttgaaaacgggaagtagctcttgg

SEQ ID NO: 2933 - DNA, 1683 bp, Glycine max
  Intron number 2 from transcript Glyma18g53600.1 (locus Gly ma18g53600) derived from phytozome v7.0 (chr-ID Gm18; pos 61878572 to 61880254)
ccattcctctctccttccacgtcggtcttcttggtatggagcatcatatgcatccagcacatatgcctgtttctttattttaattttttaatttgtatgtttatatcttataattttagaagctgaggaatgctctggtcctcctaagtgtctttttttcctcctctggcccttgctcctttttgctaaaaaaaagaaaaagaatgctgaccacactctccctttcctattagttgaaatttattgaaaatcacaaattatgttgggttccccttctaaacgagaaggggacctatcataatttgtgattttcaataaattacaatcggtagtagtgtcactagcgtttctcttaaaagtttactgtatccgattgtcaatatgaggtgttatattcatatttctgtgtttgtgcttcttgctgtgattcatgtggtcataagaatggatcctctaatgataatttattaggttcatgtgaaaaaaaacttgtgacaatctctctttataaacaaatatataggtgcaatctcatcaaattttgtaaatgtctataaagagtgagatggaagcaaaattgcaccacaaaatcatgctaaaattttacatgagaggatcgattcgcatgaggtcatattttgttttcttttttatgtttttagatgtataatttcttactctttgtattggtttctttctctaattaggaataattttctgaatcctctttcgtagctacattgaagaaataaaatcaattccatagaataagttgtgaccctgagaaaaacaccgatcagttttgttggattcttttgattctctagatcgatggtagtttagtttgcctttaaacttaataatgtttttctttgaaatattgaattatctgctgtggtcatcagttatgacttatgagtatcatagagaccaaagaaaaatgtgtgtctatactctgtactctgtatagtattactattactattactgaatagaaaaagtgcagaaacactaacaattacacttaggaaataagcaagtctctacccactaacctcaaagaatcgtctctgccagctacaatcggaaaactaaccagaatgatcctcccctctccttactccacctcatctagataattgacttgtgttctttgtctaaaggctcttgcatttataacagaaaagaatatgctgcccgcatgccgcgcaagttccctttctaacttattccttcttctcccagagcaatctttccatatattaagcccaacatcgccttgatccactaatttgcctctaacagagtgctactagtttcagatttcaatttgttgacagtggtgatagtttctttcaacctatttattcactcagtggttgaacgttttagccactcattgataaaataggatagcactattttgtgcgtagttattattttcatattctgaggttgtcatagagcgaaccttctaatttcagagttccttagttgtttttttatgcaattatgttttttatggcctagttcttaaaaccttggatatccttttaccattcaggctttgtgtttttcgtttttctgacttgtgtatggaagtgaaatcattttccactcttctagtggtgctccagtttgataaataattaacccttcatttttccttttaattttatagga

SEQ ID NO: 2934 - DNA, 556 bp, Glycine max
  Intron number 6 from transcript Glyma08g48210.1 (locus Gly ma08g48210) derived from phytozome v7.0 (chr-ID Gm08; pos 46890568 to 46891123 reverse strand)
ttctacaaaagttcagtgttgaggaacgaaagcaggttacagctagtcttttaccaagcgtgaattggtttagttcttctataatagcaaaatacattacagtcttgtgttattatgagttatggctgtggaacatacttgtagttaatagatggatcgaaacaaatttgacaaaaattacataattggagaatacaagagcaatttagttcctttactgcactgcacttttataacaatactggtctgtgaaacagtgttatgacttgtgatagtccattagatttcgttaggggtgtaagagcaatttacatttgattttgattgtggaaggaagttagtatatggactgtaactagttcaacagtaattacattatcagaaaaaaatatgaaaggaatatgctactaatatggacagttagcgtaacctacaaaaacaattggaagagtaatgaacttgatatttgtggcacaattttatatcacaaattctgtgcattttttttgcctaatttgaaatttgattgtgatttcctttattcaatgacagattg

SEQ ID NO: 2935 - DNA, 4638 bp, Glycine max
  Intron number 9 from transcript Glyma06g16300.1 (locus Gly ma06g16300) derived from phytozome v7.0 (chr-ID Gm06; pos 12809849 to 12814486)
gggataccgttgaccggtaattgcatgtacaacctaaatatatttgcttggactttaaggcatgcattcatttttcacttagttgctttctctatcatatgtttgctgaaggcacataggagatattcttactttggtcataaaagtatgcttaacaatattttttttttgttgttggttgtgttattttttttttttggggggggggggggggttatgacagaagaggtttgaacctctgatgtacaaaccacccaatcttattacagctgtcagccgacttctagtggcttgttaattgttctaattaattgcttcaaacaagaccttttatttaatcagctaaaatactacatatattaaaataaatatatcagtacaagaggtactgtggtatgtacatcccaagatagccctactatgagctatggtaacctaatattagcaattgaaagcagatattaggtaactatagatctaagctgggtacccttctacaaaaaagaattctaaagatcaaacccctttatacaaaaaaggcaactctgatgttgctggaccataaaaagaaagggatgtcaaatcctttttccaggtttttgagccatgaccagcagaaaaggagagcatcatccttcagtttttgaccatcaaagctgtcacctgagaaaacaatcctattcctatgattccaagtgcaccaaaccagagagatccaccaaatctgccatctatgtggaaaaaaaccattcagaatgcattgagaaaatgttcttttggcctttctggaaaaacagagagtgtatttatccatgacagggtctcccaccacaatggcatgattttggtgcatccaaaaaacaaatgccctgcatcctcgtcatggtttaggcaaaacgggctgcagacttcatccaaaactacgttttggtttctaaggttcttcgttgttggcaatctatcccgaatcaatctcctatcaaaaagagacaccttgctgggaatttttagtttccaaaggatagacaatgccctctcatcttcttcttcaactgcatattgattaagtgcccgatatgcacttcccactgagtactcccctcccggatctccctcccatgaccagctatattgatgatggacctgaactgccatcccgtcaatatcttccaggaaatgtgctgccccattcatctctccctccattaacattctcctccactcgagctgccattcccacaccccacttgacgctgaactcatctgctgaatataatgctgttgctgctttgagatacaggacagtctaggatatttttccagcaatgggaccccatcttctttccagccttctttccaaaatttcactctgctgccacttccatttttccaagagacttgatttttgaaccagcttccctcctctatagaattgcaaacaacacataagtcccaccaccaaatagaatttttatgatttcttcttgtctcgtccagattcctccaacttccgtacttttattccagcacttgagcccccaatgcttcacgatggtggaacaagttccaccaccattttccaagcaaagcatagttgaacttcagcaaatcccggactcccatacctcctctctccttaggtagacaaacggtctcccaactaatccacgctatcttctgatgctaagaatctccctcccataaaaacctcctctgcagcctcaccatcttgtccaccactttctttgggaccctaaaaaaagaaaagaagaatcgagtttaggattgactttatcaaagccaccctacccacgaaggagagatgttttttattccacttttaaagctttctctcacatttatggacaactggatcccaagtctcacttcaccttgggtttgccccaatgggtatacccaagtacgaaaagggtagtgacaacaatctgcagtttaggtagctagcaacacgttgaacccactgctctgacatcccaaacaccccaaaacaacttttagcaaaatttatctttagacccgaaaccaatgcgaaactcctcagcataaccttgatggccttcatgtttgacattgttgctttctcgaaaaacagtgtcattcgcatattgcagaatgctaatgtccacattgtttctccccaccaaatttccttcaaacagatttttcttctgagcctctctcattaaacccttctgccctttagcaacaattaaaaaggaaagggactaaatgatccccttgtctgagtcctctttgagggaagaactcatcaatggggctgccgtttaccagcactaagattgaggatgatttcagacatccgtcaatccatttcacccatttgtcgtagaatcccattcgactcatcatgtacaggaaaatgtctcaacaaatagaatcgtatgcctttttgtaatcaactttgaatactagacaactctttttacacctttttgccttgtccagaacctcgttggcaatcaccacactatgcaacaagtgtctcccttccataaaagtgctctaacgttcatctatgacttttgacaacacttgtttcaaccttctggataaaatcttagccacaatcttataaatacagcctattaaagaaaaaggtatgtattcgttaaggccctgtgggtcttgaaccttgaggatcaaggctatgaatgatgcattgcttcctctggggaacactccattaacaaaaaattcatctaagaagcgaaggacatcagtcttgagaacgtcctataactccttgatgaacttaaaattcagtccatcagggcctgggctcttcgtactgccacaatcccacactgctgccctaacttcctcttcttcaaatcgggccacaagagcatcattgtcctgttgattaatgtatttaattcaactccatccagccgcggcctctcctctcccacctccttaaatctcctaaaaaagaattgtttaacttcctctttgactttggttggttcctccacccaacacccaccagaaaacacaccccttaacatattgtattgatgcttcctatttacaatcatatgaaagtactgagaattgcaatcaccttcctttaaccatctagaaatcctttacaatccccccctccccttgctccctctgactaacccccactctttctgatggccttcttatgctattaaagtcgcctaagatacaccagtgaccaacattgcttgcccttctcaactgcttaatctggtcccataagattcttttcatattcacatcacatggtgaatatatgttcagaataactactctttctccatagccgtgccatatcccttgtaaaaagatgaaaccacttccagttatcttgttctccattttaaaagtggcttcactccacaaacacagcataccccccggactattaatagtcgggttcaattcccattttacctcagaatatccccacaatgcttggcataaagctttgtctatagcttccttttttgtctcttgtaaacacagcatacctactgtttcttttatcaccatccttcttattgagccccatttaatccccctccccagcccccttacgttgaaactgataatcttcataagatacctgcactccttcccatcttctgagcttcgcccttatctctttcgtccagactagccaacttagatatcataatgtcctcttggttgcaaaaactgacccccatttttttagccaaatcccagttgttagctgcctcttgtgaagccttgcagccgttaggatttgtagccgatcttgaggtggattcgaccacgttcatgtctacatattggtcctcccgagttgctaattgttttagtccactaccatcatccaaaataggagaagctgcacgaaaaatgctagatggaccagcgacacaagccctttagctgccactgccccttatatccccttcagtagcaccttctacataattgggccccttcttctttttacacctattccttgaataaatcttccacccagattgaggcccatattaattattttattgaaaatattaaagttgctctataagtcaattgggagtagaatctgatatcatcatgttggtaatggctactgttattaatttcttagaatttggatcaattatcttggtcgagaagttattatgattgatgtatagggtgtgtaatgacacccatgaagtggatggttaaattctgaggttcagaaagcaaaaaactagcttgtagccttgtataatgtatagctgtaaaaggtatctttgtcaactattagaatagagcttagtagtattacatttgttgcaccatcttggcaccctattctttttatatcaaattatttcttttcaatcatggaaatttgaatatagctttctgtgtcttttattcaccctggaaagagaagttaatttttgtggcagttatgaccatgttcatttaagaataaaaagttatatcgctaatctaatttattaactggaaacatagttttgagtaatgggtgcatttaattacatgtcttcaattcatgatgttattctgggatttgtaggaattctccaaagattattgaggcattgagtgtgg

SEQ ID NO: 2936 - DNA, 4799 bp, Glycine max
  Intron number 1 from transcript Glyma15g12940.2 (locus Gly ma15g12940) derived from phytozome v7.0 (chr-ID Gm15; pos 9628965 to 9633763)
cctcaccaggtatgtaagcttttctcttctttctatctcgttatcaacaaaatcaaacacacaatatttgatgttttccttttattctagcttccctttcttttttgtttttggttgttatatgatcacctaatcttaattagcttaagtagcaagaacaagtataaaattacaagtacacaaatatcttagcttcaatccattatatttaaacttgtctttgtttatgtctgtatgtctttagaagggacattagaaaagataatgcatgggaaggatatgttatgtaaacatattcttaattacaacaagtagatagtgggaatattgaataaagaggcattctcttaaggtgtttgtgcatggaattacgtgaaacgttaatttgtttggcatcattgagcttgccatgcttggttgcatgcaaagttagcaatcatattcatgaggccaccaaaaaaaaagttagcaatcatgaacgattgaggacacacggcacgaggtagcaatagtagtgtaattacctgggaattgattctcatgcatgttgaattttgaagactttcttaaatgtatagaagtaaattttgtatgtatttctcttcaattcatacgcattaattagatgaaaccttatgaatatttatgaaaggagagttagatttaattttgaataataaaaacagtttcactaattgagtaatatttaatgaatcaatgaataataataaagacgcgttaataatactacattttactttttttaataaataaattattttgatttgttaatggttagtgaaaccttaaaagtgcttaaaaaacaattataaaataaaataagatacataatgtgaaatattgctacagtatctttttagaccaaaaaaaggggaatagaaaaatcgtttaattggttttacttagttggcagttgtagtgacgagctgttatacttgaatttacacaatcgtaaattaaggtgggatatgtatttaattaaatacatgatttaatgattacataatttttttatgagtaatgattacttaatttgtgataagaagatacaacatatatatgatctgatcacaactcaccatcacaagactcaaaaccattgaaaggcttaaactaaaagatgagacaaaaacttgattgaatgttattttaaatgtattcacgttccttgatgcgcactcaggtgaagtattgggaatttacactaactatatgatgtatctcaattatttctaccgatccatagaatttttttttttaaaaattacagaatcgatagaattagttattgatataatatgataataaattatattattaatatagatctttaatatacatactaaaaattgaatttctattaagcaaaaatgatatgacagagacataagctaactgttaatatatgacactttatttgtaatgaaatttactatttcaattttttttttatcaaatagtagttaataaatatatttttcataaaacaattttgatactcaatatcttaattatatataagaagttttatatttgataattttttcactactatatagtatttttaaactatctttttaaataataataacaattagtgttatatcattaaccttttctcaagacaaaagaatagagagaatgtatcaagtgagaaaattatttttatattagaataagatgcacaagtattaatcactaaactttattattaattatatttaagattaaaatataaaagtcttataaaatttataaaaaaagtcgtataacattatttttattaatattttcatagataaaaaagacagagaaaatatataaagtgtgagaatcatttttatattagaaataaaatgtaaaatattaatcaataaattttattaatttaatattaaaccacaaaagtcgtataactattctaaaaaagttataaacttttctataaatgattgtgtgatttaaataatatctaattttaatcttttctgtttttttagtgtaatcatttctgtttcattaaaaattattcttcactcttatatggaaattcaacttatcactaagtacattgatatagataagtaaataaataaaatagatgtcagaagccacttaaaaataacaattgggaaaaagaagtcaacgctggataaaaaccagaaaatgagtagaaaatttgaagaatggaagactttgggccagtagaacctggacgggagaacggtcaaaagtctaattctttccttaaaaatataatattaaacttattagttttcaaaagatacaaatattatggaaaaaataaaattattatttaaaataaacattgcgtacgttaattaaattaatttctaaattaatagtcacagaagttaatgtaatggacaaaaatatatttcaaaaacttatataattatttttgatctattatataatcaattttattcattccttctgatatatcaatgattcaatgtattattcttcggtcgaatttgcgtggcataaaatttgtcaatttacttccttcaattttttatttttttttagaatttactcctcttcggtcgaatttgtatgctactcttacatataaaacaggaattattgttagtatattttttttagaatttaataaacatgaattgtgaatattaaatttttatattattaatcaattagaaattattttcattatttttcttaaaataattgatataaaagctaataaatttattaaatttgaccgcttttcaaaattttatattttttgtgcatttattatatattcaaagttttatattactaattaaataaaaataacctaatttttttaaatgattactataaaatttaataatttttaattatatgattgtacagtacatgattagatgactatttagagtaaaactctctaatcctaattaaattatttgtatcaatgaagtattactattatgcatagtgagaaagaaaccgcgtggcattagtttttgtttttagttccattcctaaaaaacaaaagattaataattaactttaatgatttaaattaatgtagtaaccccctaaaaaacgattaatttcattggagggtatcactgtgtatgaagagagagaaaggaagagagaggaaggaagagcacagcactacacagctccgaaataggagggggagaaattttgtatgcgttggatttcgtagatctgagtacgtttttctcttctcctttctattcctttcaatttcggttttcaatcactctctttattctctctctctctctctccaaagcttgtggttctgtgtttttttgtgtgttttcatttttatttttggtgacccttttgggttcattgctttgaacttcattttaatgatgttactgtatcttccttggcccaaagttcttgtttttaatcgtttacttcgatttttctgtttccccaacttttaaagttttgggctttgtgctgggaaatcgagcatttcttggagttggtcggaaaggtgtaaaatttttcagctttttggtcatcggagagttgttgggttcttattcatgtgggtccagaaccccaattactattgctagtttatttattttttttttttaaggttagttggttggtttgttacaattgtttcagccatggtgagtcctttgtcggtgttctcttccttgtgtgaagtgtggaaacatcaattttgagggtgttacctgatattcagaggtattagcatgatgaaaactagtcaacgtttaacactgattcccaaatggctggtgttattaggttgcatcagccatcagattaatgaattcttctgcaagcagcaataatgatattgaatgtttagttctctacaattatggatgatatccttgtcacttaataagtatcaggaaaaatcaacctcatttaattttttcttcttctccaacatttttgggctggttggtggggtggggggtttaggcaaagaatgatagcatcaaatagtgttgggttctctttgtatgtgttctccatttcttgcaatattagtatatattctgcaaaactgaaggtggtaatttagctgttacagaagttggatgatatttgaagggtcctatatatatgtttacttaggctaacaatcacttatagtttctgtaggttttgtttctatagagtgatttcatcaaataaaaacacatgaaaagtttacctagttataagatgacttaagctaagtaaaaaatcacttgttttttgttctgtaggcataagtcctgaggaaagaaatgaagggaaaaagcaagaggatttagataaagaaaatgaatgaaaattctattaaatttgatcaaatggtccacatttggatgtctgagagtattttttttaaggtctgttttgagagtacttgatgatccattgggtaaattttgttaatggcaatttgaaaagttggtcgagggagtcttatataatgtaaatccaaggtcaagccaaatatgagttgtgaactctttcacattaggtattgggatcagaatatgttaattttgtaatgcttaagtgtttgaactaggaaaattcaaggttgctctaaaaggtattcctatcttgtggaaccaatagatttgtgtctgtttgcttgcatgtctgatttttccatcatttattcacaaacctcttccaatatgcagttaatttctagatgtcagaattaatttcaatattatattatattcacttttatattgtttgctgtcagataa

SEQ ID NO: 2937 - DNA, 3752 bp, Glycine max
  Intron number 2 from transcript Glyma11g00220.5 (locus Gly ma11g00220) derived from phytozome v7.0 (chr-ID Gm11; pos 19114 to 22865 reverse strand)
aggtttccctaattaattccccacactatcttattgatgcatggctgttctcattttaatttagattgaatttactctttacatgaccaacatctgcaaaattccataacatccgtttggaactgtgaggttccaaaattgaaagtgtattttagaagaaagagggataagtgagtatgtgctagagaacagtggtaatgtggacgggttataatagctagtggttagtggtaattagtaagggaagtatataaatataaatactgttacaatcttgagtagggattgtttttggcttcttggcttcacttggctgtttttgttgtgactgattgatgtactgcattgtggtttactattttgctttattatggtgttgaaatgttgaattattatattatttattaggttttttattattatttatatgaaatagactcttacgagtttatgagtcaagtttacggagcttccacaagtcctatgtagactcttgagtttgacaacacatcatcactaactatgtagtcaatagcggcggagtggagtggcccctatccgcgacgggcacctctgtagcggagcggtttcatgtcgcggctggagcggcgcaggttttggagctgtttttcgcaccgctacttcgaagcctccccctttccctcctccttcgccaccctccgtcctcctccccttcatgcgctgccgcggcggcttcatcccctcctgcctctccgattacattgtctccacgcgcaacttcgaccgcggcttcaccgtgatcaccgccatcctccgccgcatctagccccttgacaactctgccatctcgaaaggtgtgtcccccgccgccagagaatccatgaagcagaccatttccaccatgctcggattgctcccctccgaccacttcgctgtcatcctcactgtctccaaacaccgcctcctcttctccttttgatctttttcctttatctcctctttttgttctcatttaatctattttagtagcaatactagtaatttctctttactcctacaaataattaattttatattgattaagaaaattaattaatgttatttaattttattaatctcaaataaaaaatataattatttttttttaaaaattattaaaatttgatatcataaataaaaaatcattaaaaataaaaatgaaaataaataaaaaatattttaaataacataaaataaaataaaataatttatatttaagtacgttattttctcttatatattatttagcaggaaaaaacttatatgtaaccgttggtgcaagtgctacaaactcggttcctctaagcataattatttaatttgttttggagggtattttatcattttcaataaatttttctattttatgtcttgtaacttttgtttaaataactatgttttgagttatttatctgtttttgaacttttatatatatatatatatatatatatatatatatattaattatttaacatatataaaaaaatattagaatagcggtcgtcccgctatcccatttttggggtcggccgctccgctacactggtattgacaacaactatgatcactaatagggccactgcatttgggctttgccatggagacagatgggttattaccaagggctggattaacatcttggctaagcttcctatgtcagaactgccagacctgggtgctcagacaatggctgatgttaggctggaattagaaatggggatgaattccagaaccacaacaagcatcgggacagggcaggaggtagaactattgggcatagccctattagagtagtgttactccttaagtgactgtagctcttttctttatgtttagtctttgtctaactctagttagttagtaaccactgtagttagtgtattatagactccctatatgtagagtgctctattcttgtaatacttgtgaaaaattcattttctgattaatgagaaatacagtttcctttctctctcgagattctatcaagcccaaaggaagatcagactagctacggaagtaaggggaggtcaagatctgcaactctgaatggttttgacccaattgtaggtagtggaggatgatgctaattataaatggctacaacttgcaatgggtccatttgtgtttgacccatgagaaattgaagctattttgagactacacatattggtttggcttgatcatcatacttaaaccaatgggaccctggtaggagttttatgacttcactacattagtggggaaacctattggcacggcagcagtgcagtgttcaaaaaggcagcagatagtgccaagaactcttcttttcagcaactacaaatggttcaccttgagacaaggtgaaagtttaggggggagtattgttgggtagccccgttagtagtagttacaatagcttgtcagttacctatctgttagttatattagtgagttagttagttatgtgagatggtttagttaaggcatgttgcctataagtaagaataggtgttgagagggagggatatcttgtcattttgcaggaggattggggcctttgggcattggggaggtgcagaccctcaaaattctgtaagtttaaacagttttcttcctgaaattctgtagtccttttattattctttactgattccttgcaccgtccttcagaggaagctacatgggaagatgttcaggtgatccatgagcagtttcctcacttcaaccttgaggacgatcctgaattgaaactgtattttattagaaagaggaataactgaataagtgagtgcttgctagaaaaacaatggttatgcgagatggattataatagctagtagatagtggtagttagcaagggaaacatataaataatgttactctcataaatagatattttgtaataaactgtaataaactcttcccttggcagagaaataccattggttatttctttgatttctttctctttctttatcctttatctcttaatattttactttaaatctttggggacctatcagcattcatgtaattaatacttgttccatgtagtatgctttttggttatcgttaattaataattcattttttagaaatgttattggtacaacattttttgtgtctatttctctcctcaacaacatttattacatgtaataatgatggagagagatggaccaaaaaactaatgttgttgaaattgatgtataaactagtagctccttttcttttcatgaattgtaattgctagctattttcaactcttaaagtagagtgtgttgcaggcttgtgctgtggtgttctcagaaactagagatgatttcaaactaactaggcaattgtttaggatgttttctttccatattgcttatttcaacaatctggttagtattttactatttttttttaacaagatctgagttcagagaacttatcctacttctttgtccacatttgatgtgaatcttttttttttcctgtctttgagggtgatgcttgaccgagcttcccttctatttttgaaggggatttaatgtgcatatttcttttactttaatgaggcagacattgattatttccttaatatggctggtcacattatagcttgttttaagatgcgggttttgagagacattgccttctacaattctattagcgttaaatgttttatattaaatattttgtcttaagtgctctgtcattgtaatctgctttccctttatcattgtgcagcgtgttctgt

SEQ ID NO: 2938 - DNA, 1457 bp, Glycine max
  Intron number 1 from transcript Glyma06g41500.1 (locus Gly ma06g41500) derived from phytozome v7.0 (chr-ID Gm06; pos 44778028 to 44779484 reverse strand)
tggtaggtgttgaatttggttaaccagtcttggaggtaatgctaatagtaattgctaagtgcttacaacaatgtttttcactttcttagacaattttcttttctccaacaccatgttcttgctgttgttgcttgtgaaaccgtattattaatcagtttatttatctgtttttccctgttatgtcttaatttgcataggtagatgtatagaactgattgttactccttggtgatttgagggtcttgcgttttgaaagttgcaaaaatttgggtccgagttgaagttttgaattttgatttgatttagattttttgcttgaataaatggttttgggtggagtggattagtggactttgaattaggtcagagattctttttctgggtttggaggaagttttctgcatttttgggtaacttggtatggtaggaaaggtgtatatgttgctgcatccatgaactcagcatcagggagtggggcagctgcacaataacatcaacaggaaataacaaggtttaacttttggatacatgtgactgccctcgttttcaaactaaggagtttttgggtctgcaatgaggaattgtgacgtacatggtattgttgttgttgttgttgctgctgctgttactattattgttattgtatgcttcgtttattcttactccttgaaatttggtatgtttgtgatgtctcagtctttctcctggtgtatattagaaaattagtgtatgagcagattttctcttgatgtggaaaaaatttattaaggaatcttttcctctgtgatttttcaaagcacatgggaggggttttggaattgcatcctttagaataaattctgatggtgtataattttccattgctgtttgtttcttttcctttactctatgtttatacataatttatcctattttctgtagatgataatctgttgatgagactgagagcactaccgtaccacaactttaacattcaaagaatctttttgatgattatgcccatctaattttttgctccaaattcattggtttcatttatttgatattgacactgattttcctcttcaacctgctaaatcagatattccaaatttctgctctatttgttcctgtgggctaagagagtagtgattaattcaatctacaaactaccagaaatatagccctatatgtgttaatcagatcatatttttttagtttatccaagttcatctatttcttgtatgtatgtgtgagcaattatgtatggcgcgtttcttctagcttctccacttgttaggctagtcgatgattgttgttgtgaacattattttatgacattgtcgtgttatgctaatattgacagaagacttctctgcctttcaaggtttatctgctattattgaaagtgttgggatacaagtcccaagcagaactttatcaagacagctgcttttagctgaggccatcatcatagg

SEQ ID NO: 2939 - DNA, 1408 bp, Glycine max
  Intron number 1 from transcript Glyma20g39180.1 (locus Gly ma20g39180) derived from phytozome v7.0 (chr-ID Gm20; pos 46577030 to 46578437 reverse strand)
gtcagcattcatctcggtatgtgcctatatctgaatgagataatgcctttaataaattattcttttatctaaaaaatctgaaatagataatattttaattgataataattatagttcttgggttcatttggttttggatcatagctctcttgtcagttgttatcatctgtatatactttattgcattaattaagttgatggattttttgggcttttcatcaattagctttgggtagctttgatatttgggtggatgagaagaaaaatgagtatatctttaagcttttcagtttaaaatttattatggagaaccaaggtattcaacattggaattttacaccttagatcggaatgggggtaaaaatctaaatcgaatcctaagatataaaactgaaccacctgaagaccatattagattcaaatgcttggtggttgctgtctcagacagtggttagggataggggtcaggtttcaatgacacagatgcttcatgaagaagcagcagcttagggttcacagtcgcccaagatgaagaagcttcgaactgtgttgattctgttgaatcaaactgggcgaaactaggtcaaaaaagtttcaaatgggtcagttttgtgaaattggaaaaccactatgggcaacaaagcttttcctactgagttttaaatcaattgcattcctaggaactctaacttgagattgcttattaagctagaatagttatacaccaggtgatctacatgctcagtagtgcaagaattgatgtttgattatattttaaattttagttaatggttaattagtaaaataacaaatttaatgctgttgtttatttctagcggttttgtgattatgattttttggggtaataaccataaataaagaagataagttacaagttaaatagtatagaggatgtacagtataaccgactttgcattgttggggcaaaattatattgtgatggaaagctatgacagcataatcaaggaaccgatcttgtgttcgagattttattgaattattatacaattaatcttttagaatgatatattgacagttatggtgtcactgaccatgcaattgttgcaacggaaatgtggctttagtcacatcattgttctacccaaagctaaaaaaagggcaaatagtgctgtaatttggcctttatatgcgtcttcgatgcaaatgactagcattctggtgtgcttaataaatttcacttgacgatgtagatccttttctttttctaaattataataatttgccttttcatttatcatgaaaacacggggattaatgtaatgttgttggcttgttgctgtgtgacgcacctctttcattctaattcggtcctttatacaatgttctctcagaggtagcagtgctaaagctgaagaccattcactgg

SEQ ID NO: 2940 - DNA, 1748 bp, Glycine max
  Intron number 1 from transcript Glyma20g30360.1 (locus Gly ma20g30360) derived from phytozome v7.0 (chr-ID Gm20; pos 39029311 to 39031058 reverse strand)
actttccatattacttaaggtaatttatttatagtttcattcattatcattgtttccattttaaaatgaattctagtgtatttgcatttcttattaaataatcctgaagggtcaaagtgttttcaagacttaaaccaatttcatcttcatgttagacttgtgaatttcatggcaatttgctgtgaatctcacagtaaatgtgttattttctggcttcagtatatggttcacctctcatctcttttctcagattgtttgttgttgactttacctcacctctgctactttgtcaacctcagtctttctttgatattctgttgacagttctgctttggttttcaatgtaaagttattttggatatttattgggtaagaaacagatgagaagatgcaaggtgatgccactatcctcacaagtgtgttaggactgtaaatatatacaaaagaatgaatgagtctagaaatttatttgttgcgattgaaatttgtgtttcctaataaaatgacactttggttgaataccaggtcgtgtgctatgacacttttttccctagtaggttatggcttaggttaagcatatccatcccagataccagcttcgacctcttattagaagatgcaaacttttctagttgtgcttttctatacttttttttttagttttcagttagtacttcctttcatggaatctataaaatgtgatcagaataaccctggacattgaaagtcataatataagtcatactagctgacatgcacgggaaattttttttgcatagtccaagacttttgcatctgagggtccagattctgttcaaagttctacacttaaactcaaggctcaattcaatttctctggagttataagattaacttggtggttgaagggagaagggggaaggagaggtcatgggttcgaactaacaaaaaactaacaactaaaatttgcctatatatctataaacagttcaatttctctgctgcatttaatgttttaattggctgggtgcaatgctcttggaatatgtgatttcctccaccgagatcatacttttgttctaagaaagaagttaccattaatgaagaatgttggttagatgggtatttaggtagaagctataggttcaaatcacggcaaaaccaacttaatgtacccaaaaaatgtcacgttgtctcatagtcttctcaaaagttcctgataattagatacctttgccatttttatatttagcatgccacgccgcctttatcatagatgagataattatgttttactgctcttatatggtctagttcacaggtaagtaagtcgctatataccaacttttaaggatttcctaggtataaaattatgataaataattattaactactgaaaaataaaataaaaatatttttatgtttgatggtgcatcttggattctattgaactcaaactctggcttcttgatttttagtcttattggttctaacaattgtaccctacactcgatcaatcaccttgttctgggtaaaaaataagcttaacaacactgtagtttcctgaagtcttcagcatggatctctatatttggatctgaaatcctgttacatgtggattcaatctagccgtgcaggaattttatgcgaataactgttttcctgatttgtcatgataaactcacccctgattgtaccacgtcttatgttcctgtataatgatttaaatgacagtgaaagaatccgatttgtgttaacaagtactggat

SEQ ID NO: 2941 - DNA, 6143 bp, Glycine max
  Intron number 17 from transcript Glyma13g22450.1 (locus Gl yma13g22450) derived from phytozome v7.0 (chr-ID Gm13; pos 25964205 to 25970347 reverse strand)
caggtattgtattggatatgttatttttagcgttagagtctgacaggaacagtgttgattaaaaagaaaaatagagccaaagctccttacaaccagaaaatattttgaaagccttggaatgtaaaacagcaactccaggaataaatgtgactgaaaaagagactccacaaagaaaatctcagccttaggaatggagaaccccacttaaaccatgttctaccaaaattgtccctatgttccttcccactatcacgatcccccttagtcattttgcgcccattcagttaggattctctactattctctttgtttcagctcagcatactcatcattcctttcatctccccccttggaccataactaactcctcttttgccccattatccataatctgaggcccccttgatgtttcttcttgagtaaacacaagatatgggcaatagagcttaatcaactaagacatgagaatttagtttttgttacctaaaaccttttacgagctagtggaatgacaaaaacatgctaggaagagatgtggtagggtgggctaatgcgtaaaatatgttaggttcgcacaagaacaagtgtaccctacgcaataataacagtggactcgaaggtccgaatatcaaccccaaagaaccaattgtattcccaattagttaagtttattaaattaataatagagatgattgaaaagaggatttaaatattttcatgattttagtttttataagaaaacaaataaacaaatataaagatagtattagtgtattaagtaagttttactttgtgatttagttaagggggagtatgaggctcttcttaacaataaaacatgggatcttattcctcttcccaaagacagacaaagcgtgggttgtaggtgggtcttcagaattaagtgggctgtaagtgggtcttcagaattaaggagaatgctgatgggactattaacaggttcaaggctaggttagtggctaaaggatttcatcaggttgttggttgtgactttaatgaagccttttctcctgtgataaaacctgttacaatcaggctaattatccctcttgctctcactaataaatgggatttgttccagctagatgtcaacaatgcctttttaaatggccatcttgaacagactatctacatgcaggaaccacaaggcttcgaaagttcagataaaaccttggtttgcaagctacaaaaagctttgtatggcctcaaacaagctccaagacagtggttggataggctcaaaggaactcttttacagcttgggtttgtggccagcaagtgcgatccttcgttgtctgtttattaagacaaagggcacattatctacattcttgtttatgtagatgatattattattactggtacctccaatgtagtaattcagcaactcaccactaagctgcattccaatttttctcttaaacaattgggaaaacttgactattttcttggtattgaaatcaaatcactggctgatgggactattctatggactcaaagcaaatatacaagagatttgcttcagaaaaccaaaatggcataagcacaacctatttcttcccctatgattgctaattgcaagttaaccaaagctgactcggatttattcggtgatccatctctctatcgatctgttgttggtgctcttcaatacacaaccattacaaaacctgagttaagctatgttgtgaacaaggtctatcagttcatggctaatcatatggactctcactggacaactgttaaatgcattctaaggcacctcaaaggctctattcatcatggtctgcatttgaaggctgctccttccttagaggtggcagacctggtggattgctttgacatggtgtatttggcagcataggaataggatggtcttccaaaatgaaagtttcaacagtcataaagtgatggagcatgctctattttattgctgaacctggcttaaaaatctggagaaaggatttgatatcctgtttcacttatggttcagtaacattagggatagttttttgtgttgaggggggatagtttatataatacaagttaggctggatgggtacctagcggttagctagatctttggtttcctaattcaagttggttagcatgtattaggtcactacagttctgcaccttgcaagtgctaggatgtatatacaactatactgcttgtactatttttaatattctatataatatatatatacttttgctgataaaaaaaaaggctgctcttcctctcagccttttactatcaaagccctgtgtgatgctgattgggcctcggatctagatgatagaaggtctacctttggtgcagtgatttattttggtcctaatttggtctcatagtggtccaagaaacaacaaattgtggctagatcttccactaaagttgaatacaggagctcgactcaagccacgactgaagttacatggattcaaactctcttaacaaagttattgttctttttcagaccccagagatttactatgacaaccaaagtgcagctatatcactcataatctagtttttcattcccggactaagcacatgaaaattgacatctttttttgtcaaggagaaagtcttagctaaagagctcaaagtgtatcatattcctgctatagatcaatgggctgattccctcactaagcctttatcaccaactcgatttctttttcttaggtccaaactcaatgttgttgatttctgattctcaaccccattgagtttaaggggagggggggggggggtattagtgtattaagtaagttttactttgtgtaaccagaagacttaatagaaaggccttggccattaccaatgtatatttggtctggccttcaaatggaccaagctgctacatgttttgagactctccagttacgtagaacgatgcacccgaatcaggtatccaagtagtagagttaggatcttgatttttagaattaaccagcattgcactaggttaggagtctttgtgagaattagttccctgattttgttctgaaccgaaggtgtttgatgaattgctttgaaatactggttccatcagagtgagagacgcatttggctcaaaatcagaatcatagcgaaaatgacacatcgttgctgtgtgaccaaatttgaagcaaacttggcactgaaaatttgcataacgaccggggcctttaccgccaccacggcgacctccattgccgcagtcagaatcattgcctccatgactgtagcctccgccgtgattgaagccaccacgatttccaaaataattggatcaattttgtgaattgaaattattcgaggatgaattgtaagaatttgaagatgaattgtaaccttgagcaacattaatcgaaggtgaattagcaaagcgcttctgaaactttttcatgtatgtctcatgtgcgagcaacagtgccactacttctctaatcggaagtgattccaacttacttttgatcattgagatcactggaccgtactcctctggtaggccttcaagaatcacgtcaaggtgttcacgcagaaaaataggatctccacacgatccaagcgcaccgactatgcatttgatgcgcaaaagaaactcacacattgttttctgttcagacattgtagttctgagttctattcgaagtatcctagctttcgcacgtgtttgcttttgaaaatactcatggatctgctcccaaagctgatatgaatgaacgcatctgataattcgagatatgattgaaacttaaagagtcgattggagccacgacaagagaatctgatcttattgttcccaattggtgtatgctggattttcatttccagcttcacaatctgcctctgtgagaaagcgcatcgggatctaaggacttgccacgaaacgctgaagtctatgagccttgatgacagattctacttgttgcctccatagcagggagttagaatcatctaacttctgagaaatcggatgaaaagaaggttcggaagcaaaattctgatttgtcaccatggatagaccttaagctctggataccatcatagagtttgagagagagaaaaagaagaaagatgaaagatattattattgatttagaaagaaaaggtcagttacaaattaattttgtttctctatttatggagaaaacaaatatggttacacataacttgactaaggcagttaactaaccaaagttagttactgctctaatagaaataattgttctaacagaatcacaagtgttctaactgaatcataattgctctaacagaataacaactgctctaactgaatcacaaagtaaaacttacttaataccctaatagagaggtttaagtaacgataagaatgatcaggagttatgactgactgataccaattttctcttaatcctagtcttaatgaaattcccccagttaattatcgattttcaaaatcaactaaaacctatgatcaagattagaagatgtttttttgccttaaatcaataccccaatgatcatggatctatcaatttaatccaaatgattaaatcaattttagggatgattaattaaagattaactaatctattggaattacccaaatagtttggatcatgcaatttggtataaaacattatctaccaattacatgcagaagatcattactatgcaatcgattgagtattaaaatgacccgttccaaataaacattaaaatgaggaagataattaattaacataaaacaatgaagaatttcatttagattaaggagaggagtacaaatggatagctacatcattactctcgaactaaggggactacccatttatgatcagagcaaaactaaagaaatcttagagagagagaaaacatcactaacaaaattgaggtgaagtgagatattattcaacccaaacagaaaccgagtataatacagtttatatagcagttacgatactgtaactgtcaactaacttgagttagttagtgcaactgctgaacagttgtcctaactaattgtcaactaacatagctgtaactgcctaactaatgtaaaccaactatagttagactaacagagtaacataactgtgtaacagcatgactaaatgaaaagaaagagttacactgagtaagtatactcctataaaaactagcaattctatatagagtaaacatagacatacctataggcaggaacaatgatcacgagatccgttctaacggtgttgtccacactcttcagctttcaaaaaccctcaaggttctctcaaattcgtaaaaagataagaataaaattgaatgcctttatttataagtcagagacctctatatatagcttcctaaagataaatacacgaaaatgtgcattacgaccatggtgaatccacctcaccacaaccgtcgtcgaaagtaacactgaagccttgggttatggattgactacgactctcttggttgaccaccgccgtggtgaggtcactcgttatcaaatccttgatgctattctgaaagggctgttatcatttgactatagctgtgttgatgaccatggccgtggtgaatggatcacatccattatcaagtgcagagtcttcaaatcttcataaatttgtgtaatttctaactctttcactcaattgagtgattgtacttttgcaatacaaaactagtatccaaatgtgagttttactaaaaaaaatgcatacaaaatgacacaaaaaatcacataaaataccacccataaagttggtttatcatgggcttactgctattgacgtgcaatgaggaaggatttgctgctgagaagtggacaatgatatacattacagatatacaatccaaaattagttcttaagattgatcctaattgattcttccatatatacatgatatgctaccataaataatctagatattataattttgatttctgacaatttgtgtcctgtgagcatttctttatgattttgtgttagcaatttaaaaagtgtactgtgcattgactactttcaaatttgtatcttgattttgaatttatcttgtattctgatcatttttcagaatcttatctaatgtatgtaacttttgaatgtcaatgacagaaccacaggagctggacgaatacttaatttatttg

SEQ ID NO: 2942 - DNA, 3955 bp, Glycine max
  Intron number 4 from transcript Glyma12g10530.1 (locus Gly ma12g10530) derived from phytozome v7.0 (chr-ID Gm12; pos 8476882 to 8480836)
tacgatcttttttaggctttacaacattggttcaggtaatgttgtgcagtttttgttgataaatatttgtgttttaatttaaaatttataaatatatattaattctattttataaaataaaatatttattttagatttttttaagattttgttttaatgagtcaaactagtttgttagatttattttgacaattgtaggttaatttccaactgtcatatgttgtttgttgcttatatattatctttcctcatttctaaaaagatgacagaactacagtctcatctttttctcccaaaattttctttcttctcttataaaataatttatttcttgagagtaaaagcattggtgttcaaggttcgaggatcctttcgctgcacacgatcggaaccaacgggttgtcgtatcttgggagaggagcgcaatcataatttcttacccgtgcagtgggggcgttttctctctaaggatagcgtttacgcgcttcaacccaggctatttaattctttcccttgatttaatttttcattgtgctcattgtatgatataatgcattatttatgtgatgtcaattaaatttaatttgctactgctattttgttatttaattcaagactgtgcatcttcttcatatttattttctttcattttttattttattttccaacagtcttagagagaaatattagttatcactttcttcttgcatagtcttttctgcagtagcattttattttgtcaaaatatctgtcatgaatatgattgactccccttttagtaagtctgaaaaattaatggatgaagacacactgtattatgctttattaaaaatgttttattatattatttcatttccttaaattttacattagtgagagattgttgaaaaatattttcttataatttgaaatttaaaatatattttctttattaatgatggttttgaagagaaaatgcttttagaattagtttatgtgaaaaactaaaagcatacttctaatttcattcatcttttacttggtcaaatgatcctgtgaacacaagtctttaaaaatcaggacatttgttgtttggtttttaatttttattgtttaacgttattattactactgcaagtattttgttattacatgttgactgattgtctctttatttataactcattgataaaagataagcttgtgaaaatataacacacaaaataataaaataaacactttggtaaaactttatattttgcatgtagtattcttaaaagagtatcttataaacaaaaaaaaaaatctttatgagctatggagaaaaagagaaccaaatctgaaatatcttaaagtgtgggggtgtctagtaaaggttaatatccctattaataagaaaagaaaaattgaaaaaaaaaatattaattatattttgttggatattttttacataatactacttatagattcttagttattaattcagaagtatctgaaatttctaatgttactattatggagtctagaaatgtgactttctttgaaaatattttttcttgaaaaaataaattgttaaatctttgtatggtttgaaacaagctacaaagcattgacacaaaagtttgattaagttattcttttgtatgattttcaaattaatgatagtgataaatgtgtgtatgtgaaaattttttatgataacggatgtgtcattttatgtttaaatctggatgacatattgatatttggtagtaatatgcatttcataaatgatgtgaagtccttattgtttaagaaactttgacataaaagaccttgatcaagtagatgtgattttgggaattaagcttatagagaaaaatgatggtatgatttttttacccaatcttattatgttgaaaagctatatattaaagaagtttaattattttgatgcgaaacatgcttttactccttatgactcatccatcaagttaaagaaaaatttgagtaaaggattttcttcacataaatattctcaaagtatcagctctttattgcatttgacaaacttctctaggcttgtctgatattgcatatgcaattggtagattagaaagtaattgaaggatttagtgatacaaaattgaagttctgattttgatgaaataaaattgatgagtgattatgtctttgctttagatggttgtgtagtatcatgaaaatttactagacaaattattatttcacatgaaagcaaaaattattgctttaaatactgctactagtgaggctgaatttcttaaaaatgtattatgttatttgtcattcttaaataagcgtatacctccaattccaatgcattgtgatagtcaaattgttatatctaaagtgacaagcaaaattttaatgaaaaaataagacacttaagagtgagacataagtctataagaaatttgatttctcatgatgtcatttctcttgactttgtcaggtcagaaaataatattgcagatccgcttacaaaaaggttgacatgtcaacaagtatttgagtcgtcgaggggaatgagattaaagcccattatttagttacaacaatggacactcgtctccgtgtgattggtgatcccatgaatggagttcaacgggtaacaacgaaattgtttgttgactaaagtacaccaaaatgaaatttgacggagttgttccgtttctcattcttatgacgaggtgtattataaattgtggcaatattaaggttgagatatttatatatgtgtatttttggtggaaaaaaaatacctcttaatgaatccgatgacaattattgtaggggtgggggtcacaacccactctttgaggattcacctagtgagtgtggtggtggggccgccacggtgagatttgggctaatctctaagtgacactcacgaaacaagatacaagcgcaaagccgtgtaacgcgctaccactgattagaacctaattgaacaccaatattgtaggggttgtgtactaaagtccggttaaagaatatgtagttcaagacaatcaagtcactacatttttctcggatggaagttcataaacactaggtataaggctcaaacccggaaggttccttataccgaaatacaatattacatgctctttctcttatgtttttatacaaattatctttcagaaaatatattttaaaattttaaattatgtgggggaatgttgataaatatttgtgttttaatttaaaatttataaatatatattaatgctattttataaaataaaatatttattttagattttcttaagattttgttttaatgagtcaaactagtttgttagatttgttttgacaattgtaggttagtttccaacggtcatatttccaacggtcatatgttgtttgttgcttaaggtgatttgtgcctatatattatctttcctcatttctaaaaagatgacagaactacagtctcatctttttctctcaaaattttctttcttctcttataaaataatttatttcttgagagtaagagcattggtgttcaaggttcgaggatcctttcgctgcacacgatcggaaccaacgggttgtcgtatcttgggagaggagcgcaatcagaatttcttacccatgcagtgggggcgttttctctctaaggatagcgtttacgcgcttcaacccaggctatttaattctttcccttgatttaatttttcattgtgctcattgtatgatataatgcattatttatgtgatgtcaattaaatttattttactattcttattttgttatttaatttaagactgtgcatcttcttcgtatttattttcctttatttttattttatttttccaacagtttttaactccttgtctgtgactgaattatgccaggaatttgatgtttgataaatttgttaatacatttgtctttgtatgatatcaaacagatttctacacgggagaaagattatttggttgatac

SEQ ID NO: 2943 - DNA, 1751 bp, Glycine max
  Intron number 9 from transcript Glyma10g43840.1 (locus Gly ma10g43840) derived from phytozome v7.0 (chr-ID Gm10; pos 50394887 to 50396637 reverse strand)
gctacaaaagctgaaaagcgtattttagataacaggtagactgccaaattatgaacttttctattatacttttcttttgatttttttcttatctgaattaatatttctatagtcgccagagaaacattttttgttgaagcatttttttttgctttaaaatagtacatttctttttggtttctgatgaataaatcagttttattttaaaagtggcccaaatatcccagaagtatgcccctctttttagaaattgtggtggtggtggtatcatgcgtaacccattagacgttatttaacaatggattatttatatactttttacatgttcatagtatgttgtataaagtatctgtatgctgtcttcacttagaaacagggtgagctgtgagtctgtctcttggtggctataagaactttgaacatttctctgaactgtaagcttaggatttgttagaaataagggcaaatttgtaggatgatgatttaggatttgtcgttttggagggaatttcaagtatttagttgggcaatagatcagaaaacaatttagatcatcaaagtatatagattaaatagagattgaggagacctttgaatcacacccaacagagagacgcaacatctggtggctatgggtattgttctaagtgatgttcatcatcatcatcatatcaccattagaggaaacatcttatatgaaaatgagaattaaatctgagctttataaccttacaatatagagggttgagatttaatgtcaaaaagtcacatgactttttaagtggtaataagacattaaatcttgactgtccatgttttttcatacagtccaaatttaatcctctcactctcatatgatatgtcctctctctctctctctctctctttatatatatatatatatatatatatatacttatatatacttggtttcattacttgtacagtacctgtcaaacttgggtctaagtattctacgaatttaaataagttaataaccagtcactagaaactacaaaacacattgaaatccaaataactgacattacaaaaataaaacctacaacctgaaggacagattttaaatcctactaaatacctaactgcaagtaattgaagaaataatgaaatatattgtgggcaaagttgagataattgattctaaattataaaacaatgaaatggtgcagcaggtctactatcaaatcttaacaaaattataaaatatttgcaacttttttgttagaaaatatttgggtatatgaactcatgttttttggattgcgctgcctgcttttgaggccataggggtgaaactgacctgtgatttggggacggggaggggaggtttagttgctatccacactatttaattacgaaaactggtgtgaagagattccattgttttggttcaaaattaatgtcctattttagaaattcaaagattagtcggtactatttgttctgttcagtcatgtttgtcactgtcagtgggcaatactgaagatgacaactaaattttttattctaaagtgctagcaaagtagccaatttaatgaatattctaccttctgcctacacttctagttcttttgtttagtttatgaagatgatgtcacaaaccaaccctgattaatgggtttattttccactattcaataccttgcttcagatactgaacacttaaccatgtgtcctctctctataatttgacagactacaaaaagaggaagcattaaaggttcgagtga

SEQ ID NO: 2944 - DNA, 2989 bp, Glycine max
  Intron number 3 from transcript Glyma12g03610.1 (locus Gly ma12g03610) derived from phytozome v7.0 (chr-ID Gm12; pos 2418772 to 2421760 reverse strand)
cagatctctaccaggtgatcatttgttttcattcagttgctatgaaagtctgtagtgaatctgataattttgtaatgaattcattaggtgaaaattgtagaatggggtcaatggactttcaaacttgtctggcatgtgcatgatagttgattacgggttccattttcgtccactatcaattcaaatgactctttttgtacactgtttttaactcaaatctcatggatgctgctgaggctttggttttcccgtagtgttaggtgggattagtttatgactcttgtttctattttgttccctgatcatgattgaatttcagtatgatgtggatggatgaatcttaaaagttacagacttaacatgccagtgatgtagtgccttgttacacgtaagagtcaagactcatcttctcataatgtttgtcaactctgattacttatggtttcaaattgtggaccacatccgatgatgcggccacaataatgtgggacttgttgttgtagttgtgttcacaatcacatcacaccttttgatgtgtttgaaaatcacattaagatctgcaacatagcaccacaacagatgcatcacacagcaatgggaatcaaagtcctcaaacaaattgttcttcattctttctatttctttacttagtagatttaaagtggatttcgaagggttggggagattttaggatgttggtgaattaaaggtgggatttgggagggaggagcaggagatgtgggattttgaatgtgagtcatgataatttacgttcagtgcaagcataaaataagtttataccgcaatggccacaatattgaatcacaaatcacaataggtacaattgcagtggccacaaacatgtctgcatccacaaccacaatttaaaaccaaagaccacaatttaaaaccaaagaccacaattgcaaagaaattagcaaacttttcctagttattcagcttgtctgggatgttttgttcattttctctattctctttaagcataataatttatcttcttttcttgtacttatttatctctatcctctaagaaaatcccttttctttccaaagacagcatgggttgcttgttctatttaattggatacaggtttgcttttcttggccttgtaccttatctgtgaggttccaaggtttttgaaaagttgtcaaggaattatgctatgccttgaatttgggtaagggggctgttctgtgatggaaccattttaagggggagagcccaacttgattgctcttctatagacttcattttttgagctatttgtttggttagttgctttatgtgattcgagagcatatgcattttgatgagattttgctattgatattaataacatgaattaaaggaatacaagtatgacctaatcccctagttagagaaccttctctctcaactcccaatccaaatcaaatattccacacctacattattctcattctctcctatcatgattaccaaactcttgagttaagtcgttaactcttacaagtttacaagtccacttactctctgcgagttgactcatgtgcaaacactctttttagtagactcggcgtagactcaatgcaaactcggtaaactctttagtttaccatcgaactagcgagtcagtaagttaaagaaattagaccaaaacacaagtcgttttgggttgtttactgtacgtttaggattcaacatacctctatttagtgtgttgcttctaaattgaagaaccctctcctctaacaacatcaaacttttattctccaacaacatcaaatcctcgacgagaatgctctaccactattatcatctctgcaagttattatctagtagtgatgcatcactacacttggttatttaagtattgtggaatttatgatttactgttttatttattatgttgttgatatgtttaattagtatgttatttataagtattttgttattatttttatatgaagtagactcttacgagtctacgagttaagtttgtgtccatgagtttcaatagactctcaagtttgataaccttggctcctatttaacagattcccctttctctctctgtaactactttctctataacaaccttccccttaacttctaatttctgccaacaggcatgttgggcttaagagttttgggcctctaggtataaacctggaaaggcctacctattgttgattgctggatcctatcacatttgcattccccttaatcaaattctagccctgcctcccaattatttaaaaggaactcatgatctgtttcattctgcccagtgcccacaaatctctatcagctcaaaagggagggggaacaaatccctaaaacaagaattctgggtagctatatctattttgtattagtagcagtaatacacctagaggttgctagttaaggagtgtacaggagtacaattgaagttcaagcttctatgtaagttaatgcaatgagtttcaagttttaatagcttaagcatttacctggttgtggtccaattcttttgtagctagtttttgaaatgcatatagttaacttagtgcctaggatttctacaataaaggtgaataccgtttgattttcttatacactaatgtactaatgttaaaggttagcaaatatcagcaatttgatattctgaaaatcaaaattttccttaagattactgaaataatttatatcaaaatcaagcatttactggatttttgtgtatatcacatacaagccatttaaatccaatgagtgcatgagtccagattctgttgaaacagagagggaggagattatcactcattgacaaataaaaaaataaaaaaaattgataggtcataccttgtttaaaacaagatttgcattcataagtagaaacggacttaaactaactgccatatagattatacaaatctgattaaaaataatttctttgtccttgtgcttccagcttgcgggtgttgttgcagttgaggttaccggggg

SEQ ID NO: 2945 - DNA, 5746 bp, Glycine max
  Intron number 4 from transcript Glyma20g17500.1 (locus Gly ma20g17500) derived from phytozome v7.0 (chr-ID Gm20; pos 24555868 to 24561613)
tgaagtttttatttgagtaagttcatatgtgctgtattctgcttcaaattctcaaccacacccatgaagttatctctagcattgtatattgttttcattggtgaaaaagctgcatctttattcatctaggatgtgtagaattttaggttttctcatttttctatgggtacagcttctttgtttaatttcttctgccaattatcttcacttgtttgtatttatttgtttagaagctatgctaaaaattagttatgtacttgcgggagttggttcatgagtcctaaaactcttgccaggaaactaatattacttggctagagcaaaacagaaatttggaggtataaaaagttgatgtgttttggtagtttgtccaggtttggataacatttagcttgcatgtgcaagaaagatgattcctagaatgtctattgttaataatttatatgtatggtctcccacaaagaataagcagggagctgcagaatattgcatcagatttcccaatgccaataagatcaattgtgactgtaaaagggtgctgtgctgtagcttgcctctacttttacaaatttgttgtcttcaactttgtcagatctttacaaaatcatcctgtcgattattctattgtactaatttgaaaattccaactcttgttaattgacttttattttccattctattgatgtttcattgaaaaaattgggaagtcccatgcattaattctaaattaagtgaagttacttattgtagatgattgcgaaaattaggcagaatcatgtgattctgattgtacgactataattaggatatgctattatttcctttcttagttacaacagttatagggattttggttcctgatttttagctctaaattagtgtacaaaatcagtcttgtaaccctatttatacacaccattgcacctttttcaaacaatagaaaaatacagttcatttttctatatggtatcagagctcgatctgatacttccctgaacccagtgccgggcctaccatggaatgggagaaaacagaaaacgcaaccaaaggggagactaacatgctgctaacctgctctcctgctcacctgaagggattgctctccctatcacaggccacaaactgaatgggcaaaacttcatccaatgggagaggtcagtttgcatcttcctccaaggaaaaggaaaggaaaggtatatctcgggtgaccccaaacaaccagaaaaggggatcccaaccttcaaaaatggcaactggaaaacagtttggtgatgtcgtgccttctcaataccatgacaaatgaaagtggggagaacttcatgtattatgacaccgcataggagatatgggatgcagtgaaggagacatactcaaatattgacaacacttctgccatttttgagatcaagagcctgctccatgacatgcgccagggagaaaaatcagtcactgaatttttcatcaccttgagtagatactggcagcaattggatacctacgaagaaatagaatggaagtgtccagatgacaagaagaaatacagagagctggtggaaaaggacagaatctacaaatttctgttggggcttaatagggaccttgatgaagtacgtagaagaaaatttatgctagggaacattgcgccagccccatacatttaaaacacgacattggcagcaagagggaatcagatccgtccaccatagaagaagaaccgcccctggtgtgatcattgcaggaaactaggccacaccaaggaaacttgctgggacatccatggtaaaccaccagatgcaaagtcattctggaataaggaaaccagaggcaacacagcttataacacttctcaagaaggagaggtaagttctgatccaagtccctttagcagggaacaaatggaagccctgcagaaacttctccaacaaaccttgttgagcagagggaaacctactagtacagcaaaaataacccagaaaggtactttttcacatgctttaaacacctccaaagggaaaaggaaatcctggattgtagactctggagcttcagatcacatgactggggacataactgttttggacaactattctccatgtcatgatcactctacagttcggatagcagatggtacactctctaaagttgttggtaaaggttcagttgtgatttcagaagatatcactctaaattcagtactttatgtacccaaacttgactgcaacttgctgtccatcagcaaattgacaaatgatttgaactgtgtcactaaattttcccctaatgtgtgtgtttttcagattttggggttggggaagacaattggcagtgctgaagtatgtaatgagctctatctccttcaggttaaaattccaatacgaaacccaaagctaattcatgtgtagtgatcccttcaaaaagcgaagtgttggtaatgttgtggcactatagattaggccatccaaattttatgtatttgaaaataatgttcccatcattattcaataaaagactaagaaattttcattgtgaaacttgtcaattatccaagcataccaggagcacttaccccccacaaccttacaaaccttcccaaccattctcgctaatccacagtgatgtatggggaccatccatcaagagccaacaatattaccggctctagatggtttgtgacgttcatcgatgaccacacaagagtcacatgggtgtttcttatgaaggaaaagtcagaagtaggatgaatatttgaaatttttcatacaatggtgcaaacacaattccagaccaacattaaggtgttgagaacagataatggtcgtgaatactataatttcatgttgaattcctacctacagaaaaatggaattgtgcatcagagttcatgtgtagacattccagaacagaatggagtgacggagaggaaaaatagacacctactggaagtggcgagatcactgatgttggccacaaatgtaccaaaacaattttgaggagaagctgtattgtcctcaacctatctcataacagaatgccttctagtgtccttaatttcagctcccctcacacagtccttcagaccacttacccaaccagcaaaatcctcacctcaattcccttgaaagtgtttggctgttcagcttttgttcacaacctagacccacaccgtagtaaacttgatcccaagtccatcaaaagcatattcctaggatagtcacctcaccaaaaggggtataagtgctactctcccacaaccagaaaattctatcatacaatggatgttacatttttcaagcatcagccttactatcccaaagttggcattcagggggagaagatgccagttttgactgacatgacagaattccaacttttagactcaaaaaagggtgagatcatttttggagatggcagaaactgctcctacagaaccggatattgaagaaactatatcagcagtaccaacagaaactgcttctgcggaatcagaagaaactcaaccaaggagtcaagaccaaaactggagggttaacgttagaaaaaggagaaaccagaaggcggtagagccaatcacagttccaatgcaaagccataaatctgaccaggctcttgaaaatgaaatccctacaggtaactttgttcccatctctgaatccgttcatactaatacaagtaacttggatatgcctattgccttgagaaaagggatgagaacctgcactcaacaccccattgaaaaatatgtcctatggaaaattatcaccgggatacaaggcttttgtagcattgcttgatagcactcacgtcccaagaaacattcaggaagctttccaacatcctgaatggactgcagtagtgaatgaagagcttcaagcattggcaaagaataacacctgggagatcactactcttcctaaaggaaagagaccagttggatgcaagtggatatttactattaagtacaatgctgatggtagtataaactggtagaaagccaggttagtggcaaaaaggattcaccaaattatatggggtggactatgaagaaacctttgcaccagtagctaaactcaactcagttcgagttattttgtccttggcagcaaacctagattggcccttgcaccagctggatatcaaaaatgccttcctgaacgacgagttggaagaggaagtgtacattaagattactttaggttgtgaagcagtcagcacctcaaataaggtatgcaaactccagaagtcattgtatggtcttaagcaatcttcgagagcttggtttgagaggctgacctgagttgtcaagaaagaggggttcacccaatgtcagtcagatcacacaatatttgttaaacactcattggaagggaaggtaacactatttatcgtttatgtggatgacattgtaatcacgggagaagaccataaccctatcaatcacttgaagagttttctgactagagaattcaaggtaaaaaatttggggcagcttaagtactttctagggatggaagtggctcgaacaaagcatgagatctatatgtctcaaaggaagtacaccctagatctacttcaagaaacagggatgcttgggtgcaaggcagccacccctatagaaccaaccaaccagaatagctccaaagatgatagtcctccagctgataaaatcaggtaccaaaatctggttggaaaattaatctacttgacacataccaggccgaacattggttttgcagtaagtatggcaattcgccatatgtcaaatcccacagatgttcatgagaaaattgtgaggagaatcctacaataactcaaaggtaccccaggcagaggtctctacttcaagaaaacaaagacaagggcattgaagtatatgcagactcggattgggcaggttgtgcatctgacaggaaatcaactactggttattgaacctttgtgtgggggaacttggtaacttggaggagcaagaagcagtccttggtagccaggagtagggcagaagccgaactaagagccatggcacatgacatttgcgaaggaatttggctgaaaaggatgttggaagaaatcaggattcccaccaactcaacaatgaagatactctgacaacagagctgccataagcatggccaaaaatccagttcaccatgatcaaacaaaacatgtagagattgatgcttcattaaggaaaaaactgaccaagacattatagctgttacccatgttccatcatgtaaccaaacagcagacatcctaactaaagctcttccaagacgctcatatgaggacatcagaaccaatctgggaatgatagatatctatcacccagattgagggggagtgtagatgattgcggaaattagacagaatcatgcgattctgattgtacaactataattaggatttgctattatttcctttcttagttacaacaattatagggattttggttcctgatttttagctctaaattagtgtacagaatcagtcttgtaaccttatttatacacaccattgtaccttttttcaaacaatagaaaaatacagtttgtttttctatacttatcaaccattcaatttctctcactttatgctaggataatgcttaaaccttttatactttgtcctttgttcgtgtttgtaaattgtgcctctatttatttgagatctcgacatatttaaccataccagaattcaataaatatttgcagctatcgatctaccttacaccaacttttccaaggaa

SEQ ID NO: 2946 - DNA, 1218 bp, Glycine max
  Intron number 4 from transcript Glyma04g08130.1 (locus Gly ma04g08130) derived from phytozome v7.0 (chr-ID Gm04; pos 6372668 to 6373885)
ctcttgctggctgcaagctcataagaaaagaaaaggtttggttcagtagtcaactctatgttctttgttgatgatcattattgttgttactattattactacgctgctcataaatgacctattttaacaggccttgtcttaaaactaaaacaattctgttatttttccttagtgatgagtaagtttttgtttttattttttaaaaaatctggttcgcataagaatttagattttagagttactttactctgaatttctcagggaactctcctaggaatctttaatcaatctacaaaggtgataggttttcaaggagttctgaatcgatatgcatcatattctgagaaagtgcatatcagtacaaaatttgtttgaatgatatgccctttactaacagagaattagagttttcatcgtctcccttctttagaatcctcttgctgtgtggaatggggtggtaatacaatcttggtgacgccttaaattttgtgattttgtcctcttgcctatcataattttttaccaaccttggaagagtaaatggcttctctaacttgtaattgtttatggtgaaagatgagagcttttgtgtgagagagtaaatgcatcagctaacatagattgctatacatcctgcctgcgtgccttttgtcaatagatgctagtcagttcttttgtggggtgcacagtgaaatttccctgatagtggctttttgtagtttttggtccaacttattttgggctactcttctctttgtaaggagaagctaggccaaacagttttttttttaaaaggagcttttcaaaagtatcttatttaataagagaaaacacaaaaaaaaaacctttttaaaaacactagttttaggagcttttggcttctatttctacttttccttctttatttcaaatcccaagatccaataacatactaccgaggaaatttgaacttaagagtaatttaagcttaaaaaattatagaattaccaaacaatttaacttcaacttcaaatttaaagctcgtatttttaactttaattctaaagtaacttttaagctaaaaaaaattggccaaatgctacgttagtttagcatctgcatactatattcttttcccagtccttattatgcctactatctgtgctctctactataaacttgatttctgcttatttttttgcccttttcttactgtgaaattactgttacagtcctctt

SEQ ID NO: 2947 - DNA, 842 bp, Glycine max
  Intron number 1 from transcript Glyma03g24570.1 (locus Gly ma03g24570) derived from phytozome v7.0 (chr-ID Gm03; pos 31449871 to 31450712 reverse strand)
cccggctcgaaacaacggagaggttcgttgctgcaacaactatctgtattggaatttgatagctttcactgtattacatcaacaatttaaattctttgcattctcagcgtaaaacaccgtcaactgaatagaaatcatagttggtatgaccaaaaagtagttattgtaaaagtctataaatttatcatacgtagtggtttatggttggatgccagtgtagaaacctttcatagtttgtatgacctttgaagtagttattgtaaaagtccataaatttattatacatgctagtttatgattggatgtcactgtagaaacctttcgtagtttgtatgaccattgaagcagttgtcgtaaaagtcgataaataaatttaccgtacatggtggtttatgatttgatgataatgatttgatgatagtgtagaaacctttaatactgttgtgcatgtactatttattattattattattattattattattattattattattattattattattattattattagggttaaatacatttttggtttctcaaaatatcttaaaatttagttttagtacctatgaattttttatgcattttagtccttaccaaaagtgatatggttttcttttagtccttctttagggattgaaaacatgtgcttctataatgtagagactaaaaaatgtattgaagttttacagggagtaaaaccgaatttcaagatattttgggagaccaaaaacataatttatgctattattattaattttttttgggagaaattattagtattatttttatcattattatgattataatattgttatttattatttcaggtgaga

SEQ ID NO: 2948 - DNA, 1682 bp, Glycine max
  Intron number 1 from transcript Glyma14g10720.2 (locus Gly ma14g10720) derived from phytozome v7.0 (chr-ID Gm14; pos 8908809 to 8910490)
ctttagacatcgattccttatctccttcacctcaggtatataataatcatcattattgatattattgttattattctacattttattttctactatcgatttaatgttacacgcaacgcaacaacaacaacaacaacgagaataatgattataatctgcttccaatcagcctcgtttagcacttttcatttgccgttttccttccttcgattcttccttcttcttctttttcttttattcgtcgtttaacgctccccccccccccccccccccccggaattctgcgttttcgttgcttgcttgtcgtttaactgagagtggctgcgattgcgtttttgagtttgaatcgtttgtttcttcctccaaagcggaaacggcgttttcgatgtggtttttggtttctgatatcgggtagtggagcttgatgtaagaagaataatgtgagcttgtgattcttcacggtgtaggtgttaaatggttaccgcaaatgtagttagtcactcgttcacttttggatgttaattgagggttttttcaaaatcggtgacttggatgggttaaagaaattggactgtggtttttgacttttcttactattatttatttattaagaatttaaaatttttattctataatctactcagaaatcatcgttgcctcaaccaatcagaaattgtagttggaactgtaaaagtcaacaaatttaagttacaggtaattggataacgatataaaaaaaaaaccattttcactgccagtgtagtgtaaaaatcctttatgccgtaggtacataaactatttacttttttcttcttctctctattgaaaaagagtaaataatatctacatggaccgtacgtgtttggattggaatgaaattgattattataaaattgattttggtagaagtagaagttaatctacatgtttcaactctatcatgatttttatgcatcataattgattttactgtgatttaaaaaaaaaaaaaaatcaaaacttgcaaaatttggtcaaaatcaatattgacccaccttaccatgatctatcatgattttggaggttatccaacacatactaaaagttctaatcataaatcacatatcttatatgataagtttattgattttctctgaacaattcatacgaattaaactctaatttagaaattttttctaaggggatctttaattggttgatagtttatgagttatgacggcacatgaagttagacttttttttttttttttttaataatgttgtgatctgagtaaaataatgattttcttcaaaaaggtgtatcttcaaatgcaatctatgatgttgctgccttgaaagattttgtgccttgttatgggttgtttctttgcatgtgacttttgttttgtgttttcattttgttgccccaaacatgttcacgtctttgctaaatgttcacacacgattaacggcttgttttgttaaaggaaaagaacttgctttcttagggggagcttcaaagttcaaacatagtattctactattcttcattgccaactataaacttaaacttgctataaaacataaaggcaatcgtatataatgaacaatttgttatctgtttctgttaacttcatcatgtgctgttcctgatttttatgctactgatatgtttctgcaggaacatatcatcagaacacgtc

SEQ ID NO: 2949 - DNA, 6727 bp, Glycine max
  Intron number 2 from transcript Glyma06g39410.1 (locus Gly ma06g39410) derived from phytozome v7.0 (chr-ID Gm06; pos 42223867 to 42230593)
ctggacttgttctctttggccttatcaaaagtaagttgctcaatctcaactcaagctgtatgatattcaagctcatgcatgattagtattttcttgtgaacgtagttggtacttagtcttgcaaaacacattatatgtaggaaaaagatataggggactcacgatgtgtcaataagagctagagagacaaaaaggatgagtgataattgatattttactaaaaatcacaaataccttcaactagagacaatccagctttagtaaggtaggatcattaattattgctacaacgatctttttccaagtaattaacaacatctgcatacatataacttagagtcaagaccacttgttatgaacaactttatgtcggatggtcatccatgcactcagagatggagagataaaagactgatgtgattaatggtatgatattaaagaatgataaagagaaatcaaggtgtaggtacaatttgagtgtccaaatattgggactcttgtatgttagcttagggccaagccaaaccgtatatagattgaaaagtgagtcacgctagcttatattgcatacagtaaacttgaatactataagaaagctgtgactttttttcttttcctttggggaacttcttgatagtaccatcttggtctttcatttgatcaaatcagaactagttctctttgaataatattcagcttgacatggtactcaacttaaagttttctttttatattatatttttatactactgtgttttggaaaaagttgcactagtaataaccccattaagagtgttaaaaagaaagaaaagactgagagtagcatggtttcactttacctgggaattaaaatgcacttggaatggttgtgattttggctttctaggttttacagtgaggagtgaatgaaactaaacagaggcaaggaccatagaaggactcgtgcgctaagttgaggtgaagaagcgtgacgagtgcgctaccccataaaagagagaaagcgagaatatcaagtagtgaatgtatgttgtaaaaggcatttttcattacaataattacaacaatgccacaggctcattttctaaggcggtccacttagaaccatcgtagaataggtgtcatagaaacttatatttctagtaatgcttccactctcttctttgaaatcaagcttctcaaacgcttctagagtcacattcatcgattattacaaattaaaatgtttccatccacttcagtgttctccctcattacttagagaaattaatgatttggtcttgatctaatataatggtataaggtagccaacatataatgcataggatccaaatagtaaaattgtgtaataagatactttatgtatgttttagtttggtttcttatgtttaaaaagtttcactttagtctcttgttctcttttcactctcattttttatttgatcctcacaaacttcacttggagacataggtgtgagggtaacctttttccttttatgaacaaatgaaaatttgtatgtgacaccattatggacaacatccttatcatactgccaaggccttccacgtaagagattgctagcctccatagggactacatcaaatagtatctcatcaacatattttccaatggaaaagcatatcaaaacttgtatatctacaactagctccccattctcactcaaccattgtagtttgtaaggcctagggtgagggaaagttttcaaagcaagcttttctatcaatctttggctagctacaaaagtccaattttccccatcaataatcaaagaccatattttccccatgaccatgcacctagtatgaaaaatgttctccctttgtgtttcatctcaatccttacacacacttcctattaacctcctaaccatcaaaagatcacctttcaagggttgtacatcacattgacctgcactctcagtacaagaactagaagagccagaaaaagatgcactagtaataaccccattaaccaacacagccattgtccttttgttaggacattgggagaccatatgaccctttcccaaacacttaaaacacttaaaacatttaccaagggaagcacctttaatgagatttaaatggagatccactctccttcttgtatttttgtttcctctttacttgttgttccaccttgatagcttgatgaatgagatcctccaaagagacatagtggtccaactctacaatatcttggatctatccattgagaccatgcaaaaaccttgccatggtggcctcttgaggaaatttctatctctttgtaatactcatccacactgctatttccttgaaatagtctttgaagcttgttgtgcggtctctcccataataaggtggcaagacaaagatatgaaacaaatgggttcgaaaaaggagatgaacgagaaagttaatctatgttgatacatacatatatatatatatatgtatgtattgtaattttttaggattagactcctctaagatgcagtctgtattttagaactacgtatatctaaactactcataataacaaattgttaagatcattacaattaattaaaaattttcacatcatattttttataaataaaaatttgtcacctaccaccaacatcatcaccatcattatcaccggtggtgatgatgatggtaatgttgatgacaacaacaattatggaagtgataatattggtggagaaaataatatattttgttcttaagagaaaattatgatatcaaaatataaattaatgataatttggtgaattcttttggcgttgttctttaatttcatgaaatctaaagtcttattttgataatttatgatgatctttatcaagatgaaactctaattaattttgattaaaaaaactatttcatagattattatcaagataaaattttaattttaattcaagaacaatacaaaaatacttaaggacctatgtctaaattgtattatctttattattaggaaaattgataaactttgataccaatacaaggtaagttataatagttttcacttaattttacctatgcaattttggtaccacaggttctaattgtgtgaattaggtcgtctagtatcataattgtatgatttttctccctccaccagtcattaataaaaatttaatatatttttccaacctgcaactagatgatgacatgtaaatgtcatgacaattgacctattacttgacatttatattgttgtgacttaattaaacttttgatctctttgttgttgcaatagtgaatttccaagggagcaaataagttgcgtcagtatatactagtttttattccgtgcaatgcacaggataaacaagtttggttgtgtagtgataggatgattttgtattaaacaatatagttttagagcaaaaagctgctcaatttttttttaaaattatttattttggcatatgataagtaaaactttaaaagaataattcaaattaataaaactttgataacaggtgttattgttaatctagcttgttgttacaaaatgttgtaaattaatgtaggtaatttgttataagaaatatatcatttttcaattattctttatacgtatcaaacacttgatcaaaggaaataaagataaaaataattcaacaatatatgattttatattcaataatatttgataaactatattttgaattgtaacaaaatgttttttggtagcaaagatgcttaaatttcaatatcatgtttcatttccctatcaatttgaaattataacgtaatgttgaatgttacacaacttaagaaatatagaaatacaatggtaataaatattgaaatattatacttgatagacatttgattccaaaacataatttctcaattgggtggcatttagtctagtgttattacacaatccaaaaaaattttctatatttctgaatagcgtattgagaagatcaatcttaaatgcaacaattgtacattatatagtattagagacggaccaacatttaaaccaaggggattggccaccacctcccccctcttacaaagggatgcttggttactatagggaggggtcgtgtgtattgcacactatttgaacgtcatcctagctacatatgatgagatgttgatcataataaatattaaaataattgagaatgtattttggtaaaagataattaggtgacgatcaaatacaactcttaaaactagatgctgaaaataaaaaacttgaagttatgatgtttcatttaattagtgagaattaatacactttcttttatgatcatcacaacacatttattttattattttttaaactttgaagaaattaagagtgtatttacttcttatttctttggcttttttgggattcaaatttgagaagaaaacagtccataccaaaatccctaaatcaaatggccgaagaagaatttggataacctatagtcaatttgcatgcatctcattgtgcagtcatgaacttagggctccaatttttttttatattcagtagttttggaaggattgaaaaataaaattaaggattttctttccccatatgactataggtgatccaccccaatagaagacaagtcaaggaaaggagaaaaagacagaagacgacaatattactcaaggttagtgtgatttttccaaaatcaattattttccttaagtgttttatgttttcatatggtacctcaaagagaacaatggagacaaatccaacttacttatctggtataaataaataaagaaacattttaaaaagaaaatcctcaatttagtctcttaaggttacatgttttatcacatgttactttctgaaaatatttagtgactacattatttcttcaaatatttttatgtcataatttgtagttttcaaaagtttttctccacaatgattaaatcaatttcacatttaagccattctacccctactataatgtgtatatcagcatgcatggttttatgcctacttgacgattttctattctttgttgtgtaataatattgtcacataactagttcacaattttacaccattatgggagtgaacatattttagctagtttcatttttgtccataattcttggcttagaaatatgttcttgatcaaataaacagggctatcaaaacaaagaaagcaatttaggattggagatgacggtaaaatattatttgatgaagaagagctcaaaatgatcctagattttaagagatgtgaggactatattgaggttgtttgtggcactccaaacaaaaaatatggagattatgttgggaggctaaaaattaataatgaaggtcaatatatcatcacttgtgagtgtttccctaagtgtcccttgggtaagttttccacttcaatttctcaagttttttttttttgtttgcgatagtataattcatctctaatgtttcaagcaagtatttttattttgtattgttataattgtacaataaaaaaataatgggacacgaactgtagagtctgttgatcttttttagagccttatttatgttatttaaaataggttaaataatagttttattttgtaatttgtaaaaaacaaataaatagcagatatatagatttaagtttattaaaaagaatatctgtgagacataatcactatttcttttcattttaatttattagcagtataaattattattataataaatataatttggatcctatgcattatttgttggtggaaacgagggagaacactgaagttggaagaaacatgtttgtttgtaataataagtgaatgtcactctagaagcatttgagaaacatgctttaagggaagggagtggaaggtggaagagaaacatatgggttcattgcgaagacgaagacacctctgataaaatattacacacaccaggcaaatgtggctaaccggaaagactctgcaatgaggaaacaaaacattcacagggatgagttcctgcattgcaagagatgcgggaaggagcgcaggttccatctcaagagcacaccagacattaagaactaccatgatgctttaaacaacaaatgctggacttgttctctttggccttatcaaaagtaagttgctcaatcccaactcaagctgtatgatattcaagttcatgcatgattagtattttcttgagaacgtagttggtacttagtcttgcaaaacacattatatgttggaaaaagatactggggactcacaatgtgtcaataagagctagagagacaaaaaggatgagtgataattgatattttactaaaaatcacaaataccttcaactagaggcaatccagctttagtaaggtaggataattgattattgcaacaacgttctttttccaagtaattaacaacatcaacatacctataacttaaagtcaagaccacttgttatgaagaactttatgtcggatggtcatccatgcactcagagatggagagataactaactgatgtgattaatggtatgatatgaaagtatggtaaagagaaatcaaggagtatgtacaatttaagcgtccaaatattgggactcttgtatgttagcttagggccaagccaaaccgtatatagattgaaaagtggctcacgctagcctatattgcatacagtaaacttgaatactataagaagctatattctagttgagagatctgctcaaatatcaattctaattaatgatgtgaaaattttcatttttcagaataac

SEQ ID NO: 2950 - DNA, 2543 bp, Glycine max
  Intron number 1 from transcript Glyma15g19740.1 (locus Gly ma15g19740) derived from phytozome v7.0 (chr-ID Gm15; pos 17127136 to 17129678)
ccggacgcctcgtcgccctgcccgtgccccctcgggtgcatcctgaaatgaattattattattattattattattaatacttaaatatatttttttatgtttgatatatatcagaatttcgtatttgatccttcgaaattgaaaatttttatgaggtctccttcgtaaccatgaattcattaatggctaatatgaccgttaactcgataccataaattacatatttcaatctattattaattaattaataatttgattctcattcgtatcagcactttattgtttttactggataggtcaaatttgtaagttttagccacaatcaattctaaattgtcacattttttaaagtaaaataattggttggcacttagaaatcttagaattttggaataatttttttggtcaatagctcaaaaagtttgtccacaccaagagggactaaagagtttcttagtaacaataccaaaatttttacatttttagaataagtatcatagaatttctataagacagttgttaaatgttataataattattaaaaaaaaaaacagtttatgtattaacaatgtaagggcatattatactagcttccaatccaaacttgtaatttataataatttttttatcggaggacaatgtgaaaattttacggtgcatagaaaataaactttaagatatatctcaaaagtgattactaattaattaataacagtgtaaaaatatttacatacatttacatttcatcaaaattaaactgaaaaaataaattgtgtatacttgttttcaaccaaatgtgattgtgcccctaaaacctcgttttgacttaaaggaaacaaaatttgcatgcagttgagaattttatactaattttgatttgaacttgttattaaaatagagtaaattacactcgcatcttatgttattttttcaaattacatatgatattctttttttttttacattacttttacctttaattaactaatgtcaatgaactaacatcaatttgtctaccgttattggtgaccatggccaagggaaggctatatatgcaaataaaagactccaagcatatatcactttttttcaaacttaattttaatcaaaatatataaattttgcaaaatcaattattacctaaaatcaagtatacaaacacttaccaccatgttttgtagttgcagaacttggataagcagtctagtgataggaatgcacaaggggtagtctagtttcgaggaccagtgcctccaaagaagaaagaaagaaggtgaaagcttaatttcattcatgatgctatttattacatggtagtgtatttatactgatattctacataatagaatttttcattttgtgcaattgcaatatcaggatggttattcttgtctccctagcctccaacaacaatcacacagcatcattcctcaggattccagatcttcagacataatctttgatgtaagcaggcttcgaaatcttcctcttggtgatgcttgctatttgtacctcatctctgcttgttttgcaccactttctgctaattgcacctttgtaactgctatgctatcatccggtggcccttgcaaaatcaccttgtcctcaaggtgatagtcctcctgtaacttatcctagtccttccatgacgtgttatcagggggcaactcgtgccattgcaccaaaacttgcgatggttctgttgttgctgacctgcgataatccaggatagccaagggagagataatgggctaatcctagaaaaaatgaccaggcaattaggcagcaacatcaagcttaggtgtccctttgaatggcttcaggattgagcaatgaaaaactggatgtatatgagcatcctcttgcagttgtcgatgataggcaataggtcctatgcattcaatcaccttgaagagaccaaagaatcatttggctgatttaccctgcacctccgaggaagctttggccgacatttgtcggtaaggtcaaagtttaagcaagacccagtctccgggctggtacgtcacctattttcttttggcatctgcaaagtgcttcatcgtggtttgagccttgaggagcttcttctgaatgatttggaaagtttcatccctatccttgagcatctcctccaccgcatctaatttcgatgacctcgtgatataatctaggaaattaaacggtttgagctcgaaagtaatatcgtatggggtagtccctgttgccacattccaagaagtattatgggaccattcaacccagagaagaagtttgccccatgtttgcggtttgcggtgcacaaaagcccgaaggtattgctcaataattctgttcataacttccgtttgaccatcactttgagggtgataagcagaacttacccgtaactgtgtcccactaaactggaataactctcgccagaagttgccgacaatctccatgaacaaagaagctattgtatgagccgtatgatctgcaggtaacattcccaaagggatgcccttagaaaatcggtccacgacaacaagaatgactgagttgcc
